United States Patent Application Publication US 2013/0332133 A1 - sequence listing, part 8

SEQ ID NO: 110269 - protein, 495 aa, Unknown
  Bacterial polypetide isolated from the Sargasso Sea
MEGISHEAMSLAGHLKLKNLVMLFDNNSISIDGPTDLAVSDNFKKRFEGYGWNYILINGHNEKEIFKTLKNVQKAKKPTVISCKTKIGYGSPNKSGKASSHGSPLGLEEIELVRKALNWNNKPFNIPNKFLKEWRKIGQRCETQEKKWIKIFNKNKTKFKNLTKNSSISILKREKRNAILEPKNLATRKCSEMTLNALTKQNHNLIGGSADLAGSNNTKTKHQKIIKPGDFSGDYIHYGVREHGMSGIMNGIALYGNLIPYGGTFLIFSDYCKPSIRLSALMQKRVIYVMTHDSIGLGEDGPTHQPIEQLSGLRSIPNLNVFRPADRVETIECWEHALKSSKTPSILSLTRQGLNPIRKSFTNINKCSLGAYEVLRTNNKINLTIFASGSEVNLAIETSHKLAKDKIYCKVISMPSMELFDQQSKLYKNKILNETKFKISIEAGSSDCWEKYVGSSGLTFGINEFGKSAPYKDIFKHFGLTVSNIVSKTKKMIGN

SEQ ID NO: 110270 - protein, 639 aa, Unknown
  Bacterial polypetide isolated from the Sargasso Sea
MQHTVPTNALRFLSIDAVQKANSGHPGMPMGMAEIATSLWGKHLNHNPLNPHWFDRDRFVLSNGHGSMLLYSLLHLTGYDISIDDLKDFRKLHSKTPGHPEYDIDIGIETTTGPLGQGIANAIGMAVSEKIMAAEFNEDDIKPIDHYTYAFLGDGCLMEGISHEACSFAGTHKLGKLICFYDQNGISIDGEIENWFTDDSIKRFDSYGWQTICVDGHNIEEIDKAIVDAKNETNKPTMIFCKTIIGFGSPNKSGTADVHGAALGEEEVIKTREALNWDHDAFKVPQEAYDFWDSTKKGSALNLDWDNLIKTYDEKYPDKSAELRRRIKGDLPDDFENSFKTFLSECDKNNTPMATRKCSKACLDFFVKELPELIGGSADLTPSNNTFSSSSSTFSNENPSGNHINYGVREFGMSAIMNGMVLHGGIKPYGATFLVFTDYARNAVRLSALMEIPSIFVYTHDSVALGEDGPTHQPVEHMVTLRSTPNLNSWRPADLVETAVAWNEAVKSKKIPTCLIFSRQGTSAISRTEDQLSLINKGGYLIDESDNSDITLIASGSEVQLIIDAAKELKSHSISANVVSMPSLDLFLQQSEEFQSSIINPDKPILVVECSHPNSWYRILNRKDKVIGIESFGESAPGS

SEQ ID NO: 110271 - protein, 664 aa, Unknown
  Bacterial polypetide isolated from the Sargasso Sea
MPSRKVLANAIRALSMDAVQKANSGHPGAPMGMADIAQVLWNDFLKHNPNNPKWVDRDRFILSNGHGSMLIYSLLHLTGYDLPMDELKQFRQLHSKTPGHPEYGYTPGVETTTGPLGAGISNAVGMAIAEKTLAAQFNREGHEIVDHYTYCFLGDGCLMEGISHEACSLAGTLGLGKLIAFWDDNGISIDGHVEGWFTDDTPKRFESYGWHVIANVDGHDSDAIRAAIEAAKAVTDKPTMICCKTIIGFGSPNKSGSHDCHGAPLGDAEIAAAREFLGWPHAPFEIPADVYAGWDAKEVGAAREAAWNDKFAAYAKAYPELAAEYERRVLKGELPADFEAKAQAFIQECQAKGEGIASRKASQNAIAAFGAMLPELLGGSADLAGSNLTLWAGSKGIQDDPAGNYVYYGVREFGMSGIMNGVSLHGGFINYGATFMMFMEYARNAVRMSALMGIQNIFVYTHDSIGQGEDGPTHQPVEQLANLRMTPNMAVWRPCDAAETAVAWKAAIERRHAPTSLIFSRQNLKAQARTAEQLANVAKGAYVLQDCAGTPEYILIATGSEVQLAVEAAAALTEQGKQVRVVSMPSNTEFDKQDAAYKESVLPKAVTKRIAIEAAHTDFWYKYVGFEGTVVGMTTFGESAPGNVLLKHFGFTVENVLNAAKSLG

SEQ ID NO: 110272 - protein, 664 aa, Unknown
  Bacterial polypetide isolated from the Sargasso Sea
MSSRKVLANAIRALSMDAVQKANSGHPGAPMGMADIAEVLWNDFLKHNPNNPKWVDRDRFILSNGHGSMLIYSLLHLTGYDLPIDELKQFRQLHSKTPGHPEYGYTPGVETTTGPLGAGISNAVGMAIAEKTLAAQFNREGHDIVDHYTYCFLGDGCLMEGISHEACSLAGTLGLGKLIAFWDDNGISIDGHVEGWFTDDTPKRFESYGWHVIANVDGHDSDAIRAAIEAAKAVTDKPTMICCKTIIGFGSPNKSGSHDCHGAPLGDAEIAAAREFLGWPHAPFEIPADVYAGWDAKEAGNAREAAWNDKFAAYAAAYPELAAEYERRVLKGELPADFEAKAQAFIQECQAKGEGIASRKASQNAIAAFGAVLPELLGGSADLAGSNLTLWAGSKGIQEDPAGNYVYYGVREFGMSGIMNGVSLHGGFINYGATFMMFMEYARNAVRMSALMGIQNIFVYTHDSIGQGEDGPTHQPVEQLANLRMTPNMAVWRPCDAAETAVAWKAAIERRHAPTSLVFSRQNLKAQERTAEQLANVAKGAYVLQDCAGTPEYILIATGSEVQLAVEAAAALTEQGKQVRVVSMPSNTEFDKQDAAYKESVLPKAVTKRIAIEAAHTDFWYKYVGFEGTVVGMTTFGESAPGNVLLKHFGFTVENVLNAAKSLG

SEQ ID NO: 110273 - protein, 81 aa, Unknown
  Bacterial polypetide isolated from the Sargasso Sea
MIKNETVNALRFLSADSVERAQSGHPGMPLGMADIAEVLWRDHFNHSPTNSNWFNRDRFVLSNGHGSMLLYSLLHLTGYKL

SEQ ID NO: 110274 - protein, 255 aa, Unknown
  Bacterial polypetide isolated from the Sargasso Sea
MFDKVTKSVRVLSAAAVEKANSGHPGMPLGMADVGVALYKNFLKVSNEKPDWINRDRFVLSAGHGSMLLYSLLHLNGFPLSMDEIKNFRQLNSKTAGHPEVDTSIGIDTTTGPLGQGFANGVGFAVAERYLASLLGEDVINHFTYGIVSDGDLMEGISFEAAELAAVWKLGKIIYFFDDNNISIDGSVDKVSITNQKEKFESIGWHVLEIDGHNEKEIIKSVEKGRKVEDKPTLIIAKSTIGKFAPNKENTSGVH

SEQ ID NO: 110275 - protein, 668 aa, Unknown
  Bacterial polypetide isolated from the Sargasso Sea
MVAASVSLESLCVNSIRMLAVDAVNKSNSGHPGLPMGCAPMGYALWQNILNHNPNNPKWFNRDRFVLSAGHGCMLLYSLLHLTGYKSVSIEDIKEFRQWGSKTPGHPETFETEGVEVTAGPLGAGISNAVGLAIAEKHLAAKFNKPDCNIVDHYTYVIMGDGCNQEGIASEACSLAGHLKLGKLIALYDDNQITIDGRTDVSFTEDVLKRYEAYGWHVQHVEDGNHDVKGITEAIEKAKLITDKPSIIKISTTIGYGSPNKSDTAGIHGAAVGEEEAALTREFLNWEYPPFEIPDEVYTHFRKSIKKGENLEREWDSKFEEYQKKYPSEGSELKRMLEGQLPENWDSDLPSYSPDDKGLATRKHSQICLGALGPNLPELIGGSADLTHSNYTDIKGETGSFQPHSPEKRYLHFGVREHAMAAVLNGIAYHNSGLIPYGGTFLVFADYMRGSMRLSALSELGVIYVLTHDSIGVGEDGPTHQPIETIPSLRAMPNMLVFRPGDGNETSGAYKLAIQNRKRPSALCLSRQGMPNQENTSIEKVALGGYVVSDCEGTPDLIFIGTGSELNLCIEASKEISSLGKKIRVVSMPCVELFEEQEESYKESVLPSSVKKRVVVEAAHSFGWHKYTGFDGICITMDRFGASAPGGECMKNFGFTVENVVNKTKEIL

SEQ ID NO: 110276 - protein, 246 aa, Unknown
  Bacterial polypetide isolated from the Sargasso Sea
MLIEKLRKEHPQHWANSTAIRVLTLDAVAAANSGHSGMPMGMADVATVLFFNHLKFDPKAPLWTDRDRLILSAGHGSMLLYSLLYLTGYDDFPLEEIKNFRQLGAKTAGHPENFLSDAIETTTGPLGQGIANSVGFAIAEEIQRANFGKSIVDHYTYVFAGDGCLMEGVSQEAITIAGRQKLSKLIVFWDNNNITIDGKVELSDNTNQVERFRSSGWHVLEIDGHNPVEINEAIIEAKKNSKPTMI

SEQ ID NO: 110277 - protein, 200 aa, Unknown
  Bacterial polypetide isolated from the Sargasso Sea
MPTNSELANSIRALSMYAVQEAGSGHPGMPMGMADIASVLWKKHLKHNPKNPNWADRDRFVLSNGHGSMLIYSLLYLTGYDLSIDDIKNFRQLGSKTPGHPEHGITPGVETTTGPLGQGLANAVGMALSERMLAQRFNRDELEVVDHMTYVFAGDGCLMEGISHEACSLAGTLGLGKLIVIYDDNEISIDGKVEGWFTED

SEQ ID NO: 110278 - protein, 666 aa, Unknown
  Bacterial polypetide isolated from the Sargasso Sea
MSKKDKQNPNNEVSLNDMANAIRFLAADAVEKANCGHPGMPMGAADFTTVLYSKFLKIDPQKPDWPDRDRVILSAGHGSMLLYAVNHLVGFSDMTIEEIKNFRQLGSKTPGHPEYGHTLGVETTTGPLGQGISTAVGMAIAEKIQNAKYGDAIVDHKTFVIASDGDLMEGISQEAIGLAGHLKLSKLIVLFDDNNISIDGAIDLSDSTDQLMRFEASGWNVNRVDGHNHDEIETAIQEAIKSDKPSLIACKTKIGFGSPSKEGKSSSHGAPLGAEDIAQMKKNLNWDYEEFEIPSDIKDAWRLVGLKNSSKRQEWEERLLDNKDKEIEFLKDIDGQISEELDKEINEIKKVFSEEKPGWATRKSSQEVLETINKVLPNTIGGSADLTGSNNTKTNNINIIDSNNFAGRFIHYGIREHGMAAAMNGIALHRGLIPYSGTFLVFSDYCRPSIRLAALMDIKVIHVMTHDSIGLGEDGPTHQPVEHLPSLRAIPNLNVFRPADTTETAECWSLAIKSKGPSIIALSRQGCPHLRNTYEEKNKSSLGAYELKSSDGETQVNLIATGSEVSLALEVYEELKNDGINSRVVSAPSFELFNKQDNDYIDKTLGQSGLRVGIEASTGLGWHNYLGDQGLFIGMNSFGASAPADQLYKNFGIDKENIINKIKEKL

SEQ ID NO: 110279 - protein, 163 aa, Unknown
  Bacterial polypetide isolated from the Sargasso Sea
MNQTDPINALRFLSIDAVQKANSGHPGMPMGMAEIATALWSNHLKHNPSNPKWFDRDRFVLSNGHGSMLLYSLLHLTGYKISIDDIKDFRQLHSKTPGHPEYDIDIGVETTTGPLGQGIANAVGMAISEKILAAEFNQDDIKPIDHYTYVFLGDWLFNGGRFS

SEQ ID NO: 110280 - protein, 379 aa, Unknown
  Bacterial polypetide isolated from the Sargasso Sea
MNKIDKELANSIRFLSIDAVEKANSGHPGMPMGMADVATILFKNFMKFNPEDPGWINRDRFVLSAGHGSMLLYSLLYLTGYKTISLNDIKNFRQLNSICAGHPEYVKNSGVETTTGPLGQGIANAVGFAIAEEILKKQLGKKIINHKTYVLAGDGCLMEGISHEALSLAGHLKLKNLILLFDNNSISIDGPTSLATSDNFKKRFNSYGWDFIEIDGHNQKQIYNALKKVQKSKVPSVISCKTTIGYGSPNKSGKETAHGSPLGKDEIDLVRKKLKWNYKPFEIPKHIIQEWRRIGKNNSTNYKGKKIKSYTKKLFSNIIKQEKKNYIKSNEAIATRKSSQIILNVLTKKIPKIIGWVCRSLWIKYTKTINHKINKTWKF

SEQ ID NO: 110281 - protein, 305 aa, Unknown
  Bacterial polypetide isolated from the Sargasso Sea
MLDSELRKSCVNTIRFLAADAVEKAKSGHPGAPMGMADMAFVLWNQFLRYNPDDPDWKNRDRFVLSAGHASMLLYSLLHLAGYKLSMDELKNFRQWNSLTPGHPEYGLTPGVECTTGPLGSGFSNAAGMALGAKMMGSRFNSSDISLIDSRIFVLCSDGDMQEGIASETASWAGHLGLGNLIALYDSNDITIAGDAGLAMSEDVGKRFEAYGWHVQHCDGHNHYEIADCLEESLSVANKPSLIVAKTVIGKGAPTKEGTAGSHGAPLGSEEIEAAKLASGWNDKPDFHVPDEVREVFAERKKELK

SEQ ID NO: 110282 - protein, 597 aa, Unknown
  Bacterial polypetide isolated from the Sargasso Sea
MQQNNSINALRFLSADAVQKANSGHPGMPMGMAEIATALWSKHLKHNPSNPRWFNRDRFVLSNGHGSMLLYSLLHLTGYDLSIDDLKDFRQLKSKTPGHPEYDIDIGVETTTGPLGQGIANAVGMAISEKILAAEFNEEDIKPIDHYTYVFLGDGCLMEGVSHEACSFAGTHNLGKLICFYDQNGISIDGEIENWFTDDSIERFNSYGWHTISVDGHNVEEIEKAIEEAKKESDKPSMIFCKTTIGFGSPNKSGTADVHGAPLGEEEINKTREALGWTYEPFELPEDVYEFWNATEQGSSLNLDWDNLISSYEEKYPEKSKELNRRINADLPKSFENNFDKFLSECDKNNSAMATRKASKACLDFFVKEMPELIGGSADLTPSNNTFSASSSTFSNENPSGNHINYGVREFGMSAIMNGMVLHGGIKPYGATFLVFTDYARNAVRLSALMGLPNIFVYTHDSVALGEDGPTHQPIEHMVTLRSTPNLNNWRPADLVETAVAWKEAVSSKSTPTCLIFSRQGTSPISRSTEQISNIQKGGYLLQTNPDPHLTIVATGSEVQLAIDAANELKTDSIKANVVSMPSLDIFMQQKEDFKIA

SEQ ID NO: 110283 - protein, 684 aa, Unknown
  Bacterial polypetide isolated from the Sargasso Sea
MSDPTAHSRATPKAVPPPRDPHLRALANCIRFLAMDAVQKANSGHPGAPMGLADVATVLFKEFMQFDASAPHWIDRDRLVLSNGHASMLLYSLLYLTGYSDMTLDEIKRFRQVGSKTPGHPEYSHAEGIELTTGPLGQGLAESVGMALAERIMNAHFGDDLVDHYTYVFLGDGCLMEGISHEAISLAGHLRLGRLIAFWDNNSISIDGATSLAVSDNEIERFHAAGWRVLEIDGHDTDAIRRAIETARTTNDRPTLIACRTIIGFGFPTKAGTERAHSDAPGEDEIAGARQTLDWHSPPFEIPDDLLKAWREIGARGRNTRLAWEERVGRAPQALRTEFERRNAGKLPDDWKQAIAAARQAFIASRSEMATRKASGEVLDRLFDAIPELLGGSADLTVSNNTKTKNQIAIEPGQFKGSYLHYGVREHGMAAAMNGIALHGGLIPYGGTFLCFSDYCRPAIRLSAMMRVRSIFVMTHDSIGLGEDGPTHQPVEHLAALRAIPQLAVYRPADPIEAAECWELILEQPRRAALLALSRQPVPLVRNEPGNDNESARGAYILRKADGGPRRLTLLATGSEVHLAVQARDILQKEGVPTTVVSMPCRLLFEEQPRDYQEAVLGASPARVAVEAAVELGWERYIGPKGRFVGMHSFGESGKINDVYEKFDITVEAIVRAARDVLRDNGMH

SEQ ID NO: 110284 - protein, 663 aa, Unknown
  Bacterial polypetide isolated from the Sargasso Sea
MNIEEKCINALRFLSIDQVNKASSGHPGAPMGAAAIAYVLFNNIMNHNPNNPNFINRDRFILSIGHASALLYSVLHLSGYKFSVEDLKNFRQLGSITPGHPERDIDLGIEVTTGPLGQGFANGVGMAISEKMMSQKYSDLINHYIYGIVGDGDLQEGISSESASLAGTLGLGKLIYIYDSNGISIDGSNDLAFTENVAERFKSYNWHVIENINGNDINSIQNAIEISKNELSKPSLIIADTTIGFGSPNKAGSESAHGEPLGEEETNLTRDNLGWDYKEFEVPEDVVKHMNQIITKGNNLEKKWKKDAENFKAENPDQYNNFLQIMKNEFPENWDEQLLENIKNSNEPEATRASSGFAINLISNSLDNLIGGSADLTGSTNTLIKNSENFSKSTPNGKNIKFGVREHGMGGVMNGISAYGSHRVFGGTFLVFSDYMRASIRLSALSKLNSIWIFTHDSIGLGEDGPTHQPISQLMSLRSIPNLNVFRPADRRETLLAWRHALNEVDKPSALIFSRQSLPDISTISDSKIDSATFSKGAFSVYDNSDDDPEIILISTGSELANTIEAAKNFDKNNSIRVISMPCWELFDQQDNKYQKNLIPENTKHIISVEAGVGLGWQKYTRSNDSIISMETFGASAPGNKLIDHFGFSTDKITDRVKKIISE

SEQ ID NO: 110285 - protein, 232 aa, Unknown
  Bacterial polypetide isolated from the Sargasso Sea
MANAIRVLTIDAVEAANSGHPGMPMGMADVATLLFSEFLKFDPQNPKWADRDRFILSAGHGSMLIYALLYLTGYSDMSLDEIKNFRQFGSKTAGHPEYGEVNGVETTTGPLGQGFANAVGMAIAERQLSARFGIEVVNHHTYCVVGDGCLMEGISHEAASLAGHQRLEKLIILFDDNGISIDGSTNLTVSDDHIARFEAYGWHTATADGHDFDSIKMAISDAKNSPKPSFIA

SEQ ID NO: 110286 - protein, 250 aa, Unknown
  Bacterial polypetide isolated from the Sargasso Sea
MKNIEKNLSNAIRFLSMDAVQNANSGHPGMPMGMADVATILFKYFLKFNPKNPNWLNRDRFILSAGHGSMLLYSLLYLTGYKSVSLNDIKKFRQLNSICAGHPEYHPNSGIETTTGPLGQGIANSVGFAIAEEILKKKLGSNLINHKTYVLAGDGCLMEGISHEAMSLAGHLRLNNLIMLFDNNSISIDGPTSLAVSDDYKNRFKSYGWNYILINGHNYREIYNALKKAQTSKKPTVISCKTKIGFGSPN

SEQ ID NO: 110287 - protein, 140 aa, Unknown
  Bacterial polypetide isolated from the Sargasso Sea
MNKQNKILANAVRFLSIDAVQRANSGHPGMPMGMADVATILFKYFLKFNPNNPSWINRDRFVLSAGHGSMLLYSLLYLTGYKSISLKNIKNFRQLNSICAGHPEYKSNSGIETTTGPLGQGISNAVGFAIAEKILKKKIG

SEQ ID NO: 110288 - protein, 480 aa, Unknown
  Bacterial polypetide isolated from the Sargasso Sea
MKANNKDLSNAIRFLSMDAVQKANSGHPGMPMGMADVATILFKDFLKFNPKNPNWLNRDRFVLSAGHGSMLLYSLLYLTGYKSVSLKDIKNFRQLNSICAGHPEYIPNSGIETTTGPLGQGIANSVGMAIAEEILKEKIGKNIINHKTYVLAGDGCLMEGISHEALSLAGHLKLKNLIMLFDNNSISIDGPTSLAVSDNFKKRFESYNWDYILIDGHNEKQISKALKKVQKAKKPTVISCKTVIGFGSPNKSGKETSHGSPLGEDEIKLIRKKLKWSHAPFEVPKKILDEWRKIGSRGIKEAEKWVKKNKYKKISNTSFLKDFLKEKQNVINKPEAIATRKSSEKIISFLTKKNPVIIGGSADLSGSNNTKTKNHQIVKPGNFKGNYIHYGVREHAMCGIMNGLALHSELIPYGGTFLIFSDYCKPSIRLSAIMKQRVIYVMSHDSIGLGEDGPTHQPIEQLAGLRSIPNLNVFRPADTA

SEQ ID NO: 110289 - protein, 508 aa, Unknown
  Bacterial polypetide isolated from the Sargasso Sea
MENHKLANAIRFLSIDAVQAAKSGHPGMPMGMADIAVSLWKNNLKHNPSNPKWINRDRFVLSNGHGSMLLYSLLHLTGYDLNINDLKDFRKLKSKTPGHPEYDIDIGVETTTGPLGQGIGNAVGMALAEKNLAATFNKEDIKIIDHYTYAFLGDGCLMEGISHEVCSFAGTHKLGKLICFYDQNGISIDGEIDLWFTDNTKQRFESYGWQVIEIDGHNIDEVNEATEKAQQETEKPSMICCKTTIGFGSPNKSGTAGVHGSPLGDDEIEITRKELNWEHGPFKVPEDIYDAWNAKDEGAKKEKAWEDLLKTYRQKYPEESNELERRFNSEIPHEFNERFDDFLRDCLLQEDPVATRKASQICLDHFCADLPELIGGSADLTGSNNTFSKHNTELTPDNPDGSHIYYGVREFGMVTIMNGMSLHGGIRPYGGTFLVFMDYARNAVRLSAMMSLPNIYVFTHDSIGLGEDGPTHQPIEHLVTLRATPNLYNWRPADLKETAVAWKESILS

SEQ ID NO: 110290 - protein, 427 aa, Unknown
  Bacterial polypetide isolated from the Sargasso Sea
MLNCTHKILYHIIDILSLSLYRLLKVRVNFNQLSNAVRFLSIDAVQKANSGHPGMPMGMADVATVLFKYHLRFNPKNPNWINRDRFILSAGHGSMLLYSLLYLCGYKSISIEDIKNFRQLNSICAGHPEYKKGSGIETTTGPLGQGLGNAVGMAVAEEIFRKKFSSSVINNKTYVIASDGDLMEGISHEAMSLAGHLKLKNLIVFFDNNKISIDGSTSLSVSDNYKKRFESYGWNFLEVNGHNEKQISKAITKASKSKKPTIISCKTIIGFGSPNKSGKASSHGSPLGDEEIALVRKKLKWNNQPFEIPQEILDEWRNIGNKGQQLENEWLETVNKKSPKIKSELNGSNQKLDLSGLENIIRQEKDKNFESKPSLATRQCSMAAIEKISAFLPGLIGGSADLSGSNNTKTNNSKIINSKNFNGNYIH

SEQ ID NO: 110291 - protein, 489 aa, Unknown
  Bacterial polypetide isolated from the Sargasso Sea
AMSLAGHLKLKNLVMLFDNNNISIDGPTSLAVSDNFKKRFQSYGWDYILIDGHNENQIYRALKKVQNAKKPTVISCKTKIGYGSPNKSGKSSSHGSPLGLDEIKLVRKVLKWKYKPFEIPNKILKEWRAIGSNGQLNEKKWNKLIKKQSKKLNLIKNNNNFKNILNSEKKLAIKESKSLSTRKCSELTLSALTNSNNNLIGGSADLAGSNNTKTKKHKIITPGNFDGDYIHYGVREHAMSGIMNGIALHSNFIPYGGTFLIFSDYCKPSIRLSALMQQRVIYVMTHDSIGLGEDGPTHQPIEQLSGLRSIPNLNVFRPADRIETIECWEHALKTTKSPSVLSLTRQNLDPIRKKYSSNNKCSLGAYEVLRTNKKIKLTILASGSEVNLAIGASHKLAKDKIYSKVISVPCMELFDKQSKTYKNKILNETKNKISIEAGSSDCWKKYVGENGKNFGINEFGKSAPFKEIYKYFGLTKENITNKSKNLIKN

SEQ ID NO: 110292 - protein, 668 aa, Unknown
  Bacterial polypetide isolated from the Sargasso Sea
MERNNSNTNSKVLANAIRALSIDAVQAANSGHPGMPMGMADIAEVLWRDFLNHNPANPYWFNRDRFVLSNGHGSMLLYSILHLSGYKLGIEDLKNFRQLHSKTPGHPELDLDCGIETTTGPLGQGIANAIGMAISEKVLSNQFNTKEHKIVDHYTYVFTGDGCLMEGISHEVCSLAGTLKLNKLIVFYDDNGISIDGSVDGWFTDNTPMRFNSYGWEVISNVDGHNREHISNAIEKAKKCDKPVLICCKTKIGFGSPNKEGKESSHGAPLGEDEVKKTKENLNWRYPSFEIPNDIYDAWNAENFGNELEKKWNEIFQSYEKQNPEKAKEFLRRVNKEEPGGFQKLSNEIVKEVNDKSESLATRKSSQNALNLFAPLFPELIGGSADLSASNLTQHSNSKDILNNQDGNYINYGVREFGMSAIMNGISLHGGFIPYGGTFLTFSDYSKNAIRMSCLMNLKNIFVFTHDSIGLGEDGPTHQAIEHINSLREIPKNTVIRPCDSLETSLAWKHALSKDVGTTCLILSRQTCEFIPRNSEQIAGISRGGYVILDDSNFEVIIIATGSEMGIAYEASKKLIEDGVKIRLVSMPSSSIFDSQDEEYKNSVIPKDFHKIVTVEAGSPNFWFKYTKAVGIPIGINTFGESAPGNSLLEFFGFTSQNIINNVKKILG

SEQ ID NO: 110293 - protein, 242 aa, Unknown
  Bacterial polypetide isolated from the Sargasso Sea
MSLHGGIRPYGGTFLVFMDYARNAVRLSAMMSLPNIYVFTHDSIGLGEDGPTHQPIEHLVTLRATPNLYNWRPADLKETAVAWKESILSKSPSCLILSRQGLPQVKMSEDKISNISKGGYLVQKDENAELNIISSGSELQLAIQAAKDLDQSGIKVNVVSMPCLDRFLEADLEYQNKVIQKDLPSIVVEAAHPNSWYRILGRDDLVIGMTTFGESAPAKMLFEEFGFTAENIVSKAKKLLNK

SEQ ID NO: 110294 - protein, 127 aa, Unknown
  Bacterial polypetide isolated from the Sargasso Sea
MSKLYKELANCIRFLSIDAVQKANSGHPGMPMGMADVVTVLFKDFLNFNPKNPDWINRDRFVLSAGHGSMLLYSLLYLTGYKSISLKEIKKFRQLNSICAGHPEYHPSTGIETTTGPLGQGISNAVG

SEQ ID NO: 110295 - protein, 637 aa, Unknown
  Bacterial polypetide isolated from the Sargasso Sea
MFDDVTKSIRVLSAAAVERANSGHPGMPLGMADIGVVLYKNFLKVSNKHPDWINRDRFVLSAGHGSMLLYSLLHFNGFDISLDEIKNFRQLGSKTAGHPEKDFEIGIDTTTGPLGQGFANGVGLAVAERYLASVFGEDVVDHHIYGIVSDGDLMEGISTEAAELAGLWQLGKLIYFFDDNNISIDGNVTQVSVTNQKQKFISMGWDVLEIDAHNENEIINAVESAKSVTNKPTLIISKSTIGKYAPNKENTSGVHGSPLGENEFELFLKNIGFSGDPFLHDSEIYSYFDEKRANDNSKYDEWKANLESKLQSDKNFRQLWNQFNNFETSEVELEWSSDEASRVVGGKILNEYGLSNKFIIGGSADLAASTKQIISDDTFGSNNFGGNSIEFGIREHAMGGIVNGLALHSNLIPYGSTFLVFSDYMRPSMRLASLMNVNSLFIFTHDSIYLGEDGPTHQPIEHLMSLRLIPNLDVIRPSNSMELIHSYRYALEKRDNPKAIILSRQNMKFFDNDVSYEDFQTGAYVFMPGSDITLIATGSELELAFEIGTKLKDLSVQIISAPILNRLNEERIESLSLNQNIFTIELGRTIGWDTYIQNIKKSFSIDSFGESAPIDQLAEKFNFDAEKISDEIRSLLN

SEQ ID NO: 110296 - protein, 564 aa, Unknown
  Bacterial polypetide isolated from the Sargasso Sea
MSNSIRVLSMDAVQKANSGHPGMPMGMADVSTILFKYFLKFNPKNPRWMNRDRFVLSAGHGSMLLYSLLYLTGYKSVKLKDIKNFRQIGSICAGHPEYVQNSGIETTTGPLGQGISNAVGFALAEEILKKKIGNDIINHKTYVIAGDGCLMEGISHEAMSLAGHLKLKNLIMLFDNNSISIDGPTSLAVSDNFKKRFESYGWDYLEINGHNEKQIFNALKKVQNAKKPTVISCKTKIGYGSPNKSGKASSHGSPLGTEEIELVRKELGWNYKPFEIPKNILKTWRDIGGKGEKIENRWNKIYRKKKSKINKLFKNDFLKSAVNEKKIALKEEKSLASRKSSESIINSLVKSNNTLIGGSADLAGSNNTKTKNHEIIKPGNFNGNYIHYGVREHAMCGIMNGLALHSKFIPYGGTFLIFSDYCKPSIRLAAMMKQQVIYVMTHDSIGLGEDGPTHQPIEQLSGLRAIPNLNVFRPADRIETIECWEHALKSTKTPSILSLTRQNLNPIRNKYSNTNKSSLGAYEVLRTNKKIKLTILASGSEVNLAIEVSHKLAKDRIYSKVISV

SEQ ID NO: 110297 - protein, 297 aa, Unknown
  Bacterial polypetide isolated from the Sargasso Sea
MNKNYKDLSNAIRFLSMDAVQKANSGHPGMPMGMADVATVLFKYFLKYNPKNPNWLNRDRFILSAGHGSMLLYSLLYLTGYKSISLNSIKKFRQLNSICAGHPEYHPGSGIETTTGPLGQGIANSVGFAIAEEILRKKIGKDIINHKTYVLAGDGCLMEGISHEAMSLAGHLKLKNLIMLFDNNSISIDGPTNLAVSDNFKKRFEGYGWNYILINGHNYSEIFKALKKVQNSKKPTVISCKTKIGYGSPNKSGKASSHGSPLGKDEIELVRRKLCWMYKPFEIPKNILNEWNKIGSK

SEQ ID NO: 110298 - protein, 258 aa, Unknown
  Bacterial polypetide isolated from the Sargasso Sea
MIKNRTVNALRFLSVDSVEKAASGHPGMPLGMADIAEVLWRKHLRHSPKNPKWFDRDRFVLSNGHGSMLLYSLLHLTGYDLTIEDLKDFRQLKSKTPGHPEFGITPGVETTTGPLGQGIANAVGMALAEKILANLLNSKKTNVIDHFTYCFLGDGCLMEGISHEAMSFAGVHELNKLICFYDSNGISIDGEISDWYKDDISLRCKAYGWNVINNIDGHNREEIDEAISVAKKSKKPTMIVCKTHIGYGAGNKQDSESS

SEQ ID NO: 110299 - protein, 509 aa, Unknown
  Bacterial polypetide isolated from the Sargasso Sea
FDHFTYIFAGDGCLMEGLSHEASSLAGHLGLSKLIVFFDDNSISIDGSTELSNSENTMKRYESYGWDTISIDGHNHVEISKAIVQAKKNTKPTIIACKTKIGFGSPNKESKSSSHGSPLGEDEIKLTRKNLEWKYDSFEIPDDMLSKWRSFAEKNKAIRQNWIEKNSNTISSKKYKDFFSKNLSDEIIDKLKEFKNKHFKEKTNCASRKASEAAIEFFSSEIDNLVGGSADLTGSNNTKTKNMTHISKNDFKGSYIYYGIREHGMAAIMNGLALHGGLRPYGGTFLVFTDYCRPSIRLAALMNLPIIYVMTHDSIGLGEDGPTHQPVEHLASLRAIPNLTVIRPSDMIETIEAWQYALESQSPCVIVLTRQNLPMLRTNNKINIVENGAYPIIDFENYQGTILATGSEVEIACESSKILSSENINIRVISFPSWEIFDKKSKKEKMEILGNKLLFAIEAGSVNGWEKYVSNENFIGMKSFGASGPYKELFEHFEITSKALVKLIKERVK

SEQ ID NO: 110300 - protein, 663 aa, Unknown
  Bacterial polypetide isolated from the Sargasso Sea
MHKELANAIRFLSIDAVETAKSGHPGMPMGMADIAVALWKYNLKHNPQNPTWFNRDRFVLSNGHGSMLLYSLLYLTGYDLSIEDLKKFRQLGSKTPGHPELDMSIGVETTTGPLGQGIANAVGMALAEKMLSSRFNKDDELKPIDHFTYTFLGDGCLMEGVSHEACSFAGTHRLGKLICFYDQNGISIDGEITNWFTDDTRQRFESYNWQVLEVDGHNIEKVLEAIQTAKKDVERPTLICCKTIIGFGSPNKSGTSGVHGSALGEDEVKKTRVELGWDHEPFHIPDEIKSEWDGKVAGAELNASWDKLMKDYSEKHPESFKELKRVINNELPINFEDTYKDFIYELSEGDKKDIATRKASELCLNYFCEKLPELVGGSADLTGSNNTFSSVSTEMLPESPQGNHIFYGVREFGMTAMTNGMVLHGGIKPYSGTFLVFMDYARNAVRLAALMKIPNIFVYTHDSIGLGEDGPTHQPIEHLVTLRATPNLNNWRPADIIETAVSWKEAISSKRTPHSLILSRQNLPFIDRSKEQIELIEKGGYLLSFDDKADITLISSGSEVKLIIEAAKIIAKEGLKANVVSMPCLDKFVSQDKAYRDSIIDPEIPKLVVEALHPNSWHCLVNLNDIVIGMETFGESAPGNELMNEFGFTVDNIVSQAKKLTAK

SEQ ID NO: 110301 - protein, 463 aa, Unknown
  Bacterial polypetide isolated from the Sargasso Sea
MVAASVSLESLCVNSIRMLAVDAVNKSNSGHPGLPMGCAPMGYALWQNILNHNPNNPKWFNRDRFVLSAGHGCMLLYSLLHLTGYKSVSIEDIKEFRQWGSKTPGHPETFETEGVEVTAGPLGAGISNAVGLAIAETHLSAKFNKPDCKIVDHYTYVIMGDGCNQEGIASEACSLAGHLKLGKLIALYDDNQITIDGRTDVSFTEDVLKRYEAYGWHVQHVEDGNHDVKGITEAIEKAKLITDKPSIIKISTTIGYGSPNKSDTAGIHGAAVGEEEAVLTREFLNWEYPPFEIPNEVYAHFRKSINKGENLEKEWDYKFEEYKEKYPSEGAELTRMLKGQLPENWDSDLPSYTPSDKGLATRKHSQICLGALGPNLPELIGGSADLTHSNYTDIKGETGSFQPHSPEKRYLHFGVREHAMAAVLNGIAYHNSGLIPYGGTFLVFADYMRGSMRLSALSELGVI

SEQ ID NO: 110302 - protein, 265 aa, Unknown
  Bacterial polypetide isolated from the Sargasso Sea
MNKKNKTLSNAIRFLSMDAVQKANSGHPGMPMGMSDVVTILFKYFLKFNPKNPGWLNRDRFVLSAGHGSMLLYSLLYLTGYKSISLKDIKNFRQLNSICAGHPEYIPNTGIETTTGPLGQGISNAVGFALAEEMLKKKIGKDIINHKTYVVAGDGCLMEGISHEAMSLAGHLKLKNLVMLFDNNSISIDGPTSLTVSDNFKKRFESYGWDYFLINGHDEKEIIKGLKKVQNAKKPTVISCRTKIGYGSPNKSGKASSHGSPLERR

SEQ ID NO: 110303 - protein, 285 aa, Unknown
  Bacterial polypetide isolated from the Sargasso Sea
MDNKDLANAIRFLSIDAVQAAKSGHPGMPMGMADIAVSLWKNNLKHNPSNPKWINRDRFVLSNGHGSMLLYSLLHLTGYDLNINDLKDFRKLKSKTPGHPEYDIDIGVETTTGPLGQGIGNAVGMALAEKNLAATFNKEDIKIIDHFTYAFLGDGCLMEGISHEVCSFAGTHKLGKLICFYDQNGISIDGEIDLWFTDNTKQRFESYGWHVVEIDGHDIDEINKATEEAKKETERPSLICCKTTIGFGSPNKSGTAGVHGSPLGEDEIEITRKELNWEHGLFEIP

SEQ ID NO: 110304 - protein, 486 aa, Unknown
  Bacterial polypetide isolated from the Sargasso Sea
DDNGISIDGEIDGWFTDDTAARFKSYGWQVIDKVDGHDADAISSAIDKAIKDTNNPTLICCKTQIGFGSPNKAGNASSHGSPLGEDEIEKTKEKLGWKHEAFEIPQDIREMWDGSKKGEKLEKSWEDLFANYSRHYPDLAEEFKRRINRNLPENWEEISKNAINEINHQAIDLATRQSSHLSLNKLGDSLPEMIGGSADLTGSNLTKHDASVVIDETNSDGNYIYYGVREFGMAAIGNGMILHGGVIPYSGTFLTFSDYSRNALRMAALMEIQNIFVFTHDSIGLGEDGPTHQPIEHVSSLRIMPNMNVWRPCDAVETITSWCHAIENQSGPTSLILTRQKLNHQLRTEEQVQAIKKGGYILKDSKNTPEIILIATGSEVSVAMESAKMLEADGIDVRVVSMPCNNIFNQQPESYRSAVLPKSVKSRLAIEAGITNFWWQYVGSEGDVIGIDEFGLSAPANELFEYFGFTVKNITERARLLIEKNS

SEQ ID NO: 110305 - protein, 444 aa, Unknown
  Bacterial polypetide isolated from the Sargasso Sea
DAVEAAKSGHPGMPMGMADIAVALWKYNLKHNPQNPTWFNRDRFVLSNGHGSMLLYSLLYLTGYELSIEELKNFRQLGSKTPGHPEFDIDIGVETTTGPLGQGIGNAVGMALAEKMLASRFNQDNGLKPIDHFTYTFLGDGCLMEGVSHEACSFAGTHGLGKLICFYDQNGISIDGEITNWFTDNTSQRFESYGWQVLEVDGHNVEETIEAIRTAQKDTERPTLICCKTIIGFGSPNKSGTSGVHGAALGEDEVKKTRDELGWEHEPFHIPDDIKSEWDGKDEGAELNASWDQLMMEYSKKHPKSFDELTRIINNELPKNFENSYRDFINELSAGDQKDLATRKASELCLNFFCEKLPELIGGSADLTGSNNTFSSVSTEMLPDNPKGNHIFYGVREFGMTAMTNGMVLHGGIKPYSGTFLVFMDYARNAVRLAALMKIPNIFV

SEQ ID NO: 110306 - protein, 421 aa, Unknown
  Bacterial polypetide isolated from the Sargasso Sea
MTEQNLDMLSINTIKLLSVDSVEKAKSGHPGAPMGAAPMAYVLWKDFLKHNPENPQWINRDRFILSPGHASALLYSLLHLTGYKVSLEDLMAFRQLGSKTPGHPEYGVTPGVEVTTGPLGQGFANGVGMAIAETNLAKEFNTTEHQIIDHFTYGIVSDGDLQEGVASEAASIAGTLKLHKLIYLYDSNNISIEGDTDLSFTENVSDRFKAYGWQVIGPIDGSDLTEIHDAIKLAQNETSKPSLVICKTVIGNGSPNKSGTASAHGEPLGTDEVILTKQSLDWKLEAPFSVPDLVKEHLSQIGVQGANDEMDWNNKTQSYMQQHPDKYTKLISQTDGDIPADWDAELSNLFNSESANMATREASGIVINKIAKSIPGLLGGSADLAPSTKTNLNEFEDYSSENRSGRNFHLESVNMLWVQLL

SEQ ID NO: 110307 - protein, 350 aa, Unknown
  Bacterial polypetide isolated from the Sargasso Sea
NYKKRFNSYGWDYIEIDGHNEKKIFNALKKVQRAKKPTVISCITKIGYGSPNKSGSEKAHGSPLGENEVKLVRKKLNWLHEPFIIPKNIIQEWRRIGSAGKIKEDKWRKIYNKKKKQIDKIFSSNFSGIFKKEKQNAIKSSETLATRKSSEKILTALNEKKNMIIGGSADLAGSNNTKTKNHKPISKNNFKGNYIHYGVREHAMCGIMNGLSLHSKLIPYGGTFLIFSDYCKPAIRLSALMKLNVVYVMTHDSIGLGEDGPTHQPIEQLTGLRSIPNLNVFRPADTTETIECWELALKNLDTPSVLALSRQNLSPIRKVYESQNKCSLGAYEIYRSKDKVDLTIFASGSE

SEQ ID NO: 110308 - protein, 401 aa, Unknown
  Bacterial polypetide isolated from the Sargasso Sea
SGAAVGEEEAALTREFLNWEYPPFEIPDEVYAHFRKSINKGENLEKEWDSKFEEYQKKYPSEGAELNRMLKGQLPENWDSDLPSYTPDDKGLATRKHSQICLGALGPNLPELIGGSADLTHSNYTDIKGETGSFQPHSPEKRYLHFGVREHAMAAVLNGIAYHNSGLIPYGGTFLVFADYMRGSMRLSALSELGVIYVLTHDSIGVGEDGPTHQPIETIPSLRAMPNMLVFRPGDGNETSGAYKLAIQNRKRPSALCLSRQGMPNQENTSIDKVALGGYIVSDCEGTPDLIFIGTGSELNLCIEASKEISSLGKKIRVVSMPCVELFEEQEESYKESVLPSSVKKRVVVEAAHSFGWHKYTGFDGICITMDRFGASAPGGECMKNFGFTVENVVNKTKEIL

SEQ ID NO: 110309 - protein, 665 aa, Unknown
  Bacterial polypetide isolated from the Sargasso Sea
MPNKKDQSAVTHDDLANAIRFLSIDAVEKAKSGHPGLPMGMADVATVLFTKFLKYNPNVPRWHDRDRFVLSAGHGSMLLYSLLYLTGHKDMTIQEIKKFRQLGSKCAGHPEYGHAKGIETTTGPLGQGIGNAVGMALAEEILRSQFGEKIVNHFTYVIASDGDLMEGISHEVASFAGHLKLNKLIVFFDDNGISIDGPVKLANSENTAERFKAYGWNTIKINGHKPKEIIQSIKKAQKSKKPTLISCKTKIGFGSPNKQGKSSVHGSPLGEDEVKLTRTKLNWPHKPFTVPKNILEEWKNLSKKSIDAYKSWKLNYEKLPKSKKAHYIRRIEGKLPLKLIQNFNQFKKKYIKKPLDVATRQASEMVINTISSSLPELVGGSADLTGSNNTKGSKMEVINSTNYNGNYIYYGIREHGMASIMNGLSLHKGIIPFGGTFLIFLDYCKPSLRLAALMKQRAIYILTHDSIGLGEDGPTHQPIEQLASLRATPNVKVFRPADLIETAEAWELALSNSKGPSVIALTRQKLPMIRKKYHAKNISAQGAYELKSNSKKPNISIFASGSEVEIALQLMTMLEKKKKLVRVVSVPCMEQFKIQSKTYQKIIRGNSEINVSIEAGTNFGWSQVCPENTINIGMKDFGASAPYQKLYDFYGITAKKIFKLISKKI

SEQ ID NO: 110310 - protein, 386 aa, Unknown
  Bacterial polypetide isolated from the Sargasso Sea
MENHKLANAIRFLSIDAVQAAKSGHPGMPMGMADIAVSLWKNNLKHNPSNPKWINRDRFVLSNGHGSMLLYSLLHLTGYDLNINDLKDFRKLKSKTPGHPEYDIDIGVETTTGPLGQGIGNAVGMALAEKNLAATFNKEDIKIIDHFTYAFLGDGCLMEGISHEVCSFAGTHKLGKLICFYDQNGISIDGEIDLWFTDNTKQRFESYGWHVVEIDGHDIDEINKATEEAKKETERPSMICCKTTIGFGSPNKSGTAGVHGSPLGDDEIEITRKELNWEHAPFEIPEDIYDAWNAKDEGAKKEKAWEDLLETYKQKYPEESNELERRFNSEMTHEFNERFDDFLRDCSLQEDPIATRKASQICLDHFCADLPELIGGSAEFNEDLYN

SEQ ID NO: 110311 - protein, 463 aa, Unknown
  Bacterial polypetide isolated from the Sargasso Sea
MISNPISNAVRFLSADAVQKAKSGHPGAPMGMADIANVLWRKYLKHNPLNPNWMNRDRFILSNGHGSMLLYSLLHLTGYKISMKDIMSFRQLHSITPGHPECDITPGVETTTGPLGQGLANGVGMAIAEKSLADEFNKPGLNIIDHRTFVFAGDGCLMEGISHEACSLAGTLSLSKLIVFYDMNNISIDGDTSLAFTENVYTRFKSYGWNVINNIDGHNIQQIDKSIKAAMREKNKPTLLCMKTKIGFGSPNKQGTASVHGAPLGDEELSLARQNLKWNFKPFVIPKEIYDKWDCKTKGSRLEKNWNQMFNSYKKKYPKQFSELQRRKKSRIKSSIPKILMNFKVDKDKSIATRKCSQMVLERIGEHVPELIGGSADLKDSNLAYWSKSLPFMAKSYSGKYLHYGVREFAMSAISNGISLYGGFRPYASTFLIFSEYAKNGIRMSSIMHQPVIYIFTHDSIGL

SEQ ID NO: 110312 - protein, 674 aa, Unknown
  Bacterial polypetide isolated from the Sargasso Sea
MRSYKDIDTFTDWEAEEKNQFALAVTKGLIMDMVRKANSGHSGGPMSSADYTQILFSEYLNFDPNDPDWFNRDRFVLSAGHESALLYALLYQIGWLDSNDINNFRQLHSRTPGHPEVEIPGVEATTGPLGQGFAMAVGMATAESILRANFEKFNNGSDEIIGHFTYVVCGDGDFQEPVVLGAGSMAGHWGLSRLIVYYDSNNAQISGKVDRSDSTNYSQVFEGFGWHVQEIDGHDHEKIREAIEKAQVVDRPSLIIGNTIMAKGAANVEGDHETHGAPLDPEEIKATKEKLGLPQEQFYLPNEVVEHFQSRFKTLTDSCQQWKSQIDSASQDNDFDVAWKCVHQTTYPELEYPTFDAGTKLATRKAFGATLDKFADQIPNLIGGSADLEPSNYTGNFATKFGDFSKTNRTGRNLAFGVREFPMAAAMNGIALHGGLIPFGGTFLVFADYERPALRLGSIQKCRVMHEFTHDSFWVGEDGPTHQPIEHAMALRAIPNLNVYRPADAKETAVCFKLALESHETPSALLLTRQGVPVLEPSIDATIDGVTKGAYSVFDCDSPELIFLATGSEVSLAMEVAQQMNDKKIRVVSMPCWELFESQSSDYKRSLIPTRGAMKISFEAGVTLGWERYIGSNGLAIGIDHFGASAPGADLAEEFGFTAPKVEAKIREHLGSLL

SEQ ID NO: 110313 - protein, 660 aa, Unknown
  Bacterial polypetide isolated from the Sargasso Sea
MSNAIRFLSIDAVERANSGHPGMPMGMADVATVLFRDFLKYNPKNPNWLNRDRFVLSAGHGSMLLYSLLYLTGYKSISLDDIKNFRQLNSICAGHPEYHSGSGIETTTGPLGQGIANAVGFALAEEILKNKVGKEIINHKTYVLAGDGCLMEGISHEALSFAGHLKLKNLILLFDNNSISIDGPTNLAVSDNTKKRFESYGWDYLDINGHDEKQIFKALRKAQKAKKPFAISCKTTIGYGSPNKGGKASSHGSPLGEEEINLVRKKLKWSYKPFEIPNEIKKEWEKIGEKASANAEKDEAKYQKKINKLGWLGWSLTRNFKNNYPPGFKNHKDQINQSIEKVMKNYLKNLSPIATRKSSEMFLELITSIPNLIGGSADLAGSNNTKTKKHEIIKPGNFKGNYIHYGVREHAMCGIMNGLSLHSGLIPYGGTFLIFSDYCKPSIRLAAMMMQRVIYIFTHDSIGLGEDGPTHQPIEQLASLRSIPNLNVFRPADTIETFECWQLALESNKSPSVIALSRQKINPVRKEYSKINKCSKGAYEVMRTGDKIKLILLSSGSETSLACEVSHKLATENIYSKVISMPCQELFDKQDETYKKQILSEAELLVSIEASETEFWKKYTGSNGMNFGINDFGRSAPYKDIYNHFGLNVDNIVKEIKKKI

SEQ ID NO: 110314 - protein, 334 aa, Unknown
  Bacterial polypetide isolated from the Sargasso Sea
NLDWPYAPFDIDKEIYDSWNAVEKGTAFEKEWDDLCKKFSESEPDKSDLMHRLIAGKMPENFDDDFNKFIEELSSNSDSLATRKSSQIVLEFLQANLPELIGGSADLSGSNNTNTKHSIDINSNDDGNYIYYGVREFGMNAVMNGMALHGGLIPYSGTFLVFMDYGRNAVRMAALMGIRVIFVFSHDSIALGEDGPTHQPIEHLTTLRSTPNMTTWRPANLAETAVAWKEALSKTNGPSSIILSRQNLAPFASKELKQLEMGGYFVTKKNDATVNLIATGSEVGLAIEVEKLLTADGISCNVASVPCLEALLNNKDQYNEIFSSNTTNIVIECG

SEQ ID NO: 110315 - protein, 562 aa, Unknown
  Bacterial polypetide isolated from the Sargasso Sea
LGQGLGNSVGMAMAARWYESHFNKPDVPLFDYRVYALCGDGDMMEGISHEAASLAGHLQLSNLIWIYDSNRVTIEGHTDLAYSDDVESRFRGYNWHTLRVNDANDAAALEAAFVEAKSITDRPTLIVVHSIIGWGAPHKQDTSAAHGEALGVEEVALTKKFYGWPEDKFFYVPDGVRERFAEGIGARGKAARAAWQTKLDAYSTKYPDLSRQFAQMEAHELPAGWDSDIPTFDADPKGIASRDSSGKVLNAIAARVPWMIGGAADLAPSTKTNLKFEGAGSFEHDNYGGCNLHFGIREHGMGAAVNGLALSNLRPFGSTFLIFSDYMKPPIRLSAIMEVPSIYVFTHDSIGVGEDGPTHQPIEQLASLRGVPGLTVLRPGDANEVAEAWRVAMSDPRRPSCIVVSRQALPTLDRTRYAPASGVQKGAYVLADAPDGQKPEVILLATGSELSLCVDAYEKLKSEGIAARVVSMPSWDLFERQDEAYQEAVLPSDVDARVAVEQAATLGWDRYVGRLGAQVVMHTFGASAPLADLKKKFGFTPEHVYDAAKQQIARVKGKSGKQ

SEQ ID NO: 110316 - protein, 669 aa, Unknown
  Bacterial polypetide isolated from the Sargasso Sea
MLSRHELANAIRALSMDAVQRANSGHPGAPMGMADIAEVLWNDFLKHNPNNPNWDNRDRFIMSNGHGSMLVYALLHLTGYELSIEEIKNFRQLHSKTPGHPEYGYAPGIETTTGPLGQGLANAVGMALAESILAAKFNKEGFDIVNHHTYVTVGDGCLMEGISHEASSLAGTLGLGKLITIYDSNQISIDGDVSGWFTEDIPNRFESYGWQVIRDIDGHNPDEIKVAIQSAIKNINQPSIICCNTVIGWGSPNKAGKESSHGAPLGDEEIQLTREKIGWQHGPFVIPDEYYSAWDAKSQGKKLESEWREKITTYEKKYPELAAEYKRRIKGQLPDNWDNIVQEHIDLTVKKSESIASRKASQNSIEAFAKVLPEMIGGSADLTGSNLTNWSGSVVIDNKNKNGNYIAYGVREFAMAAVNSGIALHKGFIPYSGTFLMFSEYARNALRMSALMKIQNIFVFTHDSIGLGEDGPTHQAVEQASTLRLMPNMSLWRPCDAVESTIAWQTAIERRGGPTSLLFSRQNLKHINRTESQIKNIKRGGYTLIEGSDDPELIIIATGSEVEIAVDVATELNSKNRNIRVISMPSTDVFDKQDEQYKETVLPFSCRSRVAIEAGVTDYWKKYVGLDGLALGVDNFGESAPAKNVFEYFGLTKNNLKEVIGNYLVETKK

SEQ ID NO: 110317 - protein, 405 aa, Unknown
  Bacterial polypetide isolated from the Sargasso Sea
MIKNNRDLSNALRFLSMDAVQKANSGHPGMPMGMADVATVLFKNFLKFNPKNPNWLNRDRFILSAGHGSMLLYSLLYLTGYKSISLKNIKNFRQLNSICAGHPEYHPSTGIETTTGPLGQGVANSVGFAIAEEILKKKLGREIINHKTYVLAGDGCLMEGISHEAMSLAGHLKLKNLIMLFDNNSISIDGPTNLAVSDNFKKRFESYGWDYILINGHNYNEIFKALKKVQSAKKPTVISCKTKIGYGSPNKMGKASSHGSPLGKEEINLIRKKLNWKYKPFEIPNHVLNQWKKIGNKGSMLNTKWNKVYKKNKNKINKSFKNNFSKSIKSEKHRAIKELKSLATRKCSELFLNSITYKNNCLLGGSADLTGSNNTKTKYHNIIKPGDFSGNYIHYGVREHAMWES

SEQ ID NO: 110318 - protein, 653 aa, Unknown
  Bacterial polypetide isolated from the Sargasso Sea
MIKNETVNALRFLSADSVERASSGHPGMPLGMADIAEVLWREHLHHSPTNSNWFNRDRFVLSNGHGSMLLYSLLHLTGYKLSLDDLKDFRQLKSKTPGHPEYGITDGVETTTGPLGQGLANAIGMALAEKILASKINTDKLKPIDHKTYCFIGDGCLMEGISHEVMSLAGVLELNKLICFYDSNGISIDGEIKDWYKDDIRLRCESYGWNVIGEIDGHNRDQINEAIIAAKESNKPTMIVCKTSIGYGAGSKQDSESSHGAPLGEDALNELRKNLKWSYEPFEIPESVYEDWDFKEKGKILENNWKEICEEHEKEDSEKAHLLKRLASGDLPEGFFQAFNNHIVDLQENTDSVATRKCSQIVLEFLKEQLPELVGGSADLSGSNNTITKLSTAINSDPSGNYIYYGVREFGMNAIMNGMSLHGGIIPFGGTFLVFMDYGRNAVRMSALMGIRTIYVFSHDSVALGEDGPTHQPIEHLNTLRSTPNMHTWRPATLVETAVSWKKALENKNGPTSIILSRQNLNNFPVESVLEVEKGGYFVKYSADAKINLIATGSEVSTAIESSEILKENGLTTNIASVPCLEELEKHESIYKKIFSQDSINIVIECSHPNSWYKHTKKVIGIDTFGESGKGNQLMDHFGFTPSKIAKKISELV

SEQ ID NO: 110319 - protein, 242 aa, Unknown
  Bacterial polypetide isolated from the Sargasso Sea
KSLATRKSSELTLSTLIKNTNTLIGGSADLAGSNNTKTKNHNLIEPGKFFGNYIHYGVREHAMCGIMNGLALHSKIIPYGGTFLIFSDYCKPSIRLAALMKQRVIYIMTHDSIGLGEDGPTHQPIEQLSGLRAIPNLNVLRPADRIETIECWDLALKNLNTPSVLCLTRQNLDPINKKYLKINKCSFGAYEVLRTNKKIKLTILASGSEVNLAINICHKLAKDKIYSRSYINALPRNIRKTI

SEQ ID NO: 110320 - protein, 472 aa, Unknown
  Bacterial polypetide isolated from the Sargasso Sea
MPSRRELANAIRALSMDAVQQAKSGHPGAPMGMADIAQVLWGDFLSHNPANPSWANRDRFVLSNGHGSMLLYSLLHLSGYELPIEELKNFRQLHSKTPGHPEYGYAPGVETTTGPLGQGISNAVGMALAEKVLAAQFNKDGHNIVDHHTYAFLGDGCLMEGISHETCSLAGTLGLGKLIAFWDDNGISIDGEVEGWFTDDTPARFKSYGWEVIDGVDGHDAEQVKAAIEKAQANTAQPTLICCKTTIGFGSPNKEGTESCHGAPLGEDEIVATREKLGWSHGAFEIPDDIYAGWDAKEKGSNAESAWNDAFAAYEAAYPELAAEFKRRVNGELPADFSEKADAIIAELQANPQNIASRKASQNALNAFGPLLPELLGGSADLAGSNLTIWEGSKGVEANDASGNYIYYGVREFGMSAMMNGIALHGGFKAYGATFLMFMEYARNAVRMAALIKQPAIFVYTPRFNCLGKTAQ

SEQ ID NO: 110321 - protein, 481 aa, Unknown
  Bacterial polypetide isolated from the Sargasso Sea
MVNFADWSKVEKDQYTISVMKGLVMDATRQANSGHPGGPMSCADFAYLLYRYHLTFDPKDPEWFDRDRFILSGGHMSMLQYSLLLFIGWLDLNDIKNFRQLHSKTPGHPEVEIPGVECTTGPLGQGFAMGAGMAQAEAYLRNLFVSTDQKASRLINHFTYVLASDGDLQEPVALGSASLAGHLGLSKLIVFYDANEAQISGNTNRSDSTDYATVFEGFKWHVQQIDGHDHDQLNNAILDAKKSDRPSIIIGKTIMAKGTANMEGDHNTHGAPLPQDEIDRTKDKLGLPPDKFYYPKEVKEYFQERFPELEDTAQQWKKDRSEFDTNDKIRPLLSVCLDNELPDTTYPSFTVGESLATRKAFGATLDQFAKDLPNLIGGSADLEPSNYTGNFAKTYLDFSNDNQSGRNIPFGVREFPMAGMMNGMALHGGIIPFGGTFLVFADYERPALRLGAIQKVRVIHEFTHDSFFVGEDGPTHQPMSI

SEQ ID NO: 110322 - protein, 398 aa, Unknown
  Bacterial polypetide isolated from the Sargasso Sea
SFAGHLRLGKLIVLFDNNGISIDGSTQLTVNDNQLMRFEACGWGVYECDGHDPDAIEQAIKQARETQNKPSFIACKTTIGFGSPNKAGTAATHGAPLGEEEIAATRESLKWPYPPFEIPEKVKSAWIRIGAMHTEKVEAWKDRLNESGQKDEFERVMSGTLPQNWEDKLKEFKRLHTEEKTKMASRKASQETLNVLTKFIPELAGGSADLTGSNLTKSKSQKTIAPGEFGGSYIHYGVREHGMAAAMNGIVLHGGFIPYGGTFLIFTDYCRPSIRLSALMEQRVIYVMTHDSIGLGEDGPTHQPVEHLASLRAIPNLNVYRPCDIVETAECWAAALATKSTPSVISLSRQGLPCLRKDHTEQNLSANGGYVLSDTESQRDITLLATGSEVSLALEAGD

SEQ ID NO: 110323 - protein, 469 aa, Unknown
  Bacterial polypetide isolated from the Sargasso Sea
RQLHSKTAGHPEYGITPGVETTTGPLGQGISNAVGMAIAEKVLATKFNTKIHKVIDHMTYVFTGDGCLMEGISHEACSLAGTLGLGKLVVFYDDNNISIDGEVDGWFTEDIPARFQSYGWEVIPNVNGHDPEEINAAIKKAKNSQNKPTLICCKTIIGKGSPNKEGTASTHGSPLGEEEIAEMRKDLGWDNKPFDIPDSVYEAWDAKEQGNSQEEEWNHLFDQYQKDNEELSSELRRIMNGDLPEGVEEAIYGFVDDVQKDLPNLATRASSQRVLNVLGPLIPELVGGSADLTGSNNTNWDGTIEIRSDNFAGNYINYGVREFGMTGIMNGMVLHGGIRPYGGTFLTFLDYARNAVRMAALMKIQTMLVYSHDSIGVGEDGPTHQPVEHLTSLRTTPNLETWRPCDTSETAISWLAALENSDKPTALILSRQGLPNFERTAKQIDSMKKGAYTLYEPNEKPELILIATG

SEQ ID NO: 110324 - protein, 381 aa, Unknown
  Bacterial polypetide isolated from the Sargasso Sea
MFDDVTKSIRVLSAAAVERANSGHPGMPLGMADIGVVLYKNFLKVSNKHPDWINRDRFVLSAGHGSMLLYSLLHFNGFDISLDEIKNFRQLGSKTAGHPEKDFEIGIDTTTGPLGQGFANGVGLAVAERYLASVFGEDVVDHHIYGIVSDGDLMEGISTEAAELAGLWELGKLIYFFDDNNISIDGNVTQVSVTNQKQKFISMGWDVLEIDAHNENEIIDAVESAKSITNKPTLIISKSTIGKYAPNKENTSGVHGSPLGENEFELFLKNIGFSGDPFIHNSEIYSYFYEKRENDNSKFDEWKANLESKLQSDKNFRQLWKQFNNFETSPVELEWSSDEASRVVGGKILNEYGLSNKFIIGGSADLAASTKQIISDNTFGS

SEQ ID NO: 110325 - protein, 444 aa, Unknown
  Bacterial polypetide isolated from the Sargasso Sea
HYTYVFAGDGCLMEGLSHEACSLAGHLKLDKLIVFFDDNSISIDGEISLSSSDDVESRFKSYNWNVSNINGHDHTEINEAILSAKNSDKPTIICCKTKIGFGSPNKEASAASHGSPLGKEEVELTRKNLNWNYEEFFIPDNLLSEWRDFANRNAEVKKNWENKNVEFLNSSKYNKFFNENLDSNIKTEIINFKKSYAKDETKYATRKASESSLELFNNHIVNLLGGSADLTGSNNTKTKGMDIFNAENYKGSYVYYGIREHAMAGVMNGLALHGGIKPYGGTFLVFSDYCRPSIRLSALMKLPVIYVMTHDSIGLGEDGPTHQPVEHLAALRAIPNLNVIRPCDILETIEAWEIALETKGPTILALTRQGLTTNKRDSFEDNLVKKGAYILKNYSKYNASIFASGSEVEIALQASIKLQEININLRVISFPSMELFEMQNEKYK

SEQ ID NO: 110326 - protein, 463 aa, Unknown
  Bacterial polypetide isolated from the Sargasso Sea
EGISHEACSFAGTHKLGKLICFYDQNGISIDGEIKNWFTDDSIKRFDSYGWQTICVDGHNIEEIDKAIVDAKNETNKPTMIFCKTIIGFGSPNKSGTADVHGAALGEEEVIKTREALNWDHDAFKVPQEAYDFWDSTKKGSELNLDWDNLIKTYDEKYPDKSAELRRRIKGDLPDDFENSFKTFLSECDKNNTPMATRKCSKACLDFFVKELPELIGGSADLTPSNNTFSSSSSTFSNENPSGNHINYGVREFGMSAIMNGMVLHGGIKPYGATFLVFTDYARNAVRLSALMGIPSIFVYTHDSVALGEDGPTHQPVEHMVTLRSTPNLNSWRPADLVETAVAWNEAVKSKKTPTCLIFSRQGTSAISRTEDQLSLINKGGYLIDESDNFDITLIASGSEVQLVIDAAKELKNHSISANVVSMPSLDIFLQQSEEFQSSIINPDKPILVVECSHPNSWYRILN

SEQ ID NO: 110327 - protein, 303 aa, Unknown
  Bacterial polypetide isolated from the Sargasso Sea
MSKFYKELANCIRFLSIDAVQKANSGHPGMPMGMADVATVLFKDFLKFNPKNPSWINRDRFVLSAGHGSMLLYSLLYLTGYKSVSLNDIKNFRQLESICAGHPEYHPNTGIETTTGPLGQGVSNAVGFAISEEILKKQLGKKRINHKTYVLAGDGCLMEGISHESLSLAGHLKLKNLILLFDNNSISIDGPTNLAVSDDHEKRFKSYGWDFLRINGHDFKEISKALKKAQKSKKPIAISCKTTIGYGSPNKGGKASSHGSPLGDEEIKLVRKRLKWKYEPFKIPTELLNEWRKIGEKASQKAQ

SEQ ID NO: 110328 - protein, 624 aa, Unknown
  Bacterial polypetide isolated from the Sargasso Sea
NSGHPGMPMGMADVATVLFKNFLNFDPKNPSWINRDRFVLSAGHGSMLLYSLLYLTGYKSISLNDIKNFRQLDSICAGHPEYHPNTGIETTTGPLGQGISNAVGFAISEEILKKKFGKNKIDHKTYVLAGDGCLMEGISHEALSLAGHLKLKNLILLFDNNSISIDGPTSLAVSDDHEKRFKSYGWDYLKINGHNNKEIFKALKKAQKSKKPIAISCKTKIGYGSPNKSGKASSHGSPLGEDEIKLVRKKLKWKYKPFEIPNDLLNEWKKIGNKASNKAKKHQSKYKKILSNNEILNSFNNSIEKTKKNYLKNLKPLATRKSSEMFLDIVSKLPNLIGGSADLAGSNNTKTKDHKIIKPGNFSGNYIHYGVREHAMCGVMNGIALHSNLIPYGGTFLIFSDYCKPSIRLAAMMKQRVIYVFTHDSIGLGEDGPTHQPIEQLTSLRSVPNLNVFRPADFIETFECWQLAIENKKSPSVIALTRQGVSPVRTKNSSKNESSKGAYEILRTGDDIKITIISSGSETSLACNISHKLATESIYSKVISMPCQELFDQQNENYKNKILAETDLVVSLEASETNYWKKYTGINGLNFGINNFGKSAPYKEIYNHFNLNTESIVKKIKEKL

SEQ ID NO: 110329 - protein, 597 aa, Unknown
  Bacterial polypetide isolated from the Sargasso Sea
WLNRDRFILSAGHGSMLLYSLLYLTGYKSVSLNDIKKFRQLNSICAGHPEYHPNSGIETTTGPLGQGIANSVGFAIAEKILKKKLGSNLINHKTYVLAGDGCLMEGISHEAMSLAGHLRLNNLIMLFDNNSISIDGPTSLAVSDDYKNRFKSYGWNYILINGHNYREIYNALKKAQTSKKPTVISCKTKIGFGSPNKSGKASSHGSPLGIDEIKLVRKKLDWDYKPFKIPQKILIDWRKIGEKGIKKEKIWNKTFSKHKLKFKNIIKNKFSSSIIKQKKDAIKNSKTIATRKSSEEFLSAILKERNTLIGGSADLAGSNNTKTKLHKIINSSNFDGNYIHYGVREHAMSGIMNGLALHSNFIPYGGTFLIFSDYCKPSIRLSAIMKQKVVYIMTHDSIGLGEDGPTHQPVEQLAALRSIPNLNVLRPADQTETIECWDIALNSNKTPSVLALTRQNLKPIRNSFSRKNQCSMGAYEVIRTGKNINLTILASGSEVNLAIETSHKLAKQKIYSKVISMPCQEIFDKQNKRYKDKILKESKNTFSIEAGSKISWEKYIEKGLSFSIEDFGKSAPYKKVYHHFGLSSEKISKKINSYLKK

SEQ ID NO: 110330 - protein, 329 aa, Unknown
  Bacterial polypetide isolated from the Sargasso Sea
MVAASVSLESLCINSIRMLAVDAVNKSNSGHPGLPMGCAPMGYALWHNILNHNPNNPKWFNRDRFVLSAGHGCMLLYSLLHLTGYKSVSIEDIKEFRQWGSKTPGHPETFETEGVEVTAGPLGAGISNAVGLAIAEAHLAAKFNKKDCEIVDHYTYVIMGDGCNQEGIASEACSLAGHLKLGKLIALYDDNQITIDGRTDVSFTEDVLKRYEAYGWHVQHVEDGNHDVNGITKAIENAKSVKDKPSLIKISTIIGYGSPNKSDTAGIHGAAVGEEEASLTREFLNWEYPPFEIPEDVYSQFRQAITKGEDSEKKWNLKFQEYQNTFPRR

SEQ ID NO: 110331 - protein, 426 aa, Unknown
  Bacterial polypetide isolated from the Sargasso Sea
KNVQKAKKPTVISCKTKIGYGSPNKSGKASSHGSPLGLEEIELVRKGLNWNNKPFNIPSKFLKEWRKIGQRGETQEKKWIKLFNKNKSKFKNISKNNFTSILKKEKRNAISEPKSLATRKCSELTLNALTSQNHNLIGGSADLAGSNNTKTKHQKIIKPGNFNGDYIHYGVREHGMSGIMNGIALYGNLIPYGGTFLIFSDYCKPSIRLSALMQKRVIYVMTHDSIGLGEDGPTHQPIEQLSGLRSIPNLNVFRPADRVETIECWEHALKSSKTPSILSLTRQSLNPIRKSFTNINKCSLGAYEVLRTNNKINLTIFASGSEVNLAIETSHKLAKDKIYCKVISMPSMELFDLQSKLYKNKILNETKFKISIEAGSSDCWKKYVGSSGLTFGINEFGKSAPYKAIFKHFGLTVSNIASKTKKMIRN

SEQ ID NO: 110332 - protein, 418 aa, Unknown
  Bacterial polypetide isolated from the Sargasso Sea
IGFGSPNKSGTADVHGAPLGDEEIEKTREALGWQYTAFEIPKDVYDFWDSKKSGAEKNATWENSIKSYKDKYPNDSLELERRIKGDMPAKFEQNFLDFLNDCNTNNLPMATRKASKACLDFFVKEMPELVGGSADLTPSNNTFSASSTTFSSENPSGNHINYGVREFGMSAIMNGMVLHGGIKPYGATFLVFTDYARNAVRLSALMGLPNIFVYTHDSVALGEDGPTHQPIEHMVTLRSTPNMDSWRPADLVETAVAWKNAISSLSTPTCLIFSRQGTSAIERTPEQLSSIENGGYLLEEHEDPNITIVASGSEVQLAIDAAQELKNESINANVVSMPSLDVFLKQSNEIQNKIINPNKPVLVVECAHPNSWYKILNRSDKVIGIETFGESAPGSELLEHFGFNKDNVIQTAKSLVND

SEQ ID NO: 110333 - protein, 648 aa, Unknown
  Bacterial polypetide isolated from the Sargasso Sea
ALAPVAYTVWKDFLRYDPLDPSWPNRDRFVLSCGHASMLLYSLIHLAGVRQGRPNTEANKIPAVSLDDIRGFRQLDSVCAGHPEHHLAVGVETTTGPLGQGCANSVGMAISSRWLGAQYNRPDATLFDFDTYVLCSDGDLMEGVASESASLAGHLQLANLCWIYDDNKITIEGETDLAFSEDVGRRFEGFGWRVEYVDDANDASSLSRALQAFKHETEKPTLIVVKSVIGFGAPTKAGSHSSHGAPLGPDEIAGAKEAYDWPTQEAFHVPNGVAEHFQGLIGARGQHANASWQTAHQKLASSEPTAAKELNCMLAGKLPEGWADAIPKFATDAKGLASRVSSGKVLQSLSTTIPWFLGGSADLAPSTMTLIPGAGDFGPENLRGRNFHFGIREHAMAAACNGMALCGLRPYAATFFVFFDYLKPALRLSALGELGVTYVLTHDSIGLGEDGPTHQPIEHLASARAVPGLNVFRPADANEVAEAYRSSLLNPKQPAVMVLSRQNLPTLDRTNLGPANGVTKGGYILKEATGGEAECILIGTGSEIPLCLDAADILDSEGIRTRVVSLPCWELFAEQDQEYREHVLPASIPARVACEAASGFGWERWIGQKGTFIGMNGFGASGPAKKLFEHFGITTEAVVTAARDLVRK

SEQ ID NO: 110334 - protein, 420 aa, Unknown
  Bacterial polypetide isolated from the Sargasso Sea
AVSDNFKKRFEGYGWNYILINGHDEKEIFKALKNVQKAKKPTVISCKTKIGYGSPNKSGKAASHGSPLGLEEIELVRKVLNWNNKPFNIPNKFLKEWRKIGQRCETQEKKWIKIFNKNKTKFKNLKKNSLITILRKEKRKAILEPKNLATRKCSEMTLNALTNQKHNLIGGSADLAGSNNTKTKYQKIIKPGDFSGDYIHYGVREHGMSGIMNGIALYGNLIPYGGTFLIFSDYCKPSIRLSALMQKRVIYVMTHDSIGLGEDGPTHQPIEQLSGLRSIPNLNVFRPADRIETIECWEHALKSSKTPSILSLTRQGLNPIRKSFTNINKCSLGAYEVLRTNNKINLTIFASGSEVNLAIETSHKLAKDKIYCKVISMPSMELFDQQSKLYKNKILNETKLKISIEAGSTDCGKNMWGVQV

SEQ ID NO: 110335 - protein, 300 aa, Unknown
  Bacterial polypetide isolated from the Sargasso Sea
MGWKYAPFEIPSEIYAQWDAKEAGQAKEAAWNEKFAAYAKAFPQEAAEFTRRMKGEMPSDFDAKANEFIAKLQANPAKIASRKASQNAIEAFGPLLPEFLGGSADLAPSNLTLWSGSKAINEDTAGNYIHYGVREFGMTAIANGISLHGGFLPYTSTFLMFVEYARNAVRMAALMKQRQVMVYTHDSIGLGEDGPTHQPVEQVASLRVTPNMSTWRPCDQVESAVAWKYGVERQDGPTALILSRQNLAQQERTAEQLANIARGGYVLKDCAGQPELIFIATGSEVELAVAAWDKLTAEGV

SEQ ID NO: 110336 - protein, 464 aa, Unknown
  Bacterial polypetide isolated from the Sargasso Sea
EEILKEKIGKDIINHKTYVIAGDGCLMEGISHEAMSLAGHLRLKNLVLLFDNNSISIDGPTSLAVSDNFKKRFQSYGWDYIEIDGHKENEIFKALKKVQNAKKPSVISCKTKIGYGSPNKSGKASSHGSPLGDEEISLVRKELGWNYKPFEIPKNVMKIWREIGKKGEKIEYKWNKIYNPKKSKINKYFKNDFVKSVINEKKMALKDNKSLASRKSSELIISSLVEKSNTLIGGSADLAGSNNTKTKNHKIVTPGNFEGNYIHYGVREHAMCGIMNGLALHSKLIPYGGTFLIFSDYCKPSIRLSAMMKQQVIYVMTHDSIGLGEDGPTHQPVEQLSGLRSIPNLNVFRPADRSETIECWEHALKSLKTPSILCLTRQNLSPIRNKFSQTNRCSFGAYEVLRTNKKVNLTILASGSEVNLAIETSHKLAKDKIYSKVISVPCMELFEAQSINYKEKILNETKLK

SEQ ID NO: 110337 - protein, 430 aa, Unknown
  Bacterial polypetide isolated from the Sargasso Sea
PLGAGISNAVGLAIAETHLAGKFNKPDCNIVDHYTYVIMGDGCNQEGIASEACSLAGHLKLGKLIALYDDNQITIDGRTDVSFTEDVLKRYEAYGWHVQHVEDGNHDVKGITEAIEKAKLITDKPSIIKISTTIGYGSPNKSDTAGIHGAAVGEEEAALTREFLNWEYPPFEIPDEVYAHFRKSINKGEILEKEWDSKFKEYQKNYPSEGAELNRMLKGQLPENWDSDLPSYTPDDKGLATRKHSQICLGALGPNLPELIGGSADLTHSNYTDIKGETGSFQPHSPEKRYLHFGVREHAMAAVLNGIAYHNSGLIPYGGTFLVFADYMRGSMRLSALSELGVIYVLTHDSIGVGEDGPTHQPIETIPSLRAMPNMLVFRPGDGNETSGAYKLAIQNRKRPSALCLSRQGMPNQENTSIEKVALGGYVVPT

SEQ ID NO: 110338 - protein, 486 aa, Unknown
  Bacterial polypetide isolated from the Sargasso Sea
FAGVHELNKLICFYDSNGISIDGEISNWYKDDISLRCKAYGWNVIDNIDGHNREEIDEAISVAKNSKKPTMIVCKTHIGYGAGNKQDSESSHGAALGSEIVKELRENLDWPYSEFEIPNEIYADWDASDIGQKYEGDWNEKVRTLKSENPEKAELLERLLNEKLPGKFDSNFSAFLEEILKHNEPIATRKASQKVLEFLKKNLPELIGGSADLSGSNNTNTSISNPITSSQNGNYIYYGVREFGMNAIMNGISLHGGLIPYAGTFLVFMDYGRNAVRMAALMGIKVIFVYSHDSVALGEDGPTHQPIEHLTTLRSTPNMHTWRAASLLETAVAWKSAIQRNDGPSSLILTRQNIDNIENKSFDEVSRGGYFLRKFDDSNIQLIATGSEVSLALEAAEILEQEGVKCNVVSIPCIEVLETNKQIYKEIFTESKINIAIECSHPNSWYAHTKNVIGIEEFGESGKGHILMEHFGFTPKKIVEKIKSFL

SEQ ID NO: 110339 - protein, 242 aa, Unknown
  Bacterial polypetide isolated from the Sargasso Sea
MTPSVLTELTAAGVSLWLDDLSRARLDGDLQRLVHERSISGVTTNPTIFQKAIAGGGDDYAAQLQDLRVLGVDVDFAIRTLTTDDVRAACDILAPVYASTGGLDGRVSIEVDPRLAHDTEATVNQARELWMLVDRPNAMIKIPATAAGLPAITRTLAEGISVNATLIFSIDRYREVMAAHTAGIGRAHDSRVDVSGIESVASFFVSRVDTAVDARLSESTPALADGLRGRAAIANAHLAWHA

SEQ ID NO: 110340 - protein, 195 aa, Unknown
  Bacterial polypetide isolated from the Sargasso Sea
MKFFIDTADIPQIEELMPSGLIDGVTTNPSLIAKSGKDMGETIKTICSIVSGPVSAEVTATEYNKMLEEGKYLASLAKNVAVKVPLTPAGLQTCKALREKDIMVNVTLCFSAAQALLAAKVGATFISPFVGRLDDIGEKGMDLISDIVIMYENYGFDTEVLVASVRNTQHLIDAAVIGAHVSTLPPKVIHELYKH

SEQ ID NO: 110341 - protein, 73 aa, Unknown
  Bacterial polypetide isolated from the Sargasso Sea
ALLESLDNDLSPLAQSLSIEASKAEDIEEQSIDEQRFRWLMNNDAMATEKLAEGIRLFHRDLLLLYETLSNYF

SEQ ID NO: 110342 - protein, 198 aa, Unknown
  Bacterial polypetide isolated from the Sargasso Sea
GFVDGVTTNPSLIAKSGRDILDTIAEICGLVDGPVSAEVTATDFETMLKEGRKLAAIATNVTVKVPLTPDGLMTCRALSDAGTDVNVTLCFTAGQALLAAKAGAKFISPFVGRLDDIGQDGMGLIEEICSIYANYDFDTEVLVASVRSTSHVVDAALMGADVVTLPPKILTALYKHPLTDSGLDAFLKDWQATGQSIL

SEQ ID NO: 110343 - protein, 176 aa, Unknown
  Bacterial polypetide isolated from the Sargasso Sea
MKLFLDCSDAEFIRDAYSTGLIDGVTTNPSLMLKAGKDPREVLKEISDIFPFHASVSAEVVGDSVEEMLEMADDYIEIGPNITIKVPLTPEGLKVCKDLSTDDVAVNVTLCFSTAQAILAAKAGATYVSPFVGRVNDQSFDGIKLIEEISDVYATHKQKTQVLAASIRDVYQVASC

SEQ ID NO: 110344 - protein, 219 aa, Unknown
  Bacterial polypetide isolated from the Sargasso Sea
MKFFIDTADIHEIEELMPSGLIDGVTTNPSLIAKSVKDMGETIKTICSIVSGPVSAEVTATEYDKMLEEGEYLASLAKNVAVKVPLTPAGLQTCKALREKDIMVNVTLCFSAAQALLAAKVGATFISPFVGRLDDIGEKGMDLISDIVIMYENYGFDTEVLVASVRNTQHLIDAAVIGAHVSTLPPKVIYELYKHPLTDKGLKAFLDDWAKTGQQILPK

SEQ ID NO: 110345 - protein, 268 aa, Unknown
  Bacterial polypetide isolated from the Sargasso Sea
MKLILDKNLENLIYNYYKKYYKNDLGLKDWQNRIKLRLDEENNFSQDRNVKILENIYNLSFENKSILIVGSGTGGECLYFSKKQMKVEGIEPNDEANEIANQKIKLLDLKNIKIQKGFSENLPFKNNKFDYVYCYTVLEHVANVKKSISEMIRVLQPGGGLFICTPDYRQFYEPHYKLPLPMFLPKIVNKILLKIFARPTTFLDTLNLFNEKDINKILNQHNVTATRIYECIPKEWTKHPSFQIKIIKYITIKFGIHKNQYWFIKKNL

SEQ ID NO: 110346 - protein, 85 aa, Unknown
  Bacterial polypetide isolated from the Sargasso Sea
MIYVIDHKDSFTHNVVHQLSLFDKVKCTNYDEINNQYLKRASTIVLSPGPGSPKDYPITSKIYNYYKRKKKNSRYLFRISADIIL

SEQ ID NO: 110347 - protein, 211 aa, Unknown
  Bacterial polypetide isolated from the Sargasso Sea
ANIDEIRELENTGLVDGVTTNPSLINKSGRNFFEVVREICSLVDGPVSAEVTSHDFDTMLKEGKKLAEIASNIAVKVPLTRAGLRTCKLLSDKGTMVNVTLCFSANQAILAAKAGARFISPFVGRLDDIAHDGMDLISDICDIYANYPDFSTEVLVASVRSPMHVVEAAKIGADVATVPPSVLHQMFSHPLTDKGLADFTSDWEKTGQSIL

SEQ ID NO: 110348 - protein, 219 aa, Unknown
  Bacterial polypetide isolated from the Sargasso Sea
MKFFIDTADIPEIEKLIPSGLIDGVTTNPSLIAKSGKDMGETIKTICSIVSGPVSAEVTATEYNKMLEEGEYLASLAKNVAVKVPLTPAGLQTCKALREKDIMVNITLCFSAAQALLAAKVGATFISPFVGRLDDIGEKGMDLISDIVIMYENYGFDTEVLVASVRNTQHLIDAAVIGAHVSTLPPKVIHELYKHPLTDKGLKAFLDDWAKTGQQILPK

SEQ ID NO: 110349 - protein, 219 aa, Unknown
  Bacterial polypetide isolated from the Sargasso Sea
MKFFVDTADIKEIEELIPTGFVDGVTTNPSLIAKNGDDMAKTIKAICSIVPGPVSAEVTATDFDTMLQEGEYLASLAKNVAVKVPLTPNGLKTCKTLREKNIMVNVTLCFTAAQALLAAKARASFISPFVGRLDDLGENGMDLIEDIVDIYDNYDFDTEVLVASIRSTQHVIDAAVIGAHVSTLPPKVIHELYNHPLTEKGLNAFLDDWKKTGQSILPK

SEQ ID NO: 110350 - protein, 142 aa, Unknown
  Bacterial polypetide isolated from the Sargasso Sea
MDIFADTADIEEIKKLNDLGIIDGVTTNPTLIAKSGRDLREVLGEICDVVRGPVSGETVSTDAEGMIREGRWLREIDDTYMVVKVPLTAEGIKACYHLSQEGHPVNVTLCFSANQALLAAKAGATFISPFVGRLDDLSLEGM

SEQ ID NO: 110351 - protein, 140 aa, Unknown
  Bacterial polypetide isolated from the Sargasso Sea
GKTSFLGAEDPGVISVTQIYKYFKEKGFKTEVMGASFRNLDEIKELAGCDLLTIAPKFLEELKKEKGKLIRKLDVSTQINNSIDYEFEEKDFRLSMLEDQMASEKLSEGITGFSKAIEELEELLLKRYSEIKNYKLISTN

SEQ ID NO: 110352 - protein, 219 aa, Unknown
  Bacterial polypetide isolated from the Sargasso Sea
MKFFIDTADIPQIEELMPSGLIDGVTTNPSLIAKSGKDMGETIKTICSIVSGPVSAEVTATEYDKMLEEGKYLASLAKNVAVKVPLTPAGLQTCKTLRKKDIMVNVTLCFSAAQALLAAKVGATFISPFVGRLDDIGEKGMDLISDIVIMYENYGFDTEVLVASVRNTQHLIDAAVIGAHVSTLPPKVIHELYKHPLTDKGLKAFLDDWAKTGQQILPK

SEQ ID NO: 110353 - protein, 204 aa, Unknown
  Bacterial polypetide isolated from the Sargasso Sea
MKFFLDTANIEEIEELIPTGFVDGVTTNPSLIAKNGDDMAKTIKSICSIVSGPVSAEVTATDYETMLKEGEYLASFAKNVAVKVPLTFNGLKACKALREKNIMVNVTLCFSEAQALLAAKAGATFISPFVGRLDDIGEKGTDLIKNIVVMYKNYNFKTEVLVASVRSVEHLIESSLMGADVATLPPKVIHELYNHPLTDKGLKA

SEQ ID NO: 110354 - protein, 221 aa, Unknown
  Bacterial polypetide isolated from the Sargasso Sea
MDIFADTADIEEINKLNDLGIIDGVTTNPTLIAKSGRDLREVLGEICDVVRGPVSGETVSTDAEGMIREGRWLREIDDTYMVVKVPLTAEGIKACYHLSQEGHPVNVTLCFSANQALLAAKAGATFISPFVGRLDDLSLEGMQLIEDIRIIYENYEFDTRILTASARGPKHILDAAKIGSDVVTAPPKAIWQMLQHPLTDKGLKAFLDDWENTGQTLGQVG

SEQ ID NO: 110355 - protein, 219 aa, Unknown
  Bacterial polypetide isolated from the Sargasso Sea
MKFFIDTADIPQIEELMPSGLIDGVTTNPSLIAKSGKDMAETIKTICSLVSGPVSAEVTATEYDKMLEEGEYLASLAKNVAVKVPLTPAGLQTCKALREKDIMVNVTLCFSAAQALLAAKVGATFISPFVGRLDDIGEKGMDLISDIVIMYENYGFDTEVLVASVRNTQHLIDAAVIGAHISTLPPKVIHELYIHPLTDKGLKAFLDDWAKTGQQILPE

SEQ ID NO: 110356 - protein, 219 aa, Unknown
  Bacterial polypetide isolated from the Sargasso Sea
MKFFIDTADIAEIEQLIPSGLIDGVTTNPSLIAKSGKDMAETIKTICSIVPGPVSAEVTATEYEKMLEEGLYLASLAKNVAVKVPLTPAGLKTCKTLREKDIMVNVTLCFSAAQALLAAKVGATFISPFVGRLDDIGEKGMDLISDIVIMYENYGFDTEVLVASVRNTQHLIDSAVIGAHVATLPPKVIHELYKHPLTDKGLKAFLDDWAKTGQQILHK

SEQ ID NO: 110357 - protein, 216 aa, Unknown
  Bacterial polypetide isolated from the Sargasso Sea
MKLFLDTADTGAIKDGFDTGLIDGITTNPTLIMKSGRNPEDVYQELIDLGIPDISMEVVGNDEIMLAEGLRLAKKFGKQSTIKVPCTPEGLWVCKQLSKNLIKVNVTLIFSPSQAILAAKAGATYVSPFVGRVDDNSFDGLSLIRDIANIYHKQNWKSTEILAASIRNVRDVGKAFEYGADICTIPPTVFGKMYKHILTDKGIELFENDWKSVQSV

SEQ ID NO: 110358 - protein, 218 aa, Unknown
  Bacterial polypetide isolated from the Sargasso Sea
MKFFIDTADVSEIKELAKSGLLDGVTTNPSLIKKSGRNINEVIKEICDIVPGPVSAEVTATEYDEMLREAEVLKSIAKNVTIKVPLTWDGLKTCKALREEEVLVNVTLCFSANQALLAAKAGASFISPFVGRLDDIGIDGMNLISDICQIYSNYPNLNTEVLVASVRSPQHVAEAAKLGADVVTLPPNVLKQLITHPLTESGLQAFLDDWKKTGQSIT

SEQ ID NO: 110359 - protein, 219 aa, Unknown
  Bacterial polypetide isolated from the Sargasso Sea
MKFFVDTANIEDIEKLIPTGFVDGVTTNPSLIAKQGADMAETIKNICSIVSGPVSAEVTATEFTKMLEEGEYLASLAKNVAVKVPLTVDGLKTCKSLREKGIMVNVTLCFSAAQALLAAKAGASFISPFVGRLDDIGEKGMDLIEDIVIMYENYAFETEVLVASIRTKQHVIDSAVIGAHVATLPPKVIYELYDHSLTDKGLKAFLDDWAKTGQSILPK

SEQ ID NO: 110360 - protein, 133 aa, Unknown
  Bacterial polypetide isolated from the Sargasso Sea
AEDPGVISVTQIYNYFKEKGFKTEVMGASFRNLDEIKELAGCDLLTIAPKFLEDLKKEKGELVRKLDESTQINNSVDYEFEEKDFRLSMLEDQMASEKLSEGITGFSKAIEELEELLLKRYSEIKNHKLISAN

SEQ ID NO: 110361 - protein, 224 aa, Unknown
  Bacterial polypetide isolated from the Sargasso Sea
MSDLLGLSELQLSTTSLSEFIIGFTLTIIFSLLIKMIYIKHSNSVSNKTIVANIFPLFSVAIFLIVITIKSSIVLSLGLVGALSIIRFRTAIKEAEQIVYFLILTAIAIAAAAGTYLFPVLLVLFIYIYNYYKTQQKSGKVSSINDHLVIRTEKFENKKIKELINLLNDSGVNVEVQSINKQENNISVVLKISDFDINSLTLVEEFLLKQGINKKEIQFFSSSE

SEQ ID NO: 110362 - protein, 138 aa, Unknown
  Bacterial polypetide isolated from the Sargasso Sea
MKFFIDTADIPQIEELMPSGLIDGVTTNPSLIAKSGKDMGETIKTICSIVSGPVSAEVTATEYNKMLKEGEYLASLAKNVAVKVPLTPAGLQTCKALREKDIMVNVTLCFSAAQALLAAKVGATFISPFVGRLDDIGE

SEQ ID NO: 110363 - protein, 221 aa, Unknown
  Bacterial polypetide isolated from the Sargasso Sea
MDIFADTADIEEIKKLNDLGIIDGVTTNPTLIAKSGRELREVLGEICDVVRGPVSGETVSTDAEGMIREGHWLREIDDSYMVVKVPLTAEGIKACYQLSQEGHPVNVTLCFSANQALLAAKAGATFISPFVGRLDDLSLEGMQLIEDIRIIYENYEFDTRILTASARGPKHILDAAKIGSDVVTAPPKAIWQMLQHPLTDKGLKAFLDDWEKTGQTLGQVG

SEQ ID NO: 110364 - protein, 178 aa, Unknown
  Bacterial polypetide isolated from the Sargasso Sea
GQKNFKAIIKKICKIAKGPVSAEVISTNYKGMIKEGEELAKIDKNVVIKLPMTKDGIKATSYFSKKKIRVNVTLIFSSTQALLAAKAGAAYVSPFVGRLDDISSNGMSLISDLSEIFLNYGFMTEILVASIRNPIHIVESAKLGADVATLPYSVIMQLFNHPLTDIGIEKFLKDWNNK

SEQ ID NO: 110365 - protein, 146 aa, Unknown
  Bacterial polypetide isolated from the Sargasso Sea
MKFFIDTADVSEIKDLSSSGFLDGVTTNPSLIKKSGRNINEVIAEICDIVPGPVSAEVAAINYEDMIAEAQVLKKIAKNVTIKVPLTWDGLKACRTLRDENVLVNVTLCFSASQALLAAKAGATFISPFVGRLDDIGLDGMDLISD

SEQ ID NO: 110366 - protein, 118 aa, Unknown
  Bacterial polypetide isolated from the Sargasso Sea
QVSFNKKIPVNVTLIFSSSQALIAAKAGASYVSPFVGRLDDISTNGMNLINEISEIFLNYGFPTEILVASIRNPVHIVDSARMGADVATLPFKVLLQLFKHPLTDIGLENFLKDWNKK

SEQ ID NO: 110367 - protein, 219 aa, Unknown
  Bacterial polypetide isolated from the Sargasso Sea
MKFFVDTADIKQIEELIPTGFVNGVTTNPSLIAKNGDDMAKTIKAICSIVSGPVSAEVTATDYDTMMQEGEYLASLAKNVAVKVPLTPSGLRTCKTLREREILVNVTLCFTAAQALLAAKAGASFISPFVGRLDDLGENGMDLIEDIVDIYENYDFDTEVLVASVRSQQHIIDAAVIGAHVATLPPKVIHELYNHPLTEKGLNAFLDDWKKTGQSILPK

SEQ ID NO: 110368 - protein, 48 aa, Unknown
  Bacterial polypetide isolated from the Sargasso Sea
PGDRLTESEFRWAMNEDAMATEKLSEGIRNFAADQEKLETMLREKLSA

SEQ ID NO: 110369 - protein, 149 aa, Unknown
  Bacterial polypetide isolated from the Sargasso Sea
ILDWHKAKTGKTSFTGAEDPGVISVTQIYKYFKEKGFKTEVMGASFRNLDEIKELAGCDLLTIAPKFLEELKKEKGELVRKLDVSTQINNSIDYEFEEKDFRLSMLEDQMASEKLSEGITGFSKAIEELEELLLKRNSEIKNHKLISAN

SEQ ID NO: 110370 - protein, 175 aa, Unknown
  Bacterial polypetide isolated from the Sargasso Sea
TLLFNFCQAVTCANAKITFFSPFVGRILDWHKAKTGKTSFVGAEDPGVISVTQIYKYFKEKGFKTEVMGASFRNLDEIKELAGCDLLTIAPKFLEELKKEKGELVRKLDLSSQINHSIDYEFEEKDFRLSMLEDQMASEKLSEGITGFSKAIEELEELLLKRYSEIKNHKLISAN

SEQ ID NO: 110371 - protein, 219 aa, Unknown
  Bacterial polypetide isolated from the Sargasso Sea
MKIFLDTADVKIIGKHFIETGLIDGVTTNPSLIMKSGKQPDDVYFKLFTLGVKDVSMEVVSNTAKGMIEEADRLIGKFQDIVTIKVPCTREGLIACKELSDRGIRVNVTLIFSASQAILSAKAGAKYISPFVGRVDDQRFGGCNLIKRIREVLPYDSCEILSASIRSVGDVEHSFAQGADICTMPPTVFEKMYDHILTDKGLELFDIDYKRTLEQFGGV

SEQ ID NO: 110372 - protein, 61 aa, Unknown
  Bacterial polypetide isolated from the Sargasso Sea
MKSILEQLSSMTVVVADTGDLDSIKKFQPRDATTNPSLILAAAKNPDYVKLIDKALESSEN

SEQ ID NO: 110373 - protein, 86 aa, Unknown
  Bacterial polypetide isolated from the Sargasso Sea
MASLLDQLSQMTVVVADTGDLEAIRKFTPRDATTNPSLILAAAQIPAYQSLIDEALRSSRKLMGSDAAVEDVVREALDEISVIFGK

SEQ ID NO: 110374 - protein, 217 aa, Unknown
  Bacterial polypetide isolated from the Sargasso Sea
MKIFLDTADVSTILTHFETGLIDGVTTNPTLIMKSGRDPEDVYQELAEAGVRDISMEVVGSREEMTSEGRRLATKFQEVATIKVPCTPDGLYVCNQLAKDGTKVNVTLIFDAAQAILAAKAGATYVSPFVGRLDDNSVNGLDVISDISEIFSKHWIKTQILSASIRGVKAVSTSFALGAQVVTMPPAVFEKMYNHVLTDKGLQLFDADWAAVLSHTK

SEQ ID NO: 110375 - protein, 279 aa, Unknown
  Bacterial polypetide isolated from the Sargasso Sea
KAVQSNKYKKLFDDVLANSKSRKFNELAKQVDYIADQLAIAFGIELTKIVPGYVSTEVDSDLSFNTDATVEKARQIINSYEQSGVPRNRVLIKIAGTWEGIQAVKKLEAEGISCNCTLIFSLTQAIACAEAGAFLISPFVGRILDWFKANSPKDYDATNDPGVESVEKIYNYFKKYNYNTIVMAASFRNKEEIINLAGCDKLTISPTLLEELNKSEGELDLKLSQNQSSQMDIDRINVNESSFRWHLNENQMASFKLAEGIRLFNKDLLKLKETIREKL

SEQ ID NO: 110376 - protein, 203 aa, Unknown
  Bacterial polypetide isolated from the Sargasso Sea
RILIKIAATWEGIKAAEILEQEGIKCNLTLLFNFCQAVTCANAKITLISPFVGRILDWHKAKTGKTSFVGAEDPGVISVTQIYKYFKEKGFKTEVMGASFRNLDEIKELAGCDLLTIAPKFLEELKKEKGELVRKLDISTQINNSIDYEFEEKDFRLSMLEDQMASEKLSEGITGFSKAIEELEELLIQRYSEIKNHKLISAN

SEQ ID NO: 110377 - protein, 79 aa, Unknown
  Bacterial polypetide isolated from the Sargasso Sea
MKSILEQLSSMTIVVADTGDLDSIKKFQPRDATTNPSLILAAAKNPDYVKLIDKALESSENALPQGFSGIELIKETVDK

SEQ ID NO: 110378 - protein, 174 aa, Unknown
  Bacterial polypetide isolated from the Sargasso Sea
LLFNFCQAVTCANAKITLISPFVGRILDWHKAKTGKTSFVATEDPGVISVTQIYNYFKEKGFKTEVMGASFRNLDEIKELAGCDLLTIAPKFLEELKKEKGELVRKLDKSTPINNSIDYEFEEKDFRLSMLEDQMASEKLSEGITGFSKAIEELEELLLKRYSEIRNQKLISAN

SEQ ID NO: 110379 - protein, 217 aa, Unknown
  Bacterial polypetide isolated from the Sargasso Sea
MKIFLDTADTPTVKRLFSTGLIDGVTTNPSLIRKSGANPLDVYAELQSLGVPDISMEVYGTADEMYDEAQNLSAQFGDVATIKLPMTVDGLSVTRKLSQQNIRTNVTLIFSIPQAILAAKAGATYVSPFVGRLDDQQVAGLEVVRGIASLFQMKSVRTKVLAASIRDVHRAVRSFYNGADIVTMPPAVFERMADHILTDAGLDIFNKDIAAMAHNNY

SEQ ID NO: 110380 - protein, 319 aa, Unknown
  Bacterial polypetide isolated from the Sargasso Sea
MVSQLDSLKKFSSVVADTGDIDSIQKFNPDDCTTNPSLIFKAVQSNKYKKLVDEVISNSKSRKFSQTEDQVNYIADQLTIAFGIELTKIVPGYVSTEVDSDLSFNTDATVEKAKQIINSYEQSGVLKNRILIKIAGTWEGIQAVKKLEAEGISCNCTLIFSLTQAIACAEAGAFLISPFVGRILDWFKSNTQKDYDSSNDPGVESVEKIFNYFKKFNYNTIVMAASFRNKDEIINLAGCDKLTISPTLLEELSQNDDEIKLKLSKENSSSLDIERINVNESSFRWHLNENQMASFKLAEGIRLFNKDLLKLKELIRGQL

SEQ ID NO: 110381 - protein, 213 aa, Unknown
  Bacterial polypetide isolated from the Sargasso Sea
MKIFIDSADIDEIIKADNTGLIDGVTTNPTLIKRSGLDPYDVYDRVLNETNITDLSMEVSGSRSEMLYEADRLIDRYGESFATIKVPMTKDGLFVCRSLSALQVRVNVTLIFSIPQAILAAKAGAYYVSPFVGRLDDQSVAGLEVVRGIASLYQQQAVPTQVLAASIRTVHKAVRSFYNGASVVTMPPKVFHQMWDHILTDQGLAIFEQDLIS

SEQ ID NO: 110382 - protein, 100 aa, Unknown
  Bacterial polypetide isolated from the Sargasso Sea
MKSILEQLSSITVVVADTGDLDAIKKFQPRDATTNPSLILAAAKNPDYIKLIDQALESSRKSLPVGFSESELIKETIDQVSVFFGKEILNLIIWKSIYRS

SEQ ID NO: 110383 - protein, 186 aa, Unknown
  Bacterial polypetide isolated from the Sargasso Sea
MSNQLASLRDITTVVADTGDIDAIKKYQPVDATTNPSLLLKAAGLPQYASLIDDAVAWAKLQSNDADQQLTDAADKLAVAIGKEISATIPGRISTEVDARLSFDTAATIEKAERLVQLYEDAGIDKSRILIKIASTWEGIQAAEELEKKGIQCNLTLLFSFAQAQACAEAGVYLISPFVGRILDWY

SEQ ID NO: 110384 - protein, 247 aa, Unknown
  Bacterial polypetide isolated from the Sargasso Sea
MRWECVVLSSGKIGYIPLTSCLKRIAIMTDKLTSLRQFTTVVADTGDIAAMKLYQPQDATTNPSLILNAAQIPEYRKLIDDAVAWAKQQSNDRAQQIVDATDKLAVNIGLEILKLVPGRISTEVDARLSYDTDASIAKAKRLIKMYNDAGISNDRILIKLASTWQGIRAAEQLEKEGINCNLTLLFSFAQARACAEAGVYLISPFVGRILDWYKANTDKKEYAPAEDPGVVSVTEIYEYYKQHGYET

SEQ ID NO: 110385 - protein, 300 aa, Unknown
  Bacterial polypetide isolated from the Sargasso Sea
MADTGDLDSIKKFQPRDATTNPSLILAAAKNPDYVKLIDKALESSENALPQGFSEIELIKETVDQVSVFFGKEILKIISGRVSTEVDARLSFDTEATVEKARKLINLYKNFGIEKERILIKIAATWEGIKAAEILEKEGIKCNLTLLFNFCQAVTCANAKITLISPFVGRILDWHKAKTGKTSFIGAEDPGVISVTQIYKYFKEKGFKTEVMGASFRNLDEIKELAGCDLLTIAPKFLEELKKEKGELVRKLNVSTQINNSIDYEFEEKDFRLSMLEDQMASEKLSEGITGIQYGYRKIG

SEQ ID NO: 110386 - protein, 286 aa, Unknown
  Bacterial polypetide isolated from the Sargasso Sea
MKSILEQLSSMTVVVADTGDLDSIKKFQPRDATTNPSLILAAAKNPDYVKLIDKALESSENALPQGFSEIELIKETVDQVSVFFGKEILKIISGRVSTEVDARLSFDTEATVEKARKLINLYKNFGIEKERILIKIAATWEGIKAAEILEKEGIKCNLTLLFNFCQAVTCANAKITLISPFVGRILDWHKAKTGKTSFVGAEDPGVISVTQIYKYFKEKGFKTEVMGASFRNLDEIKELAGCDLLTIAPKFLEELKKEKGELVRKLDVSIQMNNSIDYELKKEILD

SEQ ID NO: 110387 - protein, 129 aa, Unknown
  Bacterial polypetide isolated from the Sargasso Sea
NDRLLIKLASTWPGICAAEQLEKEGINCNLTLLFSFAQARACAEAGVFLISPFVGRILDWYKANTDKKEYAPAEDPGVVSVSEIYEYYKQHGYETVVMGASFRNVGEILELAGCDRLTIAPALLKELAE

SEQ ID NO: 110388 - protein, 107 aa, Unknown
  Bacterial polypetide isolated from the Sargasso Sea
MKSILEQLSSMTVVVADTGDLDSIKKFQPRDATTNPSLILAAAKNPDYVKLIDKALENSENALPKGFSEIELVKETVDQVSVFFGKEILKIISGRVSTEVDARLSFD

SEQ ID NO: 110389 - protein, 247 aa, Unknown
  Bacterial polypetide isolated from the Sargasso Sea
MSDLLSQLKAVTTVVVDSGDLTAIEQFRPVDATTNPSLLLNASQLEFAKPILSNAIAYAKSKTSDSAEQLSLASDKFAVDIGTAIAKLVPGRVSTEVDARLSFDTDATVNKALQLIALYKENGVATERILIKIASTWEGIQAARVLEQQGIQCNLTLLFHMAQARACAEAGAYLISPFVGRILDWYKASTGKDYTAETDPGVLSVRDIYRFYKQHGYKTVVMGASFRNTGEVLALAGCDRLTISPAL

SEQ ID NO: 110390 - protein, 122 aa, Unknown
  Bacterial polypetide isolated from the Sargasso Sea
YTGSDDPGVQSVTRIYNYYKANGYKTVVMGASFRNLSQIEELAGCDRLTISPDLLEKLAADEGKLERKLAPGHAGEARVHMTEAQFRWESNEDAMATEKLAEGIRQFARDQEKLEALLSAKL

SEQ ID NO: 110391 - protein, 121 aa, Unknown
  Bacterial polypetide isolated from the Sargasso Sea
MKSILEQLSSMTVVVADTGDLDSIKKFQPRDATTNPSLILAAAKNPDYVKLIDKALESSENALPQGFSAIELIKETVDQVSVFFGKEILKIISGRVSTEVDARLSFDTEATVEKARKLINL

SEQ ID NO: 110392 - protein, 264 aa, Unknown
  Bacterial polypetide isolated from the Sargasso Sea
MSTLLSQLKAVTTVVVDSGDLTAIEQFRPVDATTNPSLLLNASQLDFARPLLAQAAAYAKSHASTAEMQLSLASDKFAVDVGTAISKLVPGRVSTEVDARLSFDTAATIAKAQQLVALYQENGIGKDKILIKIASTWEGIQAAKVLEQQGIQCNLTLLFHMCQARACAEAGVFLISPFVGRILDWYKAQTGQSYDAETDPGVLSVREIYRYFKQHGHNTIVMGASFRNIGEVLALAGCDRLTIAPGLLDELDKHKVNWWCICEI

SEQ ID NO: 110393 - protein, 170 aa, Unknown
  Bacterial polypetide isolated from the Sargasso Sea
MSNQLASLRDITTVVADTGDIDAIKKYQPVDATTNPSLLLKAAGLPQYASLIDDAVAWAKLQSNDADQQLTDAADKLAVAIGKEISATIPGRISTEVDARLSFDTAATIEKAERLVQLYEDAGIDKSRILIKIASTWEGIQAAEELEKKGIQCNLTLLFSFAPSTKLVQR

SEQ ID NO: 110394 - protein, 199 aa, Unknown
  Bacterial polypetide isolated from the Sargasso Sea
MKNQLDALRDMTTVVADTGDVDAIKKYQPYDATTNPSLILKAASLPQYQHLIDKSLSWARAQTNKKARQIMYANDMLCVLIGKEISESVPGKVSTEVDARLSFDTLATIDKARQLIRLYEEEGVDKSRILIKMASTWEGIKAAEQLEQEGIHCNLTLLFSFAQARACAEANVYLISPFVGRILDWYKSYHNVTEYSPED

SEQ ID NO: 110395 - protein, 124 aa, Unknown
  Bacterial polypetide isolated from the Sargasso Sea
MSACQRSGNVTRPTGQSTPMTSKLEQLKQFTTVVADTGDFSTLAKLKPQDATTNPSLLLKAASIPGYAKLLDECVQDCNGDVGLASDRFAVAVGQEILKVVPGRISTEVDARLSFDEAAILKRA

SEQ ID NO: 110396 - protein, 254 aa, Unknown
  Bacterial polypetide isolated from the Sargasso Sea
VSVFFGKEILKLISGRVSTEVDARLSFDTDATVEKARKLINLYKDFGIEKERILIKIAATWEGIKAAEILEKEGIKCNLTLLFNFCQAVTCANAKITLISPFVGRILDWHKAKTGKTSFVGAEDPGVISVTQIYKYFKEKGFKTEVMGASFRNLDEIKELAGCDLLTIAPKFLEELKKEKGELVRKLDVSTQINNSIDYEFEEKDFRLSMLEDQMASEKLSEGITGFSKAIEELEELLLKRYSEIKNHKLISAN

SEQ ID NO: 110397 - protein, 154 aa, Unknown
  Bacterial polypetide isolated from the Sargasso Sea
MKSILEQLSSMTVVVADTGDLDSIKKFQPRDATTNPSLILAAAKNPDYVKLIDKALENSQKALSQRFSEIELIKETVDQVSVFFGKEILKIISGRVSTEVDARLSFDTEATVKKARKLINLYKNFGIEKERILIKIAATWEGIKAAEILEKGGY

SEQ ID NO: 110398 - protein, 247 aa, Unknown
  Bacterial polypetide isolated from the Sargasso Sea
EILKIISGRVSTEVDARLSFDTEATVEKARKLINLYKNFGIEKERILIKIAATWEGIKAAEILEKEGIKCNLTLLFNFCQAVTCANAKITLISPFVGRILDWHKAKTGKTSFVGAEDPGVISVTEIYKYFKEKGFKTEVMGASFRNLDEIKELAGCDLLTIAPKFLEELEKEKGELVRKLDVSTQINNSIDYEFEEKDFRLSMLEDQMASEKLSEGITGFSKAIEELEELLLKRYSEIKNHKLISAN

SEQ ID NO: 110399 - protein, 259 aa, Unknown
  Bacterial polypetide isolated from the Sargasso Sea
MSDLLTQLKAVTTVVVDSGDLTAIEQFRPVDATTNPSLLLNASQLDFAKPVLAGAVAYAKSKASAADAQLSLASDKFAVDIGTAISKLVPGRVSTEVDARLSFDTDATIAKAHQLVALYKENGIGTDRILIKIASTWEGIQAARQLEQEGIQCNLTLLFHMAQARACAEAGVYLISPFVGRILDWYKASTGQDYTSETDPGVISVREIYRFYKQHGFKTVVMGASFRNVGEVLALAGCDRLTISPGLLAELSQQQGELT

SEQ ID NO: 110400 - protein, 317 aa, Unknown
  Bacterial polypetide isolated from the Sargasso Sea
MKNQLDALRDMTTVVADTGNVEAIKTYRPYDATTNPSLILKAATLPQYQHLIDKSLSWARAQANNKERQILHANDMLCVLIGKEISEFVPGRVSTEVDARLSFNTFATIDKAKQLVKLYEEEGVDKSRILIKIASTWEGIKAAEQLEREGINCNLTLLFNFAQARACAEANVFLISPFVGRILDWYKSHHNIAEYLPSDDPGVKSVTEIYNYYKVHGYKTVVMGASFRNIGEIQALAGCDRLTISPELLEALANCSDPLPRMLCDKNEYQVPPAPIDEATFRWEMNQNAMATEKLAEGIRNFNIDQQKLENMLADRL

SEQ ID NO: 110401 - protein, 273 aa, Unknown
  Bacterial polypetide isolated from the Sargasso Sea
MSQLNELKKLTIVVADSGDIDSIRIYSPQDATTNPSLILKAAPLPQYKHLTEDAIRYANEQGGEKSTRVLNACDALAVNIGAEILKYVPGRISTEVDARLSFDRGLCVAKARKLIQMYAEKGIDKSRVLIKLASTWEGIRAAEELERENINCNLTLLFSFAQARACADAGVYLISPFVGRIYDWYQKNTPAAEYVPEQDPGVVSVRNIYEFYKKFGYETVVMGASFRRKEQIIALAGCDRLTIAPQFLDELEKTQGALVRQLSPSVEKEYRLL

SEQ ID NO: 110402 - protein, 245 aa, Unknown
  Bacterial polypetide isolated from the Sargasso Sea
MNKLEQLRAMTTVVADTGDLEAITRLKPTDATTNPSLLLKAAALPEFADEVAALTASQEAVADKVDRFAVSVGARINQVIPGVISTEVDARLSFDTEATIAKAEKLIGLYDDAGIGRDRVLIKVAATWEGIRAAEILEQRGIHCNATLIFSFKQACACADAGVFLISPFVGRITDWYTVNTDLVIQNPADDPGVQSVTRIYNHFKVHGYGTVVMGASFRNTGQVEALAGCDRLTISPDLLQQLEA

SEQ ID NO: 110403 - protein, 120 aa, Unknown
  Bacterial polypetide isolated from the Sargasso Sea
MTSKLEQLKQFTTVVADTGDLDAIARLQPVDATTNPSLLLKAAALPRYADLLNQAVSAGKGDLGLACDHFAVAVGQEILKVIPGRISTEVDARLSFDTDATLRRAERLIGLYEKAGDGRE

SEQ ID NO: 110404 - protein, 136 aa, Unknown
  Bacterial polypetide isolated from the Sargasso Sea
MATLLDQLSAMTVVVADTGDLEAIRKFTPRDATTNPSLILAAAQIPAYQSLIDEALRSSRKLIGDAAPVEDVVHEALDEISVIFGKEILKIVPRRVSTEVDARLSYDTDATIEKGRKLIRLYNDAGISNDRVLIKI

SEQ ID NO: 110405 - protein, 248 aa, Unknown
  Bacterial polypetide isolated from the Sargasso Sea
KEILKIISGRVSTEVDARLSFDTEATVKKARKLINLYKNFGIEKERILIKIAATWEGIKAAEILEKEGIKCNLTLLFNFCQAVACAKAKITLISPFVGRILDWHKAKTGKTSFEGSEDPGVISVTQIYKYFKEKGFKTEVMGASFRNIDEIKELAGCDLLTIAPKFLEELKKEKEVLVRKLDASTQLNNSPDYKFEEKDFRLSMLDDQMASEKLSEGITGFSKAIEELEELLIKRYSEIKNHKLISAS

SEQ ID NO: 110406 - protein, 189 aa, Unknown
  Bacterial polypetide isolated from the Sargasso Sea
MKSILEQLSSMTVVVADTGDLDAIKKFQPRDATTNPSLILAAAKNPDYVKLIDQALESSRESLPKGFTESQLIKEAIDQVSVFFGKEILNLVSGRVSTEVDARLSFDTEATVKKARKLINHYKSFGIDKERILIKIASTWEGIQAAEILEKEGIKCNLTLLFNFCQAVACANAKVTLISPFVGRNIGLA

SEQ ID NO: 110407 - protein, 185 aa, Unknown
  Bacterial polypetide isolated from the Sargasso Sea
AEELEREGIHCNLTLLFSFAQARACAEAGVWLISPFVGRIYDWYRDRQLLEDESPQNDPGVISVRNIYEYYKKHRYPTVIMGASFRKPEQVIALAGCDRLTIAPALLEALSRMEGELAVALAPPVAGEIPPSPLNEAEFYWLHNQDPMAVDKLAEGIRLFAQDQEKLESMLSELLEKQEAVNVIA

SEQ ID NO: 110408 - protein, 222 aa, Unknown
  Bacterial polypetide isolated from the Sargasso Sea
AALSFDSAATVARARALHQRYLQLGIPGDRVLVKIAATWEGIQAARQLEREGIRCNLTLIFNLAQARACAEADIYLVSPFVGRILDWHRQQTPDVRFEAENDPGVLSVRQVYRFFKQHDYATVVMAASFRNIGEVLALAGCDRLTISPALLAELEQASGELRPALQDDGQRVLAPACLDEQQFRWQMNEDPMATEKLAEGIRQFHADQLALEALLIERMREL

SEQ ID NO: 110409 - protein, 167 aa, Unknown
  Bacterial polypetide isolated from the Sargasso Sea
MASLLEQLSSMTVVVADTGDLQAIKTFTPRDATTNPSLILAAAQIPAYQNLIDETLRASRALIGPTAPAEQVVAEALDEICVTFGKEILKIVPGRVSTEVDARLSYDTEATIAKAHKLIGLYNDAGISNDHVLIKIASTWEGIKAAEQLEREGIHCNLTLLFGFAQA

SEQ ID NO: 110410 - protein, 222 aa, Unknown
  Bacterial polypetide isolated from the Sargasso Sea
MKSILEQLSSMTIVVADTGDLDSIKKFQPRDATTNPSLILAAAKNPDYVKLIDKALESSENALPQGFSEIELIKETVDQVSVFFGKEILKIISGRVSTEVDARLSFETEATVEKARKLINLYKNFGIEKERILIKIAATWEGIKAAEILEKEGIKCNLTLLFNFCQAVTCANAKITLISPFVGRILDWHKAKTGKTSFVGAEDPGVISVNKFTSTLKKRIQN

SEQ ID NO: 110411 - protein, 260 aa, Unknown
  Bacterial polypetide isolated from the Sargasso Sea
MATLLDQLSAMTVVVADTGDLEAIRKFTPRDATTNPSLILAAAQIPAYQSLIDEALRSSRKLIGSEAPVEDVVHEALDEISVIFGKEILKIVPRRVSTEVDARLSFDTDATIEKGRKLIRLYNDAGISNDRVLIKIASTWEGIKAAEVLEKEGIHCNLTLLFGFGQAVACAEAGVTLISPFVGRILDWYKANTGRDSYPGPEDPGVISVTRIFNYYKTYGYKTEVMGASFRNLDEITELAGCDLLTISPQAVDQLRESEA

SEQ ID NO: 110412 - protein, 283 aa, Unknown
  Bacterial polypetide isolated from the Sargasso Sea
SNLDKIKKNTVIVADTGDIDLIRKIKPEDATTNPSLILKSINQKYNSVNEAIVDIGCKIYNSVPGYISTEVDASFSFDTNETVKQAVDIIDLYKKNGVDTSRILIKIAATWQGIQAAKILEKRNIKCNLTLIFSLTQAISCAQANVTLISPFVGRVTDYYKVNNILYNEDPGVLLVKSIYKYFKEHNYNTIIMGASFRNIDQICSLNGCDRLTISPQLILELKNTQGNINHNISNDVKNDKKKDEYINENTFYIELARNVLATTKLNEGITNFIADTEKIKEK

SEQ ID NO: 110413 - protein, 194 aa, Unknown
  Bacterial polypetide isolated from the Sargasso Sea
SYPGPEDPGVISVTRIFNYYKTYGYKTEVMGASFRNLDEITELAGCDLLTISPKLLDQLRESDASLSQKLDATNPSGGEEQIHVDRERFDAMMAADRMATDKLGEGIKGFSKAIETLEHQLAHRLAELEGGEAFRHAVQEIFMLNDMNGDGCITRDEWLGSDAVFDALDLDHDGRLTPEEVRKGFGAALTLTTA

SEQ ID NO: 110414 - protein, 210 aa, Unknown
  Bacterial polypetide isolated from the Sargasso Sea
MSNQLASLRDITTVVADTGDIDAIKKYQPVDATTNPSLLLKAAGLPQYASLIDDAVAWAKLQSNDADQQLTDAADKLAVAIGKEISATIPGRISTEVDARLSFDTAATIEKAERLVQLYEDAGIDKSRILIKIASTWEGIQAAEELEKKGIQCNLTLLFSFAQAQACAEAGVYLISPFVGRILDWYKKATGTESYAPDEDPGVVSVTKIY

SEQ ID NO: 110415 - protein, 318 aa, Unknown
  Bacterial polypetide isolated from the Sargasso Sea
MANTLEQLKSYTTIVADTGDIEAIKRYQPEDATTNPSLILKAAQIPEYSALIDNAIAWAKLQSADIEQQIDDASDKLAVNIGVEILKLVPGRISTEVDARLSFDKEKSIAKAHKLVRLYQEAGIDKSRILIKLASTWEGICAAKELEQEGINCNLTLLFSFAQARACAEAGVYLISPFVGRILDWYKKDTGKDYDAVNDPGVVSVTEIYNYYKQHGYNTVVMGASFRNIGEIIELAGCDRLTIGPSLLEELANSQVAIQPKLIPASTTVAAGEPLTEAQFRWDFNQDPMAVDKLAEGIRNFAIDQGKLEVMLKAKLAN

SEQ ID NO: 110416 - protein, 178 aa, Unknown
  Bacterial polypetide isolated from the Sargasso Sea
MKSILEQLSSMTIVVADTGDLDSIKKFQPRDATTNPSLILAAAKNPDYVKLIDKALENSENALPQGFSEIELIKETVDQVSVFFGKEILKIISGRVSTEVDARLSFDTEATVEKARKLINLYKDFGIEKERILIKIAATWEGIKAADILEKEGIKCNLTLLFNFCQAVTCANAKITLI

SEQ ID NO: 110417 - protein, 317 aa, Unknown
  Bacterial polypetide isolated from the Sargasso Sea
MTTALDQLKQYTTVVADTGDFQQLAQYQPQDATTNPSLILKAVQKDAYKPILEKTVRDHRNESTDFIIDRLLIAFGTEILKLIPGRVSTEVDARLSFDTQRSIDKGRELIKLYEAAGIGRERILIKLASTWEGIRAAEVLQKEGIKCNMTLLFSLVQAAACAEAGAQLISPFVGRIYDWYKKQAGAEWNEEKDGGANDPGVQSVRRIYTYYKTFGYTTEVMGASFRTTSQITELAGCDLLTISPDLLQKLQDSNETVTRKLSPEALQDKPASRVAIDEAAFRFQLNDDAMATEKLAEGIRVFAADAVKLEKLIDSLR

SEQ ID NO: 110418 - protein, 390 aa, Unknown
  Bacterial polypetide isolated from the Sargasso Sea
MASLLEQLSAMTVVVADTGDLEAIRKFTPRDATTNPSLILAAAQIPAYQNLIDEALRSSRKLIGDNAPVEDVVHEALDEISVIFGKEILKIVPGRVSTEVDARLSYDTDATVEKGRKLIRLYNDAGISNERVLIKIASTWEGIKAAEVLEKDGIHCNLTLLFGFGQAVACAEAGVTLISPFVGRILDWFKADTGRDSYPGPEDPGVISVTRIFNYFKTYGYETEVMGASFRNLDEITELAGCDLLTISPKLLDQLRESDAALTRKLDGSSPVSAEEQIHVDRERFDAMMKDDLMASDKLGEGIKGFSKAIETLEHQLAHRLAELEGGKAFGHAVQEIFMLNDMNGDGSITRDEWLGSDAVFDALDQDHDGLISQEDVRQGFGAALSLTAA

SEQ ID NO: 110419 - protein, 313 aa, Unknown
  Bacterial polypetide isolated from the Sargasso Sea
MNQLEQLSKVTVVVADSGDIAAIQQLQPTEATTNPSLILQASQQPEYQHLLVSALKGNEQDIDAACELVTVNFGCEILRHIPGRVSTEIDARLSFDTEASVAKALSIIERYRAAGVDSNRVLIKLAATWQGIQAAARLEKLGIHCNLTLIFSLAQAKACADAGVTLISPFVGRILDWYKQNQPEQDFSGDKDPGVISVKTIYNHYKNHGIPTVVMGASFRNVDQIRQLAGCDLLTIAPNLLLQLKDSTDPLPAALQPVSTQSPAKAKALSQAEFLWQLNEDAMATEKLAEGIRKFAVDQRKLEQLLHHLAQSR

SEQ ID NO: 110420 - protein, 335 aa, Unknown
  Bacterial polypetide isolated from the Sargasso Sea
MSTLLEQLKAVTTVVVDSGDLGAIEQFRPVDATTNPSLLLNASQLEFSKPLLAQAVAYAKSKSSDLATQVSIASDKFAVDIGTQISKLVPGRVSTEVDARLSFDTQASINKALQLVALYEENGISKDRILIKIASTWEGIQAARHLEQQGIQCNLTLLFHMAQARACAEAGIFLISPFVGRILDWYKANTKQDYTAETDPGVVSVREIYRYFKTYGHKTVVMGASFRNIGEVLALAGCDRLTISPGLLEELNQQQGTLTVYLKDTGATAKETAALTEAEFRWALNEDAMATEKLSEGIRKFAVDQRKLESLIQAQLQPSKGLIFITISDVIQEFI

SEQ ID NO: 110421 - protein, 333 aa, Unknown
  Bacterial polypetide isolated from the Sargasso Sea
MKSILEQLSSMTVVVADTGDLDSIKKFQPRDATTNPSLILAAAKNPDYVKLIDKALENSQNALPQGFSEIELIKETVDQVSVFFGKEILKIISGRVSTEVDARLSFDTEATVEKARKLINLYKIFGIEKERILIKIAATWEGIKAAEILEKEGIKCNLTLLFNFCQAVTCANAKITLISPFVGRILDWHKAKTGKTSFVGAEDPGVISVTQIYKYFKEKGFKTEVMGASFRNLDEIKELAGCDLLTIAPKFLEELKKEKGELVRKLDVSTQINNSIDYEFEEKDFRLSMLEDQMASEKLSEGITGFSKAIEELEELLLKRYSEIKNHKLISAN

SEQ ID NO: 110422 - protein, 333 aa, Unknown
  Bacterial polypetide isolated from the Sargasso Sea
MKSILEQLSSMTVVVADTGDLDSIKKFQPRDATTNPSLILAAAKNPDYVKLIDKALESSENALPQGFSEIELIKETVDQVSVFFGKEILKIISGRVSTEVDARLSFDTEATVEKARKLINLYKNFGIEKERILIKIAATWEGIKAAEILEKEGIRCNLTLLFNFCQAVTCANAKITLISPFVGRILDWHKAKTGKTSFAGAEDPGVISVTQIYKYFKEKGFKTEVMGASFRNLDEIKELAGCDLLTIAPKFLEELKKEKGELVRKLDLSTPINDSIDYEFEEKDFRLSMLEDQMASEKLSEGITGFSKAIEELEELLLKRYSEIKNHNLISAN

SEQ ID NO: 110423 - protein, 390 aa, Unknown
  Bacterial polypetide isolated from the Sargasso Sea
MATLLDQLSKMTVVVADTGDLEAIRKFTPRDATTNPSLILAAAQIPAYQSLIDEALRSSRKLIGDAAPVEDVVQEALDEISVIFGKEILKIVPRRVSTEVDARLSYDTDATIEKGRKLIRLYNDAGISNDRVLIKIASTWEGIKAAEVLEKEGIHCNLTLLFGFGQAVACAEAGVTLISPFVGRILDWYKADTGRDSYPGPEDPGVISVTRIFNYYKTYGYNTEVMGASFRNLDEITELAGCDLLTISPKLLDQLRESDAALSRKLDATNPIGGEEQIHVDRERFDAMMAEDRMTTDKLGEGIKGFSKAIETLEHQLAHRLAELEGGEAFRHAVQEIFMLNDMNGDGCITRDEWLGSDAVFDALDLDHDGRLTPEEVRKGFGAALTLTTA

SEQ ID NO: 110424 - protein, 252 aa, Unknown
  Bacterial polypetide isolated from the Sargasso Sea
MARRFLILLSGRVSTEVDARLSFDTEATVTKARKLINHYKTFGINKERILIKIASTWEGIKAAEILEKEGIKCNLTLLFNFCQAVACANAKITLISPFVGRILDWHKAKTGKDNFAGCEDPGVISVTRIYNYFKEKGFKTEVMGASFRNIDEIKELAGCDLLTIAPKFLDELNREEGELIKKLDEDAQSHSSIDYKFDERDFRLSMLKDQMASEKLSEGITGFSKAIEELEELLLKRLSEINNQKLISTTQI

SEQ ID NO: 110425 - protein, 318 aa, Unknown
  Bacterial polypetide isolated from the Sargasso Sea
MANTLEQLKSYTTIVADTGDIEAIKRYQPEDATTNPSLILKAAQIPEYSALIDNAIAWAKLQSADIEQQIDDASDKLAVNIGVEILKLVPGRISTEVDARLSFDKEKSIAKAHKLVRLYQEAGVDKSRILIKLASTWEGICAAKELEQEGINCNLTLLFSFAQARACAEAGVYLISPFVGRILDWYKKDTGKDYDAVNDPGVVSVTEIYNYYKQHGYNTVVMGASFRNIGEIIELAGCDRLTIGPSLLEELANSQVAIQPKLLPASTTVAAGEPLTEAQFRWDFNQDPMAVDKLAEGIRNFAIDQGKLEVMLKAKLAN

SEQ ID NO: 110426 - protein, 198 aa, Unknown
  Bacterial polypetide isolated from the Sargasso Sea
AAEVLEKENIHCNLTLLFNFYQAVACAEAGVTLISPFVGRILDWYKSATGRDSYPATEDPGVVSVTKIFNFFKSNGYKTEVMGASFRNIEEITELAGCDLLTISPKLLQQLKETHMDLPIKLNAKKPLVIEEKIHLDQTSFELMMAGDKMATEKLDDGISGFSKAIDKLENQLNERLELIEEGSCPNSLSFNFERVIS

SEQ ID NO: 110427 - protein, 62 aa, Unknown
  Bacterial polypetide isolated from the Sargasso Sea
MKKKKISGAEAVIHSLLNESVDLVWGYPGGAIMPVYDEFYKFQDKLKHILARHEQGAIHAAQ

SEQ ID NO: 110428 - protein, 321 aa, Unknown
  Bacterial polypetide isolated from the Sargasso Sea
MVFQAFHSVELYRGLAQKNIRHITPRHEQGAGFMADGYARRSGMPGVCFVITGPGLTNIITPMAQAYADRIPMLVISTINPTPELGKNSGLLHALPDQSKLAKSVSLKLYTITNPKNASKIVSKAFFKTLGSRKGPVIIEIPTNILEERISNVTRNIGSPISLMSRKFKSDLLKFLKVVESEESILIFAGGGAVNASEELSELSEKLCAPVILTINARGLMSSSSMVLPASPSLPVVRAFIKNYDIAIVIGSELGPTDYDMFGTGTKLKFKKIVRIDTDPNPNSGNTKINLNITQESKLFFTEINRYLLEKNLGRKRLNQM

SEQ ID NO: 110429 - protein, 294 aa, Unknown
  Bacterial polypetide isolated from the Sargasso Sea
TKHNYLVMNADEIPRVLKEAFIIANTGRPGPVLIDIPRDVFTEEFDFDNKFWDEDIKILGYNPPKFADNPKIDKALKLIEESKKPVILAGHGIIISKAYDELLELAESAQIPVITTLLGISSFPENHVLSLSFPGMHGVAWASLALDQADLVIAIGSRFDDRITGDTSRFATRSKKIHIDIDPAEINKNIEVDVALIGNAKDILKQMLPKLKRKTHIDWLSHIEKLKEDHPSLKLRKSSDLTGQYVIKSLSDETEGKSVIVTGVGQHQMWAAQHYSYCSQNSWISSGGFRNNGV

SEQ ID NO: 110430 - protein, 227 aa, Unknown
  Bacterial polypetide isolated from the Sargasso Sea
TGITRPCTKHNWLVKDINDLSKVMHEAFRVATTGRPGPVLIDIPKDIQFAKTKYKKLNKEKELNGKSHNKFSQDQIDELVKLLKKSKKPIIYSGGGVINSGPKASQALREFVEITGFPITSTLQGLGAYPGDDNQFLGMLGMHGTYEANNAMHDCDLLINIGARFDDRITGKIDEFSPNSKKVHIDIDPSSINKIIKVDLAIVGDVTSVISKINKTFIKSKNGHSKS

SEQ ID NO: 110431 - protein, 292 aa, Unknown
  Bacterial polypetide isolated from the Sargasso Sea
CTKHNWLVKDINDLSDVMHEAFKVATTGRPGPVLIDIPKDIQFAKAKYTKPKKEKNLNGKSNNKFSQKQIDQLIDLLKNAKKPIIYSGGGVINSGPKASDALREFVELTGFPITSTLQGLGAYPGDDNQFLGMLGMHGTYEANNAMHDCDLLINIGARFDDRITGKIDEFSPNSKKVHIDIDPSSINKIIKVDLAIVGDVTKVIAKVNKTILKKKNGHNKSNKSNIAKWWEQIQKWRTIESLNFINSNDNIKPQHAVQRLYELTKDKDTYVTTEVGQHQKRAAQHYKFNKPK

SEQ ID NO: 110432 - protein, 252 aa, Unknown
  Bacterial polypetide isolated from the Sargasso Sea
MIFKNKENKSSTIGSSLLTILEEFGVDIIFGIPGVHTIEIYRGLQKTSIKHITPRHEQGAGFMADGYYRVSGKPGVCLVITGPGLTNILTAMAQARADSIPMLIISSVNPYENTDKSSGLLHELPNQQKLLKKIAISSLTVKKTKDLLPAIKKSFLKMLEERPGPVHLEIPTNVLNYKYPKLKKNNLAIKKKKIKSSEKELHEVANYLTFAKYPVLLLGGGARECDEYILQIVEKLSLFVITTINARGILGD

SEQ ID NO: 110433 - protein, 155 aa, Unknown
  Bacterial polypetide isolated from the Sargasso Sea
PAAIGVQIANPGKLVIDIAGEASVLMTMQEMSTAAQYKLPIKIFILNNQYMGMVRQWQELLHEKNYSESYTAALPDFVKLAEAYGCVGIRASKPDELDEKINHMLSVNKPVIFDCVVDKVENCYPMIPSGKPHNQMLLGEQDEEDEISEEGKVLV

SEQ ID NO: 110434 - protein, 223 aa, Unknown
  Bacterial polypetide isolated from the Sargasso Sea
MDIQAWADDCAGAARAGAHRYDAPGEGVYAPALLKEISEAAGDDFVAACDVGQHQMWAAMHCRFAKPEAHITSGGLGAMGFGLPAGIGAKLADPSATVVTIAGDGGFMMNIQELATLKRYGVPLKIVLIDNSSLGLVRQWQELFFAENYSEIDLSDNPDFVKVAEAFGIEAFRIDRRDQVSDGIQRLLAADGPCLAHVVIDPRDNVWPLVPPGKNNAEMMEGS

SEQ ID NO: 110435 - protein, 204 aa, Unknown
  Bacterial polypetide isolated from the Sargasso Sea
VIVTDMGLSFVGTHQTFKIQKGQRLFTNSGHAPMGWGLPAAIGAYYASKNSRIICLSGEGGLQMNIQELATIMHNKLPIKIFIFNNGGYLTIKQTQQLGFNSRIMGSNSKSGISFPNYKKIAESHKIKYIKIQNNKNIDKKIKQVLKGKNSVICELMMDHNQEQMPKAINKRTISGKVVATKYEDMYPFLSKNELESNNFKNTN

SEQ ID NO: 110436 - protein, 32 aa, Unknown
  Bacterial polypetide isolated from the Sargasso Sea
INILVRRGENCYPMVPPGKSNAQMVGYVNCED

SEQ ID NO: 110437 - protein, 250 aa, Unknown
  Bacterial polypetide isolated from the Sargasso Sea
EIPKVIKEAFYIATSGRPGPVVIDIPKDTTAPDKLFEYNSPETVKIRSYNPPVEPDSKQIARAVSEILKAKKPVIYAGGGAINSNASKELFELNELLNFPVTNTLMGLGIYPAKHNRFMGMLGMHGTYQSNMAMHNADLIIAIGARFDDRITNTPDLFAPNAKIIHFDVDQSSVSKIIEANIAVFGQVKNSLIELNKQLKDKIDSIDSTLIQPWLDQIDEWTSLHGLNHELYKENSDEKMIMPQSVVQHV

SEQ ID NO: 110438 - protein, 144 aa, Unknown
  Bacterial polypetide isolated from the Sargasso Sea
SGQVPTHLIGTDAFQECDTTGITRPCTKHNWLVKDINDLASTIHKAFEVATTGRPGPVLVDIPKDIQFQKTKYKKPQKEKKLNGKSHNQFNQNSIDQLIDLMSKSSKPIFYTGGGVINSGPKASELLRELVYATGFPITSTLQG

SEQ ID NO: 110439 - protein, 28 aa, Unknown
  Bacterial polypetide isolated from the Sargasso Sea
MPKYYKFEEPNRWLTSGGLGTMGYGFPA

SEQ ID NO: 110440 - protein, 87 aa, Unknown
  Bacterial polypetide isolated from the Sargasso Sea
MNNEITGAEIVLKSLAEQGVEVVFGYPGGAVLPIYDTLFKQNSIKHVLVRQEGGAIHAAEGYARSTGKTGVVLVTSGPGATKCCNQV

SEQ ID NO: 110441 - protein, 152 aa, Unknown
  Bacterial polypetide isolated from the Sargasso Sea
IGVQVANPDKLVIDIAGEASVLMTMQEMSTAVQYNLPIKIFILNNQWMGMVRQWQELLHEKNYSESYTAALPDFVKLAEAYGCVGIRANKPQELDEKIAEMLSVNKPVIFDCVVDKAENCYPMIPSGKAHNQMLLGDQDEEEKISDEGKVLV

SEQ ID NO: 110442 - protein, 65 aa, Unknown
  Bacterial polypetide isolated from the Sargasso Sea
MPNFTGAEIVIKSLLSQGVDTVFGYPGGAVLPIYDEIFKEKKIKHVLVRHEQAAVHAAEGYARST

SEQ ID NO: 110443 - protein, 280 aa, Unknown
  Bacterial polypetide isolated from the Sargasso Sea
QTITPQLGKDAFQEADVFGITAPTCKHSYLVKNADDIPRVVEESFHISTTGRPGPIVIDLPKDVTSAVTTAKTSNVEMDLPGYELDTDLDVATIKKMAKALKQSKRPLLLFGHGGIISKASKELQELAETLNAPVVTTKLGKGSIPENHELALGMLGMHGTAYANKAVAGCDLIFSIGSRWDDRITPLKIERFCPGAVKLHIDIDPAEINKVLVPDYSVVADAKRAVKELLKHISPCQSKRWVAETKKNKKKFPLKYKIHGGLKAQHVIDVAYQLSKGNA

SEQ ID NO: 110444 - protein, 259 aa, Unknown
  Bacterial polypetide isolated from the Sargasso Sea
KELPQKISLDKNWLDYCRKVRKKYPIVLDKYKKQKKSINSYYFIDILSKLLKPKDVVVTDMGLSFVGTHQAFKVKKGQRVYTNSGHAPMGWGLPAAIGAYYASIETKGKKNIICLTGEGGLQMNIQELATVLHHKIPIKIFIYNNGGYLTIKQTQQLGFKSRIMGSNYDSGLSFPNYELVSKSHSIKYFKIADTKKIKNTISKILKFNEPVICELILDSEQEQMPKAINKRTSDGKSIPTTFEDMYPFLPKKELKSNML

SEQ ID NO: 110445 - protein, 118 aa, Unknown
  Bacterial polypetide isolated from the Sargasso Sea
MATCGEVLVHLLERYGVDHVFGIPGVHTVELYRGLARSSIRHVTPRHEQGAGFMADGYARTSGKPGVCFIITGPGMTNITTAMGQAYADSIPMLVISSVQARSQKGGGRGKLHELPNQ

SEQ ID NO: 110446 - protein, 263 aa, Unknown
  Bacterial polypetide isolated from the Sargasso Sea
DSIPMVVLCGQVASTLIGEDAFQETDMMGVSRPVVKHNLSVRHPEEIPEIIRKAYYIAATGRPGPVVVDIPKDMTTPNERYEYAYPKKVKLRSYNPAIRGHAGQIKKAVDMMLAAKRPIIYAGGGVVLGKASDQLTELVRLLGYPITNTLMGIGCYPASDKQHLGWLGMHGTYEANMAMHHSDLILCVGARFDDRVTNATEKFCPGARIIHIDIDPASISKTVDADVPIVGPVDAVLKEMLSLVKEAKEKPDADAIASWWKQI

SEQ ID NO: 110447 - protein, 142 aa, Unknown
  Bacterial polypetide isolated from the Sargasso Sea
VKDINDLENTIAEGFYVAKSGRPGPVVIDLPKDVQNSITNYKGIKVKSMASYKPAKKAKINNIKEAIDILIKAKKPVIYSGGGVINSGQKASSTLTKLVDYLNIPITQTLMGLGAVSAKNKNFIGMLGMHGTYEANMAMHDC

SEQ ID NO: 110448 - protein, 123 aa, Unknown
  Bacterial polypetide isolated from the Sargasso Sea
KNTLKKKLNGKATNKISNLELDKFINLIKKSSKPIFYTGGGVINSGPEASKYLRELVSLTGFPITSTLQGLGAYPGDDPQFLGMLGMHGTYEANNAMHDCDLMINIGARFDDKITGKVDEFSP

SEQ ID NO: 110449 - protein, 43 aa, Unknown
  Bacterial polypetide isolated from the Sargasso Sea
QKALANEGPVLVNVNVRKGENCYPMVPPGKSNAQMVGIPEIKT

SEQ ID NO: 110450 - protein, 295 aa, Unknown
  Bacterial polypetide isolated from the Sargasso Sea
VVMLQLDMLNLQIKTGVCVVTSGPGLTNLITPILDANNDSTPLVVFSGQVPLRAMGTCAFQEAPSTEITKPITKWSYCVQDVNELPYVVDKAFWLANHKKPGAVHIDLPKCVLTSELNDNHKEFSYKEEKKELNYDFNEIVDIINNSNQPVLYIGKGVLEASKELRELAIKANIPVTTTMHAMGVFDENHDLSLQMLGMHGSYAANHAIQNSDCIICIGARFDDRTTGNLDYYAPKARQAFEEGRGGIIHCNIEGSEINKVINSNYNFCMNSKDFINKISAMVNFRERKGWFTQI

SEQ ID NO: 110451 - protein, 322 aa, Unknown
  Bacterial polypetide isolated from the Sargasso Sea
MYVRTWSTNVVTGLTDAMMDSVPIVCITGQVPQHLIGSDAFQECDTTGITRPCTKHNYLVKDVNKLSSVFHEAFTIAQNGRPGPVLIDIPKDVQFASGTYEEKNKIIIPSHRLFEPSPDFEKNKIEEAVELISKAKKPIFYIGGGCINSGPKASTLVREFINMVGSPVTMTLMGLGVVGSSDKNSLGMLGMHGMYEANMAMHECDVMINIGARFDDRVTGRLDAFSPNSKKIHIDIDESNINKTINVDVPIIGDVKQVVEKMITIWKEKKFQIDDKELKLWWDKINKWKQVDCLNYNNEGKQIKPQYAVQRLYELTKNTKTF

SEQ ID NO: 110452 - protein, 40 aa, Unknown
  Bacterial polypetide isolated from the Sargasso Sea
LANEGPVLVNVNVRKGENCYPMVPPGKSNAQMVGISEIKK

SEQ ID NO: 110453 - protein, 83 aa, Unknown
  Bacterial polypetide isolated from the Sargasso Sea
MAMKQEMTGAEIVLQSLVDQDVEVVFGYPGGAVLPIYDTLFKQNSIKHVLVRQEGGAIHAAEGYSRSTGKIGVVLVTSGPGAT

SEQ ID NO: 110454 - protein, 100 aa, Unknown
  Bacterial polypetide isolated from the Sargasso Sea
KTFVTTEVGQHQRWAAQFYKFEEPNRGLTSGGLGTMGYGFPAAIGAQGGNPEALVVDIAGDASILMNIQEMSTAIQYRLPVKILIINNEYMGRVRQWQEL

SEQ ID NO: 110455 - protein, 183 aa, Unknown
  Bacterial polypetide isolated from the Sargasso Sea
MWAAQFCKSIRERQWLSSGGAGTMGYGFPAAIGAQLGRPTDLVVAVVGDGGFQMTMSELATAAIHKLPIKIIIINNSYLGMVRQWQQLFFDNRESGVDMEGNPDFVKIGEAFGIKGFYLRRAGDVVKVLKKALDYDDGPCIVDAQVVKADNVFPMIPAGAAVSDMLIDEPPKNQKMQKPVGST

SEQ ID NO: 110456 - protein, 264 aa, Unknown
  Bacterial polypetide isolated from the Sargasso Sea
YLVKDVNKLSSVFHEAFTIAQNGRPGPVLIDIPKDVQFASGTYEEKNKIVIPSHRLFEPSPDFEKNKIEEAVELISKSKKPIFYIGGGCINSGPKASKLVREFINIVGSPVTMTLMGLGVVASSDKNSLGMLGMHGMYEANMAMHECDVMINIGARFDDRVTGRLDAFSPNSKKIHIDIDESNINKTINVDVPIIGDVKQVVEKMIEIWKDNKFQIDDKALKLWWDKITKWKKVDCLNYNNEGNQIKPQYAVQRLYELTKNTKT

SEQ ID NO: 110457 - protein, 50 aa, Unknown
  Bacterial polypetide isolated from the Sargasso Sea
QGLGAYPGDDPQFLGMLGMHGTFEANNAMHDCDLMINIGARFDDRITRKS

SEQ ID NO: 110458 - protein, 205 aa, Unknown
  Bacterial polypetide isolated from the Sargasso Sea
VIELLKKSSKPFLYTGGGVINSGPRATQLLRELVTLTGFPITSTLQGLGAYPGNDSQFLGMLGMHGTYEANNAMHDCDLMINIGARFDDRITGKIDEFSPNSKKIHIDIDPSSINKNVKVDLALVGDVKLVLEKIVSAVKKKHPDFESSNKQKISAWWGMIDRWRKKNSLSYINSKEVIKPQFAVQRLYELTKAQDVFITTEVGQ

SEQ ID NO: 110459 - protein, 294 aa, Unknown
  Bacterial polypetide isolated from the Sargasso Sea
VVTGLTDAMMDSIPIVCITGQVPQHLIGSDAFQECDTTGITRPCTKHNYLVKDPNKLSPVFHEAFTIAQDGRPGPVLIDIPKDVQFANGTYTKKENIIIPSHRLFEPEIFKNDKKIDEVVNLISKAKKPIFYIGGGCINSGPKAAELVSQLVEMTGAPATMTLMGLGVLGSSHPNSLGMLGMHGMYEANMAMHECDVMINIGARFDDRVTGRLDAFSPNSKKIHIDIDESNINKTIKVDVPVVGDVTAVLKRVVKVWKDNHIKTNESDLKLWWNKINNWKKIDCLHFTNKKKKS

SEQ ID NO: 110460 - protein, 254 aa, Unknown
  Bacterial polypetide isolated from the Sargasso Sea
DIPKDIQFQKTKYKKPKKENKLNGKSHNHFNQNSIDELIELMSKSSKPIFYTGGGVINSGPKASELLRELVYATGFPITSTLQGLGSFPGDDNQFLGMLGMHGTYEANNAMHDCDLMINIGARFDDRITGKIDEFSPNSKKVHIDIDPSSINKNVKVDLAIVGDVKTVLSSTLKSLKQKKSKFLKSNKQKTSKWWEKIQKWRSVRSLDYIGSEETIKPQYAIERLYELTKDKDSYITTEVGQHQRWAAQHYKFN

SEQ ID NO: 110461 - protein, 191 aa, Unknown
  Bacterial polypetide isolated from the Sargasso Sea
MKVSDYIWDYLYRTTKSKHVFLLSGGGMMHLLDSVGKSKFKIVPTHHEQGASIAAYSYGRTINSIGVCLVTSGPGATNALTGVAAAYMDSTPMIVISGQVSTLFSKKNMKIRQLGFQEFDIISSVKSTTKYAKFLNNKNQVQYELDKACFLAKNGRPGPVWLDVPLDIQNSQVEIKKDKKFFFNRNISSKL

SEQ ID NO: 110462 - protein, 202 aa, Unknown
  Bacterial polypetide isolated from the Sargasso Sea
MKKSSKPIFYTGGGVINSGPDASKYLRELVSLTGFPITSTLQGLGSYPGDDPQFLGMLGMHGTFEANNAMHDCDLMINIGARFDDRITGKVDEFSPKSKKIHVDIDPSSIGKNIKVDLAVVSDVSELLKSLIKRFKEKNKNFLSSNKQKTSKWWEQIDKWREKKSLNFINSNKIIKPQHAVQRLYELTKDQDTFITTEVGQH

SEQ ID NO: 110463 - protein, 61 aa, Unknown
  Bacterial polypetide isolated from the Sargasso Sea
MKTSDLFVKCLENEGIEYIFGVPGEENADFLMSLHESKKIKFILTRHEQGAAFMAESYGKL

SEQ ID NO: 110464 - protein, 230 aa, Unknown
  Bacterial polypetide isolated from the Sargasso Sea
DVNKLSTTIHEAFEIANNGRPGPVLIDIPKDVQFAKGKFEKKENIIIPKHRLFEPKIIANKQNIYEAAKLISGAKKPILYIGGGCINSGPHASKLITDFIEETGIPATMTLMGLGVLGSSNKHSLGMLGMHGMYEANMAMHDCDVMINIGARFDDRVTGRLDAFSPNSKKIHIDIDASNVNKTIKIDLPIIGDVGSVMKDFMTVWKDNNFFVDKEVLQKWWKKIEDWKKV

SEQ ID NO: 110465 - protein, 225 aa, Unknown
  Bacterial polypetide isolated from the Sargasso Sea
MKKKLNGKSHNKFSQDQIDELVKLLSKSKKPIIYSGGGVINSGPKASHALREFVELTGFPITSTLQGLGAFPGDDNQFLGMLGMHGTYEANNAMHDCDLLINIGARFDDRITGKIDEFSPNSKKVHIDIDPSSINKIIKVDLAIVGDVTSVISKINKTIAKRKNGHSKSNKSNIAKWWEQIEKWREKDSLNFVNSNESIKPQYAVQRLYELTKNKDTYVTTEVGQ

SEQ ID NO: 110466 - protein, 182 aa, Unknown
  Bacterial polypetide isolated from the Sargasso Sea
MTAKKVNQINETELSGAELIYRSLAREKVEFIFGHPGAVLLTVLDLFLKRKNITHILTRHEQCAAHMAEGYARASGRVGVCLTTSGPGATNLVTGIADAYMDSIPLVCITGQVATSMVGNDAFQEADIIGMTRTVTKHSYLIKSTKDLSKIFQEAFHISRTGRPGPVLIDIPKDVILGRQKK

SEQ ID NO: 110467 - protein, 271 aa, Unknown
  Bacterial polypetide isolated from the Sargasso Sea
NVVTGLTDAMMDSVPIVCITGQVPQHLIGSDAFQECDTTGITRPCTKHNYLVKDVNKLSSVFHEAFTIAQNGRPGPVLIDIPKDVQFASGTYEEKNKIIIPSHRLFEPSPDFEKSKIEEAVELISKAKKPIFYIGGGCINSGPKASKLVREFINMVGSPVTMTLMGLGVVGSSDKNSLGMLGMHGMYEANMAMHECDVMINIGARFDDRVTGRLDAFSPNSKKIHIDIDESNINKTINVDVPIIGDVKAVVEKMITVWKDKKYKIDSESLT

SEQ ID NO: 110468 - protein, 162 aa, Unknown
  Bacterial polypetide isolated from the Sargasso Sea
DIPKDIQLAKAKYKKPKKEKKLNGKSNNKFSQKQIDQLIDLLKNAKKPVIYSGGGVINSGPKASDALREFVELTGFPITSTLQGLGAYPGDDNQFLGMLGMHGTYEANNAMHGCDLLINIGARFDDRITGKIDEFSPNSKKVHIDIDPSSINKIIKVDLAIV

SEQ ID NO: 110469 - protein, 172 aa, Unknown
  Bacterial polypetide isolated from the Sargasso Sea
ERQWLSSGGAGTMGYGFPAAIGAQLGKPNDLVVAVVGDGGFQMTMSELATAAIHKLPMKIIIINNSYLGMVRQWQELFFDNRESGVDMEGNPDFIKIGEAFGIKGFYLRRAGDVEKVLKKALDYNDGPCIVDAQVVKADNVFPMIPAGAAVSDMLIDEPPKSQKMQKPVGST

SEQ ID NO: 110470 - protein, 184 aa, Unknown
  Bacterial polypetide isolated from the Sargasso Sea
MARNIGSGEAIVDILQQEQVTHLFGIVGSSFLDILDSLYDKQTIEFVGTRHEQGAALMADGYARVTGKPAVCIATNGPGVLNLSYGVGSAFVAHSPVVYIAPSASRDHQNRDSTQEFDQVSLFKPITKAAYSVNKVERIPDAIRQAFRIATSGKMGPVLVDIPRDVIAGNSLDIDDLSVDQYRP

SEQ ID NO: 110471 - protein, 156 aa, Unknown
  Bacterial polypetide isolated from the Sargasso Sea
AAMGAKVAHPEALVVDIDGDGSILMNIQEFATCKTENIPVKVLLLNNQHLGMVVQWEDRFFKGNRAHTYLGPVDHPEACGQGDGISPGSRYPDFVAIAQGFGWQAETVSEKGELEAALTRLIDAEGPALLDCQVPYQEHVLPMIPSGGTVRDLIKK

SEQ ID NO: 110472 - protein, 549 aa, Unknown
  Bacterial polypetide isolated from the Sargasso Sea
MTGGKAMVMAAKANGIDTVFGLPGAQTYPIFDALYNLPEIKTIISRHEQGAAYMAYGYSKATGKPGAFSVVPGPGVLNTTAALCTAAGGNVPLLCMTGQVPAEFFGKGRGHLHELSSQTGTLETLIKHAEHIADPSKTYSYMNKAFRTMLSGRPGPVSLEMCWDTMGQQWDVEVTNGNSSVDKPDLDDDAVNEAAKLISNSKNIMIMSGAGAQHASKEVRELASLLGAPSTALRSGKGVVSEDSDVGVSSAVARKLWEDTDLLIGIGSRLEMQYMRWLSMMKYYDRSPPGWRGSVTPNAPKLIRIDIDPEEMVRLKPDVGIVADSIDGVTALINRVNKIGFQKGNLDRIASMKAKMRKAIEKIQPQMSYLDIIRDILPRDGYFIEELCQAGFTSYYGFPVYEPRTYVSSGYQGTLGFGFPTALGVKASMPDKAVVSIIGDGGFMFAMPELSTAVQHNLSVITVLFNNNSFGNVRRDQKDRFQSHIIGADLTNPDFLKIADSFGVKGYRVSTPKDFKPALKNAIEEDKPAIIEVEIEKDSETNPWKYIHG

SEQ ID NO: 110473 - protein, 28 aa, Unknown
  Bacterial polypetide isolated from the Sargasso Sea
MRNILGIHQEKWISSAGLGTMGFGLPAA

SEQ ID NO: 110474 - protein, 619 aa, Unknown
  Bacterial polypetide isolated from the Sargasso Sea
MKVADYIIKFFSKKGIDKAFVVYGAANGDLIDAFTRNKKIQYVATMHEQAAGFAAEGYAKIKRIPGLSIVTSGPGATNLVTSIANCFYDSIPCIFIAGQINSKFLRPDKSIRQVGFQETDIVSIVKPVAKYAVMIKDPNKIKYELEKSYNICKSGRMGPIFLDIPMDIQKAQIDEKKLIGYRKKINKPKYNINKVRTSIKKYLRDLNKSVRPIFLVGGGLQLTNNSKKILKISKLLQIPCIPTWNGIDTITSDFQFYGGRVGTYGGPGRNFAIQNSDLLFGVGTRVSGRITGGNPSSFAREAKKYIVDIDPPLLKRKLQQVKFDENIYCDLDLFFKVFFEEIKKFKIKKNNFKKWNSKVKYWIKKYDTYKEKYSNKNGYTYKGKNFVHPYAFMNSLSKNLNKKDIIVGDCGGISVMIGHSLKTKFGQRYHSNNGHAPMGFSFSAAIGSWFGSNKKNNTISLTGDGGFNMNIQELQTLVNYKIKVKTFILNNHIYGITKAFQKTNFQGREEACGPKGYNPPNFIDIAKAYKIKTVSINNNSEIEKKIKEVLNYNGPVVCDVNCHEFHDYEPKLIGWQTPIEDMYPYISRSELKNNLYIKMHEASKNPFMPDVSTKVDTME

SEQ ID NO: 110475 - protein, 156 aa, Unknown
  Bacterial polypetide isolated from the Sargasso Sea
MEGGRIVQVGTPQAIYHQPASRFVASFVGTMNFLDTLVLSPSQVRLNEQPLTLANRAAAGSKLQVAIRPEAITLSAPSEPYLGQHGIEATIDQVEFLGAAQRLICTADTYLGPQQILVERPTHELPRHEQGGWRSGMRCSLHWPAAAMQLFEGERP

SEQ ID NO: 110476 - protein, 78 aa, Unknown
  Bacterial polypetide isolated from the Sargasso Sea
MLTGAELIVRTLEHLKISTVFGLPGGAILPAYDPLYDSPIRHILARHEQGAGHMAEGYAQATGELGVVIATSGPGATT

SEQ ID NO: 110477 - protein, 303 aa, Unknown
  Bacterial polypetide isolated from the Sargasso Sea
KRRFTALTDAYMDSVPLVCISGQVPTHLIGTDAFQECDTTGITRPCTKHNWLVKDIKDLAKTMRKAFEVATTGRPGPVLVDIPKDIQFQKTSYSKNKKQKKLNGKKNNNFSQKEVDELIKLMSEASKPIFYTGGGVINSGPKASELLRELVRSSGFPITSTLQGLGSYPGDDNQFLGMLGMHGSYEANNAMHDCDLMINIGARFDDRITGKIDEFSPKSKKVHIDIDPSSINKNVKVNLPIVGDVSEVLSSIIKTIKKTKSNFTKSNKEKISKWWDQIEKWRSINSFNFVNSTELIKPQYAVS

SEQ ID NO: 110478 - protein, 176 aa, Unknown
  Bacterial polypetide isolated from the Sargasso Sea
MDGNTDTKTTITGADAILKVLNEQGVEVIFGYPGGAILPIYDALFKSNSIRHILVRHEQAAVHAAEGYARSTGKVGVVLVTSGPGATNAVTGLTDALMDSIPIVCLSGQVPTHLIGNDAFQEADTTGITRPCTKHNYLVKESDKLCSTLHEAFHVARTGRPGPVVIDLPKDIQLSE

SEQ ID NO: 110479 - protein, 68 aa, Unknown
  Bacterial polypetide isolated from the Sargasso Sea
MLSGMPDFIALARSFGVDGVKITDRELLHRDLAAALQSPTPTMIDVHVRRGENCYPMVPPGKSNAQMV

SEQ ID NO: 110480 - protein, 168 aa, Unknown
  Bacterial polypetide isolated from the Sargasso Sea
VAQHMKFSHPSNHLSSGGAGTMGFGLPAAIGAQVARPDDFVMTVSGDGSIMMNIQELATIRRNNLPVKILILDNQRLGMVRQWQELFFEGRYSETNLSDNPDFVQLAAVFGIPGQTITHANQVDDAITALVNSKGPYIVHACIDDKENVWPLVPPGAANDEMITEKAQ

SEQ ID NO: 110481 - protein, 168 aa, Unknown
  Bacterial polypetide isolated from the Sargasso Sea
MTSGGLGTMGYGFPASIGVQIAHPKALVINVAGEASWLMNMQEMGTAVQYKLPVKQFILNNERLGMVRQWQELLHGERYSHSWSDALPDFVKLADAFGAKGIMVSDPADLDDAIMEMLSYDGPVLFDCLVEKHENCFPMIPSGEPHNKMLLGEATTEDAIGSSGAVLV

SEQ ID NO: 110482 - protein, 110 aa, Unknown
  Bacterial polypetide isolated from the Sargasso Sea
MNETMIGATALMKALEKEGVKEVFGLPGGANLPMYDELGKSNIRHILVRHEQSAAHMADGFGRVSRKPGVCFATSGPGATNLLTGIATAQADSAPMVAVTGQVPVAMMKR

SEQ ID NO: 110483 - protein, 317 aa, Unknown
  Bacterial polypetide isolated from the Sargasso Sea
KISNAYDELLELAEKCEIPVINTLLGLSSFPANHYLYAGWPGMHGMAYSNLILDQADLIVAIGMRFDDRITGNPEKFATSSKKIHIDIDASEVGKIIQVDVPIVANAKTALKELIPAVSDKKHSDWLSQIDRIKNDHPSLKLRDTQKLLPQYIINKLHEITKGESIIVTGVGQHQMWAAQYYTFNDKNKIITSGGAGAMGYEVPGALGAQVGRPNEMVWSIAGDGGFMMTMSELATIAENKLPVKIAIMNNGFLGMVRQWQELFYDKSYVSTSYNGIPDFVKLAEAFGIMAMRVTDKTQVQSAITDAINHDGPVLID

SEQ ID NO: 110484 - protein, 298 aa, Unknown
  Bacterial polypetide isolated from the Sargasso Sea
YMDSVPLVCISGQVPTHLIGTDAFQECDTTGITRPCTKHNWLVKDINDLSRILHLAFEVATTGRPGPVLVDIPKDIQFKKGKYKFIKNVFKKKLNGKIQNNKVSNSELDKFIELMKKSSKPIFYTGGGVINSGPEASKYLRELVSLTGFPITSTLQGLGAYPGDDPQFLGMLGMHGTYEANNAMHDCDLMINIGARFDDRITGKVDEFSPGSKKIHVDIDPSSIGKNIKVDLAIVSDVAGLLKSLIKRFKEKNKNFLNSNKQKTSNWWEQIGKWREKKSLNLINSDKVIKPQHAVQRL

SEQ ID NO: 110485 - protein, 320 aa, Unknown
  Bacterial polypetide isolated from the Sargasso Sea
VETIFGYSGGAILPTYDEVFKYNEANPENPMPLIVPSNEQGAGFMASGYARSTGKPGVVMVTSGPGATNTVTPVRDAMADSIPMVIICGQVSRQAIGSDAFQEAPVTSVMGSVAKHVFLVTDENKLAATLKAAFEVATSGRPGPVVVDIPKDVQTAEISEEDYEDANISAYSNRILAIEKSRLNQEKSSEFFTHLGNSKRPLIYFGGGVISASASKELREFVDYFNLPAVSTLMGLGAVDTRHPSSLHMLGMHGTPYANYAVQESDFLIAIGSRFDDRVAGVPEKFAPKAKVIAHFDVDPSEINKSRMLLGLISEYCHWH

SEQ ID NO: 110486 - protein, 156 aa, Unknown
  Bacterial polypetide isolated from the Sargasso Sea
MKKLSGARIVIEALIQENVKVIFGYPGGAVLPIYDELFKQNKIRHILVRHEQAAVHAAEGYARSTGKVGVVLVTSGPGATNTVTGLTDAMMDSVPVVCISGQVPTHMIGNDAFQEADIVGITRPCTKHNYLVKEISKLAESIHSAFHISKNGRPGP

SEQ ID NO: 110487 - protein, 183 aa, Unknown
  Bacterial polypetide isolated from the Sargasso Sea
MWAAQHYKFDKPNRWMTSGGLGTMGYGLPSAIGVQVANPDKLVIDIAGEASVLMTMQEMSTAVQYKLPIKIFILNNQWMGMVRQWQELLHEKNYSESYTAALPDFVKLAEAYGCTGIRAKKPDELDTKIAEMLSINGPVIFDCVVDKAENCYPMIPSGKPHNQMLLGDQDEEEKISDEGKVLV

SEQ ID NO: 110488 - protein, 184 aa, Unknown
  Bacterial polypetide isolated from the Sargasso Sea
MWAAQHYKFDKPNRWMTSGGLGTMGYGLPSAVGVQVAHPNKLVIDIAGEASVLMTMQEMSTAVQYSLPIKIFILNNEYMGMVRQWQELLHDKNYSESYTAALPDFVKLAEAYGCVGLRASTPEELDDKIIEMINTERPVIFDCRVDKVENCFPMIPSGKAHNQMLLGPNDQKENKITGKGKTLV

SEQ ID NO: 110489 - protein, 254 aa, Unknown
  Bacterial polypetide isolated from the Sargasso Sea
KNIEVDVALIGNAKDILKQMLPKLKRKTHIDWISHIEKLKEDHPSLKLKKSSDLTGQYVIKSLSDETEGKSVIVTGVGQHQMWAAQHYSYCSQNSWISSGGLGTMGFEVPAALGAKVGAPDKNVWSIAGDGGFQMTLCELATIVENNIKVKFALLNNNHLGMITQWQGMFFNEDYQANAYTANPDFVKLANAYGMKALSVNNNEDVRPAIREANSHDGPFLIDFKIKKEENVFPMIPSGQSVNELLEEPIDGSN

SEQ ID NO: 110490 - protein, 228 aa, Unknown
  Bacterial polypetide isolated from the Sargasso Sea
EKAAELISSSKKPLLYVGAGAVIAQASRQVIGLAEKLQAPVTTTLLGKGAFPETHPLSVGMLGMHGTAYANKTVVDCDLIMAIGARWDDRITGKVSEFCPDATKIHIDVDPAEFGKIIDPDVSIAGDAKLVLEDLIPLVSKLDSQPWLKQIEKWKKKYPLKFPKRGGLRAQQVLKELDTLTDSKAIISTDVGQHQMWTAQFCKTNEERKWLSSGGAGTMGYGLPSAIG

SEQ ID NO: 110491 - protein, 59 aa, Unknown
  Bacterial polypetide isolated from the Sargasso Sea
MPKLFSGAEIVFKALEDQKVEYIFGYPGGAVLPIYDELKNHKSIKHILARHEQGAGHSA

SEQ ID NO: 110492 - protein, 133 aa, Unknown
  Bacterial polypetide isolated from the Sargasso Sea
MNETMIGATALMKALEKEGVKEVFGLPGGANLPMYDELGKSNIRHILVRHEQSAAHMADGFGRVSRKPGVCFATSGPGATNLLTGIATAQADSAPMVAVTGQVPVAMIGKDAFQESDIIGMANPALKYSYQPR

SEQ ID NO: 110493 - protein, 256 aa, Unknown
  Bacterial polypetide isolated from the Sargasso Sea
MNNEITGSEIVLKSLVEQGVEVVFGYPGGAVLPIYDTFFKQNSIKHILVRQEGGAIHAAEGYARSTGKTGVVLVTSGPGATNVVTGLTDAMMDSVPIVCITGQVPQHLIGSDAFQECDTTGITRPCTKHNYLVKDVNKLSSVFHEAFTIAQNGRPGPVVIDIPKDVQFAKGSYVEKNKIVIPSHRLFEPSPSFETKKIEDAIEIISKSKKPIFYIGGGCINSGPKASKLVREFINIVGSPATMTLMGLGVVAASDK

SEQ ID NO: 110494 - protein, 281 aa, Unknown
  Bacterial polypetide isolated from the Sargasso Sea
DSIPMVIISGQVPTAAIGQDAFQECDTVGITRPCVKHNFLVKDVRDLAATVKKAFYIARTGRPGPVLIDIPKDVSKMPCQYEPLKNVSLRSYNPVTKGHSGQIRKAVALLLSAKRPYIYTGGGIILADASRELNQFADLLGYPITNTLMGLGGYRASDKKFLGMLGMHGTYEANMAMQHCDVLIAIGARFDDRVIGDPAHFASRPRKIIHIDIDPSSISKRVKVDIPIVGDVKEVLKELIEQLQTAEHGPDTAALADWWKDIEAWRAKDCLKFDRKSDIIK

SEQ ID NO: 110495 - protein, 189 aa, Unknown
  Bacterial polypetide isolated from the Sargasso Sea
KVTKGEAFVASDVGQHQMFAALYYPFAKPRQWINSGGLGTMGFGIPAAMGAQFANPEAVVCCVTGDGSVQMNIQELSTCMQYGVPIKIISINNRALGMVKQWQKMFYGGRHSHSYMESLPDFVKLAEAYGHVGIAVSDPAELESAMEKAFAMKDRLVFMDISVDPDEHVYPMQIKFGAMDEMWLSKTER

SEQ ID NO: 110496 - protein, 218 aa, Unknown
  Bacterial polypetide isolated from the Sargasso Sea
VVDIPKDITDPSSSVPYVWPKTVSFRSYQPSQRGHKGQIKRAVKTLLQAEKPVIYAGGGVVIDNASDFLIDLARHLNFPVTNTLMGLGAFPGSDPQFLGMLGMHGTYEANMAMHEADVIFAVGARFDDRVTNDLDKFCPSAKIIQIDVDPTSISKNVKSDIPIVGTCTSVLAEMIGMIKDAKCDGNEEALEDWWLKINQWRHDHGIYTKARYEPSQGG

SEQ ID NO: 110497 - protein, 179 aa, Unknown
  Bacterial polypetide isolated from the Sargasso Sea
YYKFEEPNRWLTSGGLGTMGYGFPAAIGAQIANPDSLVVDIAGDASILMNIQEMSTAVQHRLPVKIFILNNEYMGMVRQWQELLHGGRYSESYTDSLPDFVKLAESFKAKGLRAKNVKELDDVILEMIASKETVIADIWVDKEENCFPMIQSGSAHNEMLLNKYQKQDETSAEKGKVLV

SEQ ID NO: 110498 - protein, 189 aa, Unknown
  Bacterial polypetide isolated from the Sargasso Sea
WSASNGGPLNIFGFSKSNHWMTSGGLGTMGYGLPSSIGVQIAHPKSLVIDISGEASFLMNMQELSTIVQYKLPVKVFILNNQWMGMVRQWQELIHGSRYSESYTASLPDFVKLAESFGIKGLRAEKSEDLNSVIDEMLKYEGPVLADICVEKEENCFPMIPSGSAHYEMILSKEDEKNKKISNKGLALV

SEQ ID NO: 110499 - protein, 179 aa, Unknown
  Bacterial polypetide isolated from the Sargasso Sea
VGQHQMFAAQYYHFDEPRKWINSGGLGTMGFGLPSAMGVKLAYPDEEVICITGEGSIQMCIQELSTCSQYKLPIKIFNINNLALGMVKQWQDMNYDGRHSSISYEDSLPDFVGLAESYGHVGIKITKNSELKKGIAKALSIKDRLVFVDIYVDPDEHVYPMQVANGSLKDLWLSKGEKT

SEQ ID NO: 110500 - protein, 59 aa, Unknown
  Bacterial polypetide isolated from the Sargasso Sea
MSKLYSGAEIVFKCLEDQDVKFIFGYPGGAVLPIYDELKNHSSIKHILVRHEQGAGHAA

SEQ ID NO: 110501 - protein, 251 aa, Unknown
  Bacterial polypetide isolated from the Sargasso Sea
EIVLQSLVDQGVEVVFGYPGGAVLPIYDTLFKQNSIKHVLVRQEGGAIHAAEGYARSTGKVGVVLVTSGPGATNVVTGLTDAMMDSIPIVCITGQVPQHLIGSDAFQECDTTGITRPCTKHNYLVKDPNKLSPVFHEAFTIAQDGRPGPVLIDIPKDVQFAKGNYIEKEKIIIPSHRLFEPEIFHNDNKINEVVDLISKAKKPIFYIGGGCINSGPKASALVSQFVEMTGAPATMTLMGLGVIGSSHPNSL

SEQ ID NO: 110502 - protein, 81 aa, Unknown
  Bacterial polypetide isolated from the Sargasso Sea
MQLTGAQIVCESLLQEGVDTIFGIPGGAILPLYQTLPEYSGLKHILVRHEQGAAHAADGYSRATGKPGICWATSGPGATIW

SEQ ID NO: 110503 - protein, 54 aa, Unknown
  Bacterial polypetide isolated from the Sargasso Sea
MPKLYSGAEIVFKCLEDQNVEFIFGYPGGAVLPIYDELKNHSSIKHILVRHEQG

SEQ ID NO: 110504 - protein, 135 aa, Unknown
  Bacterial polypetide isolated from the Sargasso Sea
MKKNKKISGAEAVIKSLIKENVDLVYGYPGGAIMPVYDEFFKFQNKVHHVLTRHEQGAVHAAQGYARSSGRVGVAIATSGPGATNLVTGIADAQIDSTPIVCITGQVPAHLLGSDAFPETDIIGISMPVTKWSYQ

SEQ ID NO: 110505 - protein, 300 aa, Unknown
  Bacterial polypetide isolated from the Sargasso Sea
GARFDDRITNTPEKFAPKAKVIHFDVDHSSVSKIIEADIAVFGQVKDSLKAINNYLRSRKDEINREKLSPWHQQIREWKEKHGLNHELYKNDSDEHPILPQAAVQHIYQESEGKAFVTSDVGQHQMFAAQYYHFDEPRKWINSGGLGTMGFGLPSAMGVKLAYPEEEVICITGEGSIQMCIQELSTCSQYKLPIKIFNINNLSLGMVKQWQDMNYEGRHSSISYEDSLPDFVGLAESYGHVGIKITKNSELKEGIAKAIAIKDKLVFVDIYVDPNEHVYPMLVAPNGSLKDMWLGKGEKT

SEQ ID NO: 110506 - protein, 178 aa, Unknown
  Bacterial polypetide isolated from the Sargasso Sea
YKFNKPNRWMTSGGLGTMGYGLPAAVGVQIAHPEKLVIDIAGEASVLMTMQEMSTAVQYNLPIKIFILNNQYMGMVRQWQELLHEKNYSESYSEALPDFLKMADAYGCKGIKADNPLDLDSKIQEMIDYNGPVIFDCHVDPNENCFPMIPSGKPHNQMILGPNEQEKNKIKGKGKALV

SEQ ID NO: 110507 - protein, 140 aa, Unknown
  Bacterial polypetide isolated from the Sargasso Sea
MNYEITGAEIVLKSLAEQGVEVVFGYPGGAVLPIYDTLFKQNSIKHVLVRQEGGAIHAAEGYARSTGKTGVVLVTSGPGATNVVTGLTDAMMDSVPIVCITGQVPQHLIGSDAFQECDTTGITRPCTKHNYLVKDANKLS

SEQ ID NO: 110508 - protein, 297 aa, Unknown
  Bacterial polypetide isolated from the Sargasso Sea
ASHSAEGYARSSGKVGVMFVTSGPGVTNSVTGLTDAMMDSIPIVCISGQVPTHLIGTDAFQECDAVGITRPCTKHNWLVKDINDLSRILHEAFYVASSGRPGPVLVDIPKDIQFQTGTYIGPETVKHKSYRPKLKANIDQIDDALKLIAEAEKPIFYTGGGVINSGNAAVQLLREFVRLTGFPITSTLQGLGAYPGDDSQFIGMLGMHGTYEANMAMNECDLMINIGARFDDRITGKIDDFSPNSKKIHIDIDPSSINKIVKVDVPLIGDVAHVLEDSIKLWKSKVYKIIKTPLKEW

SEQ ID NO: 110509 - protein, 70 aa, Unknown
  Bacterial polypetide isolated from the Sargasso Sea
MPKLFTGAEIVFKCLEDQKVEHIFGYPGGAVLPIYDELKNHPSIKHILVRHEQGAGHAAEGYARSSGKPG

SEQ ID NO: 110510 - protein, 181 aa, Unknown
  Bacterial polypetide isolated from the Sargasso Sea
AAQYLDFYKPNRWMTSGGLGTMGYGFPAAIGVQVAHPKKPVICVAGEASFLMNMQELSSLRQLNIPVKIFILNNEYMGMVRQWQQFFHGGRYAESYTDSLPDFISLANSFGIKGMRVMDPSKLKSSIKEMLDHDGPVLMDVCVAKMENVFPMIPAGAAHNEMKLSDKDDKETQTAEGLALL

SEQ ID NO: 110511 - protein, 113 aa, Unknown
  Bacterial polypetide isolated from the Sargasso Sea
MNNIMSGAQIVVEALLEQKVDTVFGYPGGAVLPIYDEIFKQSKIKHVLVRHEQGAIHAAEGYSRSTGKPGVALVTSGAGATNSVTGLTDALMDSIPIIVLTGQVPTFMIGNDA

SEQ ID NO: 110512 - protein, 183 aa, Unknown
  Bacterial polypetide isolated from the Sargasso Sea
WAAQHYKFNKPYRWMTSGGLGTMGYGLPAAVGVQIAHPEKLVIDIAGEASVLMTMQEMSTAVQYSLPIKIFILNNQYMGMVRQWQELLHEKNYSESYSEALPDFIKLAEAYGCKGILAEKPSELDEKIKEMVNFNGPVIFDCRVDPNENCFPMIPSGKPHNQMILGPNEKEENKITGKGKALV

SEQ ID NO: 110513 - protein, 295 aa, Unknown
  Bacterial polypetide isolated from the Sargasso Sea
GPGATNLITPLANALMDSTPLLAITGQVASTAIGNDAFQEAYTVGLSMAATKHNYLITDASEIPQVLKEAKFIATTGRPGPVLVDIPKDILNQITAWVEPSDLDLPGYKPTTEPNPKMVQQASALIKKSKKPILYVGGGIIHSKANNELFELATKFSIPVVTTLMGRGAFPDGHELCLEMPGMHGNYTATTSIQNADLLIAIGVRFDDRVTANPSFFAQNAKVIHADIDPAEIGKVRDAQVPIVGDAKSVIKGLIEALGDEKLETESWVSELKEMKTEFPLSYKQEEKGPLKVPY

SEQ ID NO: 110514 - protein, 212 aa, Unknown
  Bacterial polypetide isolated from the Sargasso Sea
LVKDVNDLAKILHLAFEVATTGRPGPVLVDIPKDIQFKKGKYKFTKNVLKKKLNGKATHKLSNKELDKFIELIKKSSKPIFYTGGGVINSGPEASKHLRELISLTGFPITSTLQGLGAYPGDDPQFLGMLGMHGTYEANNAMHDCDLMINIGARFDDRITGKVDEFSPKSKKIHVDIDPSSIGKNIKVDLAVVSDVSELLQSLIKRFKEKNK

SEQ ID NO: 110515 - protein, 169 aa, Unknown
  Bacterial polypetide isolated from the Sargasso Sea
MTSGGLGTMGYGLPAAVGVQVAHPNKLVIDIAGEASVLMTMQEMSTAVQYSLPIKIFILNNEYMGMVRQWQELLHDKNYSESYTAALPDFVKLAEAYGCVGIRAKRPEELDDKIIEMLNTDRPVIFDCMVDKQENCFPMIPSGKPHNQMLLGPKDQEEKKITGKGRTLV

SEQ ID NO: 110516 - protein, 59 aa, Unknown
  Bacterial polypetide isolated from the Sargasso Sea
MSKLYSGAEIVFKCLEDQDVNVVFGYPGGAVLPIYDELKNFPSIKHYLVRHEQGAGHAA

SEQ ID NO: 110517 - protein, 222 aa, Unknown
  Bacterial polypetide isolated from the Sargasso Sea
KSAGKQLGSDAFQEAPVTSVMGSVAKHVFLVTDENKLAATLKAAFEVATSGRPGPVVVDIPKDVQTAEISEEDYEDTNISAYSNRILAIEKSRLNEEKSSKFFTHLGNSKRPLIYFGGGVISASASKELREFVDYFNLPAVSTLMGLGAVDTRHPSSLHMLGMHGTPYANYAVQESDFLIAIGSRFDDRVAGVPEKFAPKAKVIAHFDVDPSEINKVKNAAW

SEQ ID NO: 110518 - protein, 285 aa, Unknown
  Bacterial polypetide isolated from the Sargasso Sea
SWDAWNDGTYEANMAMHEADLIIAVGARFDDRITNDPKQFALGAKKIHIDVDPASLSKIIHADVPIAGSAKECLSALISELSKEEIDTNKLEPWLQKITNWREEHGLNHSMLELVPENGKILPQQVIQSLYKETEGKAFITSDVGQHQMFAAQYYFFDKPRQWINSGGLGTMGFGLPSAMGVQFAFPKETVACVTGEGSIQMCIQELSTCFQYGLPIKIINLNNAALGMVKQWQDMQYGGRHSSSTYENSLPDFCALSESYGHVGIKVTKLSELESAMKECISME

SEQ ID NO: 110519 - protein, 92 aa, Unknown
  Bacterial polypetide isolated from the Sargasso Sea
MTLNYISGAEAVIKALVDNEVEVIFGYPGGAVLPLYDALFENKKIKHILVRHEQAAVHAAEGYARSTGKVGCVLVTSGPGANNAITGLTDAL

SEQ ID NO: 110520 - protein, 201 aa, Unknown
  Bacterial polypetide isolated from the Sargasso Sea
DRLTNSNAIISTDVGQHQMWAAQFCKSIRENQWLSSGGAGTMGYGFPAAIGAQLGKPKDIVVAVVGDGGFQMTMAELATAAIQKLPIKILIINNRYLGMVRQWQELFFENRESGVDMEGNPDFVKIGEAYGIKGFHLRRAGDVTKVLKKALGYNDGPCIIDAEVVKADNVFPMIPAGAAVSEMLIDEPPKTKKLKKPVGST

SEQ ID NO: 110521 - protein, 263 aa, Unknown
  Bacterial polypetide isolated from the Sargasso Sea
KDIKFAKVVISKPKIEKKSNGKWHNKFFQNDIDELINLISKAKKPVIYTGGGVINSGPKASETLREFVRLIGFPITSTLQGLGAFPGDDNQFIGMLGMHGTYEANNAMHDCDLLINIGARFDDRITGKIDEFSPKSKKVHIDIDPSSINKIIKVDLAIVGDVNEVLKTVIKKINKKHNGFKASNKQNTSKWWEQIQKWRTKDSLGFINSEETIKPQHAVQRLYELTKDQDTFITTEVGQHQMWAAQHYKFNKPNRWMTSGGLG

SEQ ID NO: 110522 - protein, 251 aa, Unknown
  Bacterial polypetide isolated from the Sargasso Sea
MPSAEFSTSEPLSPPDSDSIGGTVLMKALADENVEFIWGYPGGSVLYIYDELYKQDKIQHVLVRHEQAAVHAADAYARSTGNVGVCLVTSGPGVTNAVTGIATAYMDSIPMVVISGQVPTAAIGQDAFQECDTVGITRPCVKHNFLVKDVRDLAETVKKAFYIARTGRPGPVLIDIPKDISKTPCEYEPVKSVSLRSYNPVTKGHSGQIRKAVSLLLTAKRPYIYTGGGIILADASRETEQFADLLGYPVT

SEQ ID NO: 110523 - protein, 111 aa, Unknown
  Bacterial polypetide isolated from the Sargasso Sea
MNNEITGAEIVLKSLAEQGVEVVFGYPGGAVLPIYDTLFKQNSIKHVLVRQEGGAIHAAEGYARSTGKTGVVLVTSGPGATNVVTGLTDAMMDSVPIVCITGQVPQHLIWK

SEQ ID NO: 110524 - protein, 133 aa, Unknown
  Bacterial polypetide isolated from the Sargasso Sea
SDVICIAGDASVLMNIQELGTLSQYGLKVKLIIINNRWQGMVRQWQESFYDERYSSSDMSCGEPDFVKLAESFGVKGYLISDRKQLKNELQHAFDYDGPALINILVRRGENCYPMVPPGKSNAQMVGYVNCEE

SEQ ID NO: 110525 - protein, 211 aa, Unknown
  Bacterial polypetide isolated from the Sargasso Sea
KPQYALERLREIVNGDDVYVTTDVGQHQMWAAQFLHFEEPNRWMTSGGLGTMGYGVPAAMGVQVAHPNSKVICVTSEGSLMMNIQEMATISKYNLPVKIFNLNNKVLGMIRQWQELFHGNNESECDLSSGVDFIALAKAFGFTAINIVDPAEVDSGISQMLEIEGPVFLNIAVDRNENVFPMIPAGAAHNEIVLGPNQSIQNVGAENNVMA

SEQ ID NO: 110526 - protein, 68 aa, Unknown
  Bacterial polypetide isolated from the Sargasso Sea
MSKLITGAEIVFKALEDQKVEYIFGYPGGAVLPIYDEFKNHKSIKHILARHEQGAGHAAKGYARSSGK

SEQ ID NO: 110527 - protein, 166 aa, Unknown
  Bacterial polypetide isolated from the Sargasso Sea
AAQLYKFNKPKRWINSGGLGTMGFGLPSAMGVQFANPNSLVCCVTGEASIQMCIQELSTCLQYGLPIKIINLNNRYMGMVRQWQEFFYEKRYAMSYMDALPDFVKLTESYGHIGYKIEKPSDVDNAIINAIEQKDKLVFLDFITDPNENVFPMIATGAAHNKMILS

SEQ ID NO: 110528 - protein, 274 aa, Unknown
  Bacterial polypetide isolated from the Sargasso Sea
SSVFHEAFSIAANGRPGPVLIDIPKDVQFAKGSYQSSKEVKIDSHRLFESRIRANDQNIEEATKLIANAKKPIFYIGGGCINSGPKASQLVTKFVEETKAPATMTLMGLGVIGAKNKYSLGMLGMHGMYEANMAMHECDVMINIGARFDDRVTGRLDAFAPNSKKIHIDIDPSNINKTIKIDVPIIGDIESVMNQIFSSWKNNNYKSQKDNLIKWWDKIEEWKKVDCLNYNQGEGSIKPQHAIKRLYELTKDKKTFITTEVGQHQMWAAQILQI

SEQ ID NO: 110529 - protein, 313 aa, Unknown
  Bacterial polypetide isolated from the Sargasso Sea
ATNVVTALTDAYMDSVPLVCISGQVPTHLIGTDAFQECDTTGITRPCTKHNWLVKDIKDLSKTIHEAFRVATTGRPGPVLVDIPKDIQFAKISYSKPKMESKLNGKSLNHFSEKEIDKLIDLMNKSKKPIIYSGGGVINSGPEASEVLRELVQLTGFPITSTLQGLGAYPGDDNQFLGMLGMHGTYEANNAMHDCDLLINIGARFDDRITGKIDEFSPNSKKIHIDIDPSSINKIIKVDLALVGDVKDILKGVNKTLKKKNIDLKKSNKQKISKWWEQIQKWRTKNSLHFQNSDETIKPQHAVQRLYELTKDK

SEQ ID NO: 110530 - protein, 282 aa, Unknown
  Bacterial polypetide isolated from the Sargasso Sea
FKNVTQLGITRPCTKHNWLVKDVNDLAKVMDLAFEVATTGRPGPVLVDIPKDIQFKKTNFVLKSSSKKKLNGKSKPNGKTSSSDLDKVINLMKRSSKPIFYTGGGVINSGPEASKSLRELVSITGFPITSTLQGLGAYPGDDPLFLGMLGMHGTYEANNSMYSCDLMINIGARFDDRITGKVDEFSPKSKKIHIDIDPSSIGKNIKVDLAVISDVGSFLKALNKRIKEKHKDFLNSNKQNISKWWKDIDKWRQKKSLSFKNSKEVIKPQYAVQRLYELSKNQ

SEQ ID NO: 110531 - protein, 276 aa, Unknown
  Bacterial polypetide isolated from the Sargasso Sea
MTSQNTQPELLSGGAMLIRALADEGVEYVYGYPGGAVLHIYDAMFQQHQVKHVLVRHEQAATHMADAYARASGKAGVVLVTSGPGATNAVTGIATAYMDSIPMVVICGQVMSHLIGDDAFQETDMLGISRPIVKHNMSVRRPEDIPYLVKKAFYIAQSGRPGPVVLDIPKDMTIPSQKFPYEYPKEIKLRSYNPNAKGHPGQIKKALTTLLAAKKPVLYAGGGVILGQASDELTLLARKLNLPVTNTLMGLGAYPASDTQFIGMLGMHGSYEANQV

SEQ ID NO: 110532 - protein, 270 aa, Unknown
  Bacterial polypetide isolated from the Sargasso Sea
KLSSVFHEAFTIAQNGRPGPVLIDIPKDVQFASGTYEEKNKIIIPSHRLFEPSPDFEKNKIEEAVELISKAKKPIFYIGGGCINSGPKASKLVREFISMVGSPVTMTLMGLGVVGSSDKNSLGMLGMHGMYEANMAMHECDVMINIGARFDDRVTGRLDAFSPNSKKIHIDIDESNINKTINVDVPIIGDVKQVVEKMISVWKDNKYKIDTESLKLWWNKINKWKEVDCLNYNNEGKQIKPQYAVQRLYELTKNTKTFITTEVGQHQMWA

SEQ ID NO: 110533 - protein, 224 aa, Unknown
  Bacterial polypetide isolated from the Sargasso Sea
DWGSQIGQWRSRNCLAYETHPTLIKPQQVIETLYKVTKGEAFVASDVGQHQMFAALYYPFAKPRQWINSGGLGTMGFGIPAAMGAQFANPDAVVCCVTGDGSVQMNIQELSTCMQYGVPIKIISINNRALGMVKQWQKMFYGGRHSHSYMESLPDFVKLAEAYGHVGIAVSDPAELESAMEKAFAMKDRLVFMDISVDPDEHVYPMQIKFGAMDEMWLSKTERT

SEQ ID NO: 110534 - protein, 173 aa, Unknown
  Bacterial polypetide isolated from the Sargasso Sea
GGTVLMKALADENVEFIWGYPGGSVLYIYDELYKQDKIQHVLVRHEQAAVHAADAYARSTGNVGVCLVTSGPGVTNAVTGIATAYMDSIPMVVISGQVPTAAIGQDAFQECDTVGITRPCVKHNFLVKDVRDLAETVKKAFYIARTGRPGPVLIDIPKDISKTPCEYEPVKSV

SEQ ID NO: 110535 - protein, 308 aa, Unknown
  Bacterial polypetide isolated from the Sargasso Sea
GPGATNCVTGIATAHMDSIPLIVFTGQVSTSLIGNDAFQEVDAIGITRPCVKHNFLVESAADLALTIKKAFYIATSGRPGPVVVDIPKDIGVELAEYQYPDDVELRSYQPTLRGHPGQIKRAYQLIAGAKKPMIYSGGGAITDNASEELTVFARKLGFPVTNTLMGLGAFPGTDHQFVGMLGMHGTYEANMAMHNCDVLIAIGARFDDRVTGELDKFCPKAKIIHIDIDPASIAKNVEVDVPIVGSVKNVLTELNQLLERNNYPAVDREHDSWWQTIDEWRSEDCLKYDRGSSKIKPQAVIETLYEVT

SEQ ID NO: 110536 - protein, 204 aa, Unknown
  Bacterial polypetide isolated from the Sargasso Sea
MPSAEFSTSEPLSPPDSDSIGGTVLMKALADENVEFIWGYPGGSVLYIYDELYKQDKIQHVLVRHEQAAVHAADAYARSTGNVGVCLVTSGPGVTNAVTGIATAYMDSIPMVVISGQVPTAAIGQDAFQECDTVGITRPCVKHNFLVKDVRDLAETVKKAFYIARTGRPGPVLIDIPKDISKTPCEYEPVKSVSLRSYNPVTKG

SEQ ID NO: 110537 - protein, 237 aa, Unknown
  Bacterial polypetide isolated from the Sargasso Sea
GFAAEGYARASGKLGVALTMSGPGATNLVTPISDAYFDSVPVLFLTGQVTIPTYKSDRPVRQMGYQEADIVAVTKPITKAAMMARTEKELPVMLRQSVSMAMSDRQGPVLLDIPTDIQRKDVPKVEFECKPIYKSPSSLSDTDINKIFSLIKEASRPVIIAGGGIRITETTTQLIDFANRFQIPVAITMRGKDCFPNDNPLYLGFLGAYGNRYTNLAVANSDLVIALGSRLDSRQTA

SEQ ID NO: 110538 - protein, 188 aa, Unknown
  Bacterial polypetide isolated from the Sargasso Sea
GQHQMWAAQFYKFEEPNRWLTSGGLGTMGYGFPAAIGAQVGHPDALVVDIAGDASILMNIQEMSTAVQYRLPVKIFILNNEYMGMVRQWQELLHGGRYSESYTDSLPDFVKLAESYKAVGLRAKTTDELDDVITQMIETKNTVIADIWVTKEENCFPMIQSGSAHNEMLLSKDQKQDKKSAEKGKILV

SEQ ID NO: 110539 - protein, 251 aa, Unknown
  Bacterial polypetide isolated from the Sargasso Sea
GISRPIVKHSFSVESAEDIPEVVKQAFYIATSGRPGPVVIDVPKDTTSPDELFDFVYPDSAHIRSYNPPVSPEKKQIERAVEAILQAKQPVIYAGGGAINSNASSELIKINDILDFPVTNTLMGLGVYPATHKRFLGMLGMHGTYQANMAMHNADLIIAIGARFDDRITNTPKLFAPNAKIIHFDVDQSSVSKIIEANIAVFGQVKDSLQEILIELETRRNEIDENKLDDWKQQIKLWKEKHGLDHKNVFI

SEQ ID NO: 110540 - protein, 259 aa, Unknown
  Bacterial polypetide isolated from the Sargasso Sea
VVTALTDAYMDSVPLVCISGQVPTHLIGTDAFQECDTTGITRPCTKHNWLVKDIKDLSKIIHKAFEVATTGRPGPVLVDIPKDIQFQKTNYSKFKKENKSNGKIHNNFNHKDIDELVKLMSKAKKPIFYTGGGVINSGPKASELLRELVSITGFPITSTLQGLGCYPGDDNLFLGMLGMHGTYEANNAMHDCDLMINIGARFDDRITGKIDEFSPKSKKVHIDIDPSSINKNVKVDLPIVGDVQSVISAIVKTIKKNKT

SEQ ID NO: 110541 - protein, 91 aa, Unknown
  Bacterial polypetide isolated from the Sargasso Sea
MKKITGARIVIEALIQEKVEIIFGYPGGAVLPIYDELFKQDKIRHILVRHEQAAVHAAEGYARSTGKVGVVSCTSGPGATNTVTGLTDAMM

SEQ ID NO: 110542 - protein, 307 aa, Unknown
  Bacterial polypetide isolated from the Sargasso Sea
VTMPIVKHSYLVRDVKDLSRVVNEAFHLASTGRPGPVLIDLPKDVVSNEWDEDFSADLDLPGYKVQISGSTDGIEYASELLSKSKQPLLYVGAGAVISGAGKQVQNLAEKLQAPVTTTLLGKGAFSEMHPLSVGMLGMHGTAYANKAVINCDLIMAIGARWDDRITGKVSEFCPNATKIHIDIDPAEFGKIIQPDVSVNGDASEVLSKLIPLVDKLDTSAWLKKIENWKIKYPLKFPKRGGLRAQHVLSELDRLTDSNAIISTDVGQHQMWAAQFCKSIRERQWLSSGGAGTMGYGFPAAIGAQLGK

SEQ ID NO: 110543 - protein, 166 aa, Unknown
  Bacterial polypetide isolated from the Sargasso Sea
MNNEITGAEIVLKSLAEQGVEVVFGYPGGAVLPIYDTLFKQNSIKHVLVRQEGGAIHAAEGYARSTGKTGVVLVTSGPGATNVVTGLTDAMMDSVPIVCITGQVPQHLIGSDAFQECDTTGITRPCTKHNYLVKDVNKLSSVFHEAFTIAQNGRPGPVLIDIPKDV

SEQ ID NO: 110544 - protein, 54 aa, Unknown
  Bacterial polypetide isolated from the Sargasso Sea
MSKLYSGAEIVFKCLEDQNVDHIFGYPGGAVLPIYDELQNFKSIKHVLVRHEQG

SEQ ID NO: 110545 - protein, 169 aa, Unknown
  Bacterial polypetide isolated from the Sargasso Sea
MTSGGLGTMGYGLPAAVGVQIAHPKKLVIDIAGEASVLMTMQEMSTAVQYNLPIKIFILNNEYMGMVRQWQELLHDKNYSESYTAALPDFVKMAEAYGCVGIRAKTPEELDDKIIEMLNTDRPVIFDCLVDKQENCFPMIPSGKPHNQMLLGPKDQKEKKITGKGRILV

SEQ ID NO: 110546 - protein, 189 aa, Unknown
  Bacterial polypetide isolated from the Sargasso Sea
MANIKWWAAQHYKFNKPNRWMTSGGLGTMGYGLPAAVGVQIAHPDKLVIDIAGEASVLMTMQEMSTAVQYNLPIKIFVLNNQYMGMVRQWQELLHEKNYSESYSEALPDFVKLAEAYGCKGIKADNPDELDFKIEEMINHNGPVIFDCQVDPNENCFPMIPSGKPHNQMILGPNDKEEKKITGKGKTLV

SEQ ID NO: 110547 - protein, 178 aa, Unknown
  Bacterial polypetide isolated from the Sargasso Sea
GKINIVTARHEQGAGYMASGYALATGSIGVVFSGAPGPGATNLVTSIANAMADSIPLLVLSAQVDKRYLHRNILQYCNNVKLFEPFCKSSIELNSLEELPNMLATSIQIALSGKPGPVHIALPQNLQAETVTSKKIIPFQSISSGEPCELDINRLLEKLKSCERPAIIAGHGIIRDRA

SEQ ID NO: 110548 - protein, 225 aa, Unknown
  Bacterial polypetide isolated from the Sargasso Sea
KNWRDAHGLNHSLLEMGAQNGKILPQQVIQSLYKETNGEAFVTSDVGQHQMFAAQYYHFDKPRQWINSGGLGTMGFGLPSAMGVQLAYPESIVSCVTGEGSIQMCIQELSTCLQYGLPIKIINLNNAALGMVKQWQDMQYGGRHSSSTYENSLPDFVALTESYGHVGIKVSKFDELESAMKECISLKDKLVFLDVDVDPNEHVYPMLEAGNAMDHMRLSKDEKTW

SEQ ID NO: 110549 - protein, 269 aa, Unknown
  Bacterial polypetide isolated from the Sargasso Sea
NIQQQTAQPVWPTKIDLPGYRPDPKADDLELNEIIGLIEKAERPVLYVGGGIITGEASKELRAFSEATKIPVTTTIMGVGAFPEDHKLSLRWLGMHGAAYANWAVSGELRKDAKGNTRKIADGADLLLAFGVRFDDRVTGKVEKFCETGTIVHVDLDRSEHNKNRHVQLPIHSDVKYALGKLVKMVKARPIKARYTKWHKQIAEWKQRAPLGYKVTDEVMNSMHMKDHLKGKEDQVILPQHAIATLFKESKGDALITTGVGQHQMWAGQ

SEQ ID NO: 110550 - protein, 281 aa, Unknown
  Bacterial polypetide isolated from the Sargasso Sea
PFVCISGQVPTHLIGTDAFQECDTTGITRPCTKHNWLVKDVNELSKILHLAFEVATTGRPGPVLVDIPKDIQFKKGKYNFKKNSLKKKLNGKATHKISSHELDKFIEMIKDSRKPILYTGGGVINSGPEASEHLRELVSLTGFPITSTLQGLGAYPGDDPQFLGMLGMHGTFEANNAMHDCDLMINIGARFDDRITGKVDEFSPNSKKIHIDIDPSSIGKNIKVDLAIVSDVAELLKSLNKRFKEKNKNFLESNKQKTSKWWEQIAKWRNKKSLHFKNSDK

SEQ ID NO: 110551 - protein, 255 aa, Unknown
  Bacterial polypetide isolated from the Sargasso Sea
KLTGGQIVCESLIREGVDTIFGLPGGAILPLYQTLSHFPQLKHILVRHEQGAAHAADGYARVTGKPGVAWATSGPGATNLITGMMSAYMDSIPMVLITGQVGRAAIGSDAFQECDIQGISLPVTKHNYLVMEVDEIAETINEAFHIANTGRPGPVHIDIPKDIFTEITEFEYPEIPDLPGYRPNINPHPKQIKRAVQLIEHAQKPVILAGHGVLISKAQNELLELAEKAQIPVINTLMGVSNFPSNHILYGGWPG

SEQ ID NO: 110552 - protein, 297 aa, Unknown
  Bacterial polypetide isolated from the Sargasso Sea
DALFQQNKIRHILVRQEGGAVHAAEGYARSTGKVGVVLVTSGPGATNAVTGLLDAFMDSIPIICLTGQVPTHLIGNDAFQEADTTGITRPCTKHNYLVKNIEDLARIMHEAFHVARSGRPGPVVIDLPKDILMALGSYVEKNTVKRSAYKPQVKGDKTKIRDAIKLIKNAKKPIIYAGGGVINSGPLASKYLSRFVKMTGFPCTLTLMGLGAYPASDRQFVGMLGMHGTYEANLCMNECDLMIAIGARFDDRITGRLDSFSPGSKKIQIDIDPSSINKNVPVDIGIIGDISNVLKDV

SEQ ID NO: 110553 - protein, 206 aa, Unknown
  Bacterial polypetide isolated from the Sargasso Sea
MEKSFHKQVIQSLYKETEGEAFITSDVGQHQMFAAQYYFFDKPRQWINSGGLGTMGFGLPSAMGVQFAFPEETVACVTGEGSIQMCIQELSTCFQYGLPIKIINLNNAALGMVKQWQDMQYGGRHSSSTYENSLPDFCALSESYGHVGIKVTKLAELESAMKECISMKDKLVFLDVDVDPDEHVYPMLEAGNAMDFMHLSKDKKTW

SEQ ID NO: 110554 - protein, 268 aa, Unknown
  Bacterial polypetide isolated from the Sargasso Sea
QVLGATNTVTPIRDCMADSIPIVVISGQVPTTAIGTDAFQEAPVSAIMGAVSKHIFLVTDPLLLESTIRSAFELAKTGRPGPVVVDIPKDIQNWEGEFLGSGSLPLTGYRNRLETVMNNNLNEELAKNFYKLLSKSKKPLIYAGGGVINADASSQLRQFSETYKIPIVTTLMALGASDTTKSLSLHMLGMHGLASANYAVEDCDFLIAIGARFDDRVAGDPKGFAPNAKKIAHFDIDISEINKVKSVDWYHVGSLKKDLNDLIALGKK

SEQ ID NO: 110555 - protein, 173 aa, Unknown
  Bacterial polypetide isolated from the Sargasso Sea
NKPNRWMTSGGLGTMGYGLPAAVGVQVANPDKLVIDIAGEASVLMTMQEMSTAVQYNLPIKIFILNNQYMGMVRQWQELLHEKNYSESYTAALPDFVKLAEAYGCVGIQAKKPDELDEKIKEMLNVNKPVIFDCLVDPNENCFPMIPSGKPHNQMLLGPDDEEEISSEGKVLV

SEQ ID NO: 110556 - protein, 252 aa, Unknown
  Bacterial polypetide isolated from the Sargasso Sea
MTDNLTGSEIVLKSLLDQGVETVFGYPGGAVLPIYDSLFKQNSIRHILVRQEGGAIHAAEGYARSSGKTGVVLVTSGPGATNVVTGLTDAMMDSIPIVCITGQVPQHLIGSDAFQECDTTGITRPCTKHNYLVKDANELAKVFHEAFIIAKDGRPGPVLIDIPKDVQFAKGKYLKPKEITIKPHRIFNPIIKDNDKNIEEATKLIANAKKPIFYIGGGCINSGTKASEFVRQFVKETNIPSTMTLMGLGVLP

SEQ ID NO: 110557 - protein, 60 aa, Unknown
  Bacterial polypetide isolated from the Sargasso Sea
MKQTIDNKQKYTGAEIFVKCLEAEGIDLVFGYPGGAVLHIYDELHKQNDVSHILVRHEQG

SEQ ID NO: 110558 - protein, 64 aa, Unknown
  Bacterial polypetide isolated from the Sargasso Sea
MGKLISGAEIVFKVLEHHKVEHIFGYPGGAVLPIYDELKNHKTIKHILARHEQGAGHAAEGYAR

SEQ ID NO: 110559 - protein, 182 aa, Unknown
  Bacterial polypetide isolated from the Sargasso Sea
MWAAQHYKFNQPNRWMTSGGLGTMGYGLPAAIGVQIANPGKLVVDIAGEASVLMTMQEMSTAVQYKLPIKIFILNNEYMGMVRQWQELLHEKNYSESYTAALPDFVKLAESYGCVGMRAKTPDELDEKIKEMVDIDRPVIFDCLVDKAENCFPMIPSGKPHNQMILGPEEEEEISDEGKILV

SEQ ID NO: 110560 - protein, 317 aa, Unknown
  Bacterial polypetide isolated from the Sargasso Sea
CLFLRPGSTNVVTALTDAYMDSVPLVCISGQVPTHLIGTDAFQECDTTGITRPCTKHNWLVKDIKDLSKILHEAFIVATTGRPGPVLVDIPKDIQFAKTNYFKTKKEKNKKEKVHNKFSQNEIDELINLISKAKKPVIYTGGGVINSGPKASESLREFVRLIGFPITSTLQGLGAFPGDDNQFIGMLGMHGTYEANNAMHDCDLLINIGARFDDRITGKIDEFSPKSKKVHIDIDPSSINKIIKVDLAIVGDVNEVLKSAIKKISKKQNGFKVSNKQNTSKWWEQNSKWRMKNSLGFINSEKTIKTSHAVQRLYELT

SEQ ID NO: 110561 - protein, 253 aa, Unknown
  Bacterial polypetide isolated from the Sargasso Sea
ITGQVGSRAIGTDAFQETDVTGVTLPITKHNYLVSDVDDIASTIHEAMYVARSGRPGPVLVDITKDAQQLSTELEWDPSDVKLPGYAPDLRATEAEYQRAADLINRAKRPVIFAGHGVMLSGAMRQVLDLAERANIPIAMTLLGIGGVPAQHPLNMGMMGMHGEAWVNEAIQEADLLLAFGMRFDDRVTGNLKTYAPNARKIHIDIDPAEFNKNVKVDVALAGDLSMVLSDLSPLVESGDRTDWLHTIHDMKG

SEQ ID NO: 110562 - protein, 138 aa, Unknown
  Bacterial polypetide isolated from the Sargasso Sea
VIAALPNADVICIAGDASVLMNIQELGTLSQYGLKVKLIIINNRWQGMVRQWQESFYDERYSSSDMSCGEPDFVKLAESFGVKGYLISDRKQLHNDLKNALDHDGPALINILVRRGENCYPMVPPGKSNAQMVGYVNC

SEQ ID NO: 110563 - protein, 195 aa, Unknown
  Bacterial polypetide isolated from the Sargasso Sea
MNNEITGAEIVLKSLAEQGVEVVFGYPGGAVLPIYDTLFKQNSIKHVLVRQEGGAIHAAEGYARSTGKTGVVLVTSGPGATNVVTGLTDAMMDSVPVVCITGQVPQHLIGSDAFQECDTTGITRPCTKHNYLVKDVNKLSSVFHEAFTIAQNGRPGPVLIDIPKDVQFAKGNYEEKNKIVIPSQRLFEPSPDLEI

SEQ ID NO: 110564 - protein, 168 aa, Unknown
  Bacterial polypetide isolated from the Sargasso Sea
TSGGLGTMGYGLPAAIGVQIANPNKLVIDIAGEASVLMTMQEISTAVQYSLPIKIFILNNEYMGMVRQWQELLHDKNYSESYTAALPDFVKLAEAYGCVGIRAKTPEELDDKIIEMINTDRPVIFDCLVDKIENCFPMIPSGKPHNQMLLGPKDQKENKITGKGKTLV

SEQ ID NO: 110565 - protein, 313 aa, Unknown
  Bacterial polypetide isolated from the Sargasso Sea
MHNADLIIAVGARFDDRITNTPEKFAPKAKVIHFDVDHSSVSKIIEADIAVFGQVKDSLKAINNYLRSRKDEINKEKLSPWHQQIKEWKEKHGLNHELYKSDSDEHPILPQAAVQHIYQESEGKAFVTSDVGQHQMFAAQYYHFDEPRKWINSGGLGTMGFGLPSAMGVKLAYPEEEVICITGEGSIQMCIQELSTCSQYKLPIKIFNINNLALGMVKQWQDMNYDGRHSSISYEDSLPDFVGLAESYGHVGIKITKNSELKEGIAKALAIKDKLVFVDIYVDPNEHVYPMLVAPNGSLKICGWVKVKNMIQR

SEQ ID NO: 110566 - protein, 122 aa, Unknown
  Bacterial polypetide isolated from the Sargasso Sea
QHYKFNKPNRWMTSGGLGTMGYGLPAAVGVQIAHPDKLVIDIAGEASVLMTMQEMSNAVQYKLPIKIFILNNQYMGMVRQWQELLHEKNYSERYTAALPDFVKLAEAYGCVGIQATKPDELR

SEQ ID NO: 110567 - protein, 260 aa, Unknown
  Bacterial polypetide isolated from the Sargasso Sea
VFGYPGGAVLPIYDTLFKQNSIKHVLVRQEGGAIHAAEGYARSTGKVGVVLVTSGPGATNVVTGLTDAMMDSIPIVCITGQVPQHLIGSDAFQECDTTGITRPCTKHNYLVKDPNKLSPVFHEAFTIAQNGRPGPVLIDIPKDVQFANGHYTNKEKIIIPSHRLFEPEIFKNNEKINQVVDLISKAKKPIFYIGGGCINSGPKASELVTQFVEMTGAPATMTLMGLGVLGSSHANSLGMLGMHGMYEANMAMNECDVMIN

SEQ ID NO: 110568 - protein, 259 aa, Unknown
  Bacterial polypetide isolated from the Sargasso Sea
MTSQNTQPELLSGGAMLIRALADEGVEYVYGYPGGAVLHIYDAMFQQHQVKHVLVRHEQAATHMADAYARASGKAGVVLVTSGPGATNAVTGIATAYMDSIPMVVICGQVMSHLIGDDAFQETDMLGISRPIVKHNMSVRRPEDIPYLVKKAFYIAQSGRPGPVVLDIPKDMTIPSQKFPYEYPKEIKLRSYNPNAKGHPGQIKKALTTLLAAKRPVLYAGGGVILGRASDELTVLARKLNLPVTNTLMGLGAYPASDP

SEQ ID NO: 110569 - protein, 253 aa, Unknown
  Bacterial polypetide isolated from the Sargasso Sea
RFDDRITNNPSKFGLAAKKIHIDSDPSSIDKIIGDDLAIEGDAKLVMQQLIEQVKASGFDQAIYKDWWSKVEAWRKAHGLNHDMLNLKNDQNIILPQQVIQSLYQTTKGDAYVTSDVGQHQMFAAQYYKFKDPRKWINSGGLGTMGFGLPSAMGVKFAFPEADVACVTGEGSIQMCIQELSTCGQYGLPIKIINLNNRALGMVKQWQDMQYGGRYSSISYEDSLPDFVKLAESFGHVGIKVDKFSELNDAMKE

SEQ ID NO: 110570 - protein, 295 aa, Unknown
  Bacterial polypetide isolated from the Sargasso Sea
FAKAFYIAKSGRPGPVLIDITKDAQFELFEYDYKKCNGIRSYIPYPEVNDDSIDHAVKLINQAKKPLIVWGQGVILGNAEEEFKNFVEKSGIPAAWTILGLSALPTSHELNVGMVGMHGNYGPNILTNKCDLLIAVGMRFDDRVTGDPGSYASQAKVIHLEIDPAEVDKNIKVDVPVIGNCKESLQMITNKIDKRSHKKWISKFDDLMKIEFDKVIKSDLSPNKKGLTMGESIIAINEFTNGDAIIVTDVGQHQMVACRYANFIKSKSNITSGGLGTMGFALPAAMGAKMGAMKE

SEQ ID NO: 110571 - protein, 294 aa, Unknown
  Bacterial polypetide isolated from the Sargasso Sea
GRPGVAMVTSGPAATNIVTPLCDAYLDSVPMVVVTGQVPYAAIGTDAFQECDTTGITQSITKHNFLVTEAQDIPRIIKEAFHIATTGRPGPVLVDIPKDIVDPTNPRSAMTWTDGVEMDLPGYHPQTEVDVDLIAAAADLIRTAERPVLYVGGGILKARAADALRALAELTGIGVVTTLMARGSFPDSHELCLGMPGMHGNYTAVTAMQESDLLVALGARFDDRVTGKLDGFAPEAKIIHVDIDPAELGKVRRPDVAIQGDVRLAIEALCAELSDNGIGDTDRSAWRSRISGGR

SEQ ID NO: 110572 - protein, 283 aa, Unknown
  Bacterial polypetide isolated from the Sargasso Sea
QVPTHLIGTDAFQECDTTGITRPCTKHNWLVKDVNKLSSVMHKAFEVATSGRPGPVLIDIPKDIQFAKGKYIKFKKIKNGNIDIKSNGWNQDIDAALKLIKKSSKPIFYTGGGVINSGPRATELLRELVSLTGFPITSTLQGLGAYPGNDQQFLGMLGMHGTYEANNAMHDCDLMINIGARFDDRITGKIDEFSPNSKKIHIDIDPSSINKNVAVDLAIVGDVKFVLEQVVAAIKKKEPNFANSNKQNISAWWSQIETWRKKNSLSFKNSNEIIKPQFAVQRL

SEQ ID NO: 110573 - protein, 320 aa, Unknown
  Bacterial polypetide isolated from the Sargasso Sea
QVPQHLIGSDAFQECDTTGITRPCTKHNYLVKDVNKLSSVFHEAFTIAQNGRPGPVLIDIPKDVQFAKGSYIEKNKIVIPSHRLFEPSPSFETKKIEEAVEIISKSKKPIFYIGGGCINSGPKASKLVREFINLVGSPATMTLMGLGVLGSSDKNSLGMLGMHGMYEANMAMHECDVMINIGARFDDRVTGRLDAFSPNSKKIHIDIDASNINKTINVDVPIIGDVKQVIEQMIAIWKNKNYNLNKEDLSQWWNKIKKWKAVDCLNYNNDNKQIKPQYAVQRLYELTKNIKTFVTTEVGQHQMWAAQYYKFEEPNRWLTS

SEQ ID NO: 110574 - protein, 269 aa, Unknown
  Bacterial polypetide isolated from the Sargasso Sea
TNALTALTDAYMDSVPLVCISGQVPTHLIGTDAFQEADTTGITRPCTKHNWLVKDIKDLEKTIHKAFEVATTGRPGPVLVDIPKDIQFLKTSYTKYKKQKKPNGKVHNRFSQKDIDELIKLMSKASKPIFYTGGGVINSGPKASELLRELVNMTGFPITTTLQGLGSYPGEDSQFLGMLGMHGSYEANNAMHDCDLMINIGARFDDRITGKIDEFSPKSKKVHIDIDPSSINKNVKVDLPIIGDVTEVINSTIKTIKKAKPDFVKSNKQ

SEQ ID NO: 110575 - protein, 208 aa, Unknown
  Bacterial polypetide isolated from the Sargasso Sea
MPSAEFSTSEPLSPPDSDSIGGTVLMKALADENVEFIWGYPGGSVLYIYDELYKQDKIQHVLVRHEQAAVHAADAYARSTGNVGVCLVTSGPGVTNAVTGIATAYMDSIPMVVISGQVPTAAIGQDAFQECDTVGITRPCVKHNFLVKDVRDLAETVKKAFYIARTGRPGPVLIDIPKDISKTPCEYEPVKSVSLRSYNPVTKGHSGQ

SEQ ID NO: 110576 - protein, 106 aa, Unknown
  Bacterial polypetide isolated from the Sargasso Sea
MKNKKISGAEAVIHCLLNEGVDLVWGYPGGAIMPVYDEFYKFQDKLKHVLARHEQGAIHAAQGYARSSGRVGVAIATSGPGATNLVTGIADAQIDSTPVVCITGQK

SEQ ID NO: 110577 - protein, 266 aa, Unknown
  Bacterial polypetide isolated from the Sargasso Sea
RPGPVLVDITKDAQFELLEYSYKKCEKIRSYIPSPPPNINKIEEAATLINEAKKPLIVFGQGVIIAEAEKEFKKFIEKTGIPAAWTILGLSALPTEHYLNVGMVGMHGNYGPNVLTNECDLLIAMGMRFDDRVTGNLDFYAKQAKKIHFEIDPAEINKNVDVDVPILGNIKETLPLIIERVKENKHEKWLEKFNNHMDIEYDKVIKNDLFPTKDSLTMGEVLKEINAATNGDAVIVSDVGQHQMVACRYAKFNETKSNVTSGGLGT

SEQ ID NO: 110578 - protein, 136 aa, Unknown
  Bacterial polypetide isolated from the Sargasso Sea
MKKKLTGAKLVINCLIEEGVKVIFGYPGGAVLPIYDELFKQKKIRHILVRHEQAAVHAAEGYARSTGKTGVVLVTSGPGATNTVTGLTDAMMDSVPVVCISGQVPTHMIGNDAFQEADIVGITRPCTKHNYLVKEC

SEQ ID NO: 110579 - protein, 252 aa, Unknown
  Bacterial polypetide isolated from the Sargasso Sea
PKDILNQKSDWIEPGPLELPGYKPTLDPNPKMIQQAANLIKNSKKPILYVGGGIIHSKANKELFDLATKFNIPVVTTLMGRGAFPDGHELCLEMPGMHGNYTATTSIQKSDLLIAIGVRFDDRVTANPSFFAQNAKVIHADIDPAEIGKVREAQVPIVGDAKSVILGLIDALQDEELDTKNWINELNSMKTEHPLSYDQDENGPLKVPFVLEELQDLTEDGAIVVSGVGQHQMWISQHWNFTEPNTWLNSGG

SEQ ID NO: 110580 - protein, 130 aa, Unknown
  Bacterial polypetide isolated from the Sargasso Sea
MTRQMTGAKIVVQALKDQGVEVVFGYPGGAVLPIYDEIFQQNAIRHILVRHEQAAIHAAEGYARSTGKPGVALVTSGPGATNAVTGLTDALLDSIPIIVFSGQVPTFMIGNDAFQEADTVGITRPCTKHN

SEQ ID NO: 110581 - protein, 90 aa, Unknown
  Bacterial polypetide isolated from the Sargasso Sea
MKKESGGSALIRALADENVDLLFGYPGGAALHIYDAIYQQDKVQHILVRHEQAAVHAADGYARATGKVGTVLVTSGPGATNAITGIATAY

SEQ ID NO: 110582 - protein, 269 aa, Unknown
  Bacterial polypetide isolated from the Sargasso Sea
SRIIEADIAVFGQVKDSLKAINNYLRSRKDEINKEKLSPWHQQIKEWKEKHGLNHELYKNDSDEHPILPQAAVQHIYQESEGKAFVTSDVGQHQMFAAQYYHFDEPRKWINSGGLGTMGFGLPSAMGVKLAYPEEEVICITGEGSIQMCIQELSTCSQYKLPVKIFNINNLALGMVKQWQDMNYEGRHSSISYEDSLPDFVGLAESYGHVGIKITKNSELKEGIAKAIAIKDKLVFVDIYVDPNEHVYPMLVAPNGSLKDMWLGKGKKT

SEQ ID NO: 110583 - protein, 169 aa, Unknown
  Bacterial polypetide isolated from the Sargasso Sea
MTSGGLGTMGYGLPAAVGVQIAHPNKLVIDIAGEASVLMTMQEMSTAVQYSLPIKIFILNNEYMGMVRQWQELLHDKNYSESYTAALPDFVKLAEAYGCVGIRAKTPDELDDKIIEMLNTDRPVIFDCLVDKQENCFPMIPSGKPHNQMILGPEDEKDNKITGKGKALV

SEQ ID NO: 110584 - protein, 191 aa, Unknown
  Bacterial polypetide isolated from the Sargasso Sea
MKLASIKWWAAQHYKFSKPNRWMTSGGLGTMGYGLPAAVGVQIAHPDKLVIDIAGEASVLMTMQEMSTAVQYNLPIKIFVLNNQYMGMVRQWQELLHEKNYSESYSEALPDFVKLAEAYGCKGIKANNPNELDEKLSEMINHNGPVIFDCQVDPNENCFPMIPSGKPHNQMILGPNDQEENKITGKGKSLV

SEQ ID NO: 110585 - protein, 69 aa, Unknown
  Bacterial polypetide isolated from the Sargasso Sea
MKLAGNDILIQSLIEEGVEYIFGYPGGASLHIYDAIFNQKEMQHILVRHEQGATHAADGYARATGKPGV

SEQ ID NO: 110586 - protein, 284 aa, Unknown
  Bacterial polypetide isolated from the Sargasso Sea
MKASDLFVKALEAEGVEYVFGIPGEENLDLLESLRESSIKLVLTRHEQGAGFMAATYGRLTGKVGVCLSTLGPGATNLVTPAAYAQLGAMPMLMITGQKPIKTSKQGRFQVIDIVDMMRPITKFTSQIVSGDRIPSTVREAFRLAHEERPGAVHIELPEDIAAEQTSAQILTPSMARRPIAEYKAIAAAITMIEEAQSPLLLIGAGANRKLTAKMLREFVDKTCIPFVTTQMGKGVLNESDPRFAGNTALSDGDFVHRAIERADLIINVGHDVVEKHRFSCITT

SEQ ID NO: 110587 - protein, 235 aa, Unknown
  Bacterial polypetide isolated from the Sargasso Sea
TNAVTALTDAYLDSIPLVCISGQVPTHLIGTDAFQECDTTGITRPCTKHNWLVKDVKDLQKTIHKAFEVATTGRPGPVLVDIPKDVQFQKTGYSKFKKQKKLNGKVKNQFSQKDINELINLMNKASRPIFYTGGGVINSGPKASQLLRELVNTTGFPITTTLQGLGSFPGDDSQFLGMLGMHGSYEANNAMHDCDLMINIGARFDDRITGKIDEFSPNSKKVHIDIDPSSINKNV

SEQ ID NO: 110588 - protein, 199 aa, Unknown
  Bacterial polypetide isolated from the Sargasso Sea
MMSDQKMNGSEIIIKALINEGVDTVFGYPGGAVLPIYDAIFQQNQLRHVLVRQEGGAVHMAEGYARSTGNVGVVLVTSGPGATNAVTGLTDALMDSIPIVCLTGQVPTHLIGNDAFQEADTTGITRPCTKHNYLVKDMADLPRVMHEAFYVARSGRPGPVVIDLPKDILMGEGTYEDFSSVEHRTYQPRFKADKTEIDR

SEQ ID NO: 110589 - protein, 218 aa, Unknown
  Bacterial polypetide isolated from the Sargasso Sea
YGSIEKIINVDVSLNGDAKKILNQILNKIDQKNIDKASIDLWNNEILNWRETHGLNHDLLDKKFHQKQILPQQVIQSLYKSTNGKAFITSDVGQHQMFAAQYYKFDEPRKWINSGGLGTMGFGLPSAMGVKFAFPDEDVVCVTGEGSIQMCIQELSTCMQYGLPVKIINLNNRALGMVKQWQDMQYGGRYSSILYEDSLPDFVKLAESYGHVGMKVED

SEQ ID NO: 110590 - protein, 178 aa, Unknown
  Bacterial polypetide isolated from the Sargasso Sea
MTKLSGARIVIETLIQEKVKVIFGYPGGAVLPIYDELFKQKKIRHILVRHEQAAVHAAEGYARSTGKVGVVLVTSGPGATNTVTGLTDAMMDSIPVVCISGQVPTHMIGNDAFQEADIVGITRPCTKHNYLVKDISKLASCIHSAFHIAKNGRPGPVLVDIPKRYSNIQKYLQWKKVN

SEQ ID NO: 110591 - protein, 233 aa, Unknown
  Bacterial polypetide isolated from the Sargasso Sea
GPVVVDIPKDIQFAKGNYESLEDSKIKNHRVYKPQMTGDEKKIEEALHAIASAKKPIFYVGGGCINSGSSTSELLLKFIRLTGFPVTMTLMGLGAFPAGDKQSLGMLGMHGMYESNLAMHDCDVMINLGARFDDRVTGRLDAFSPNSIKIHIDIDSSSINKNVKVDIPIIGDMETVLKQMLKIWKNKNLSVNKISIDDWWKKIEKWKEIDCLKYTLSDEIIKPQYAIERLYEL

SEQ ID NO: 110592 - protein, 265 aa, Unknown
  Bacterial polypetide isolated from the Sargasso Sea
IIEADVAVFGQVKESLSAINKLLEASESQCQDLSAWHEQIQEWRSKHGLNHNLFKNKDDEHPILPQAAVQHIYQASEGKAFVTSDVGQHQMFTAQYYHFDEPRKWINSGGLGTMGFGLPSAMGAKLAFPEEEVICITGEGSIQMCIQELSTCAQYKLPIKIFNINNLALGMVKQWQDMNYDGRHSSISYEDSLPDFVKLAESFGHVGIKITKNSQLQDGIEEALSYKDKLVFVDIYVDPDEHVYPMLVAPEGSMKDMWLDKDLKT

SEQ ID NO: 110593 - protein, 63 aa, Unknown
  Bacterial polypetide isolated from the Sargasso Sea
MPKLLTGAEIVFKCLEDQKVEHIFGYPGGAVLPIYDELKNHPSIKHILVRHEQGAGHAAEGYS

SEQ ID NO: 110594 - protein, 286 aa, Unknown
  Bacterial polypetide isolated from the Sargasso Sea
TDAFQECDTTGITRPCTKHNWLVKDIKDLSKIIHEAFEVATTGRPGPVLVDIPKDIQFQKAAYTKPKKEKKLNGKHHKRFNQKDIDELIKLMSKANKPIFYTGGGVINSGPKASMLLRELVQATGFPITSTLQGLGSFPGDDNSFLGMLGMHGTYEANNAMHDCDLMINIGARFDDRITGKIDEFSPKSKKVHIDIDPSSINKNVKVDLPIVGDVQDVISSTIKTIKKTKPNFAHSNKQKISKWWETIQKWREKKSLDYVNSTETIKPQYAVQRLYELTKNKDTYI

SEQ ID NO: 110595 - protein, 228 aa, Unknown
  Bacterial polypetide isolated from the Sargasso Sea
IETWKIKYPLKFPKRGGLRAQHVLSELDRLTDSNAIISTDVGQHQMWAAQFCKSIRERQWLSSGGAGTMGYGFPAAIGAQLGKPDDLVVAVVGDGGFQMTMSELATAAINKLPIKIIIINNSYLGMVRQWQELFFDNRESGVDMEGNPNFVKIGEAFGIKGFHLRRAGDVEKVLKKALDYNDGPCIVDAQVVKADNVFPMIPAGAAVSDMLIDEPPKSQKMQKPVGST

SEQ ID NO: 110596 - protein, 56 aa, Unknown
  Bacterial polypetide isolated from the Sargasso Sea
MPKLYTGAEIVFKCLEDQKVEHIFGYPGGAVLPIYDELKNHTSIKHILVRHEQGAG

SEQ ID NO: 110597 - protein, 293 aa, Unknown
  Bacterial polypetide isolated from the Sargasso Sea
DTIHEAFQVAQEGRPGPVLIDIPRDVQLELAEFNYPEITPVSIPSISEDTRAKLPDAARLINQAERPVIIAGHGVLISKADQELLDLSSKTGIPVINTLLGLSNFPRNNDMSLGMLGMHGMYWSNMATDQADVIFGVGMRFDDRVTGNTSAFAPHARIIHIDIEPSQIGRNVPTEVGLPGDAKAVLTELLPLLDHANHSDWVSSIKKIKEEHPSLAIPKTEKLLAQHVLKDLNDIIQNNPNTNVVTGVGQHQMWAAQFLFLDKFNTFISSGGLGAMGFEIPAALGAQVAAPDS

SEQ ID NO: 110598 - protein, 101 aa, Unknown
  Bacterial polypetide isolated from the Sargasso Sea
MKNKKISGAEAVIHCLLNEGVDLVWGYPGGAIMPVYDEFYKFQDKLKHVLARHEQGAIHAAQGYARSSGRVGVAIATSGPGATNLVTGIADAQIDSTPVVC

SEQ ID NO: 110599 - protein, 178 aa, Unknown
  Bacterial polypetide isolated from the Sargasso Sea
YKFNKLNRWMTSGGLGTMGYGLPAAVGVQIAHPDKLVIDIAGEASVLMTMQEMSTAVQYNLPIKIFVLNNQYMGMVRQWQELLHEKNYSESYSEALPDFVKLAEAYGCKGIIAKNPEELDSKIKEMVDHNGPVIFDCHVDPNENCFPMIPSGKPHNQMILGPNDKKDNKITSKGKALV

SEQ ID NO: 110600 - protein, 75 aa, Unknown
  Bacterial polypetide isolated from the Sargasso Sea
MDKSNKSGAEALIHSLHLEGVDLMFGYPGGAALHIYDAIFNQNYVDHILVRHEQGAVHADDGYARATGKPGVALV

SEQ ID NO: 110601 - protein, 75 aa, Unknown
  Bacterial polypetide isolated from the Sargasso Sea
MTGAQMVLKALEDQKVDTIFGYPGGAVLPIYDELAKTKDTNHQIRHFLVRHEQGASHAAEGYARSSGKVGVMLVT

SEQ ID NO: 110602 - protein, 299 aa, Unknown
  Bacterial polypetide isolated from the Sargasso Sea
GSDAFQECDTTGITRPCTKHNYLVKDPNKLSPVFHEAFKIAKDGRPGPVLIDIPKDVQFAKGNYIEKDKVIIPSHRLFEPEIFKNDEKINEVVDLISKAKKPIFYIGGGCINSGPKASELVSKFVEMTGAPATMTLMGLGVLGSSHPNSLGMLGMHGMYEANMAMHDCDVMINIGARFDDRVTGRLDAFSPYSKKIHIDIDESNINKTIKVDVPVVGDVTSVINKIINTWKDQNLKTNQSDIKLWWNKINNWKKIDCLHFTNNTKEIKPQYAVQRLYELTKDKKTFITTEVGQHQMWAA

SEQ ID NO: 110603 - protein, 143 aa, Unknown
  Bacterial polypetide isolated from the Sargasso Sea
MTDNITGAEIVLKSLTEQGVEVVFGYPGGAVLPIYDSLFKQNSIRHILVRQEAGAIHAAEGYARSSGKIGVVLVTSGPGATNVVTGLTDSMMDSIPIVCITGQVPQHLIGSDAFQECDTTGITRPCTKHNYLVKRCKRNFLQF

SEQ ID NO: 110604 - protein, 263 aa, Unknown
  Bacterial polypetide isolated from the Sargasso Sea
IICLSGQVPTHLIGTDAFQEADTTGISRPCTKHNYLVKDADLLCGIIHESFDIASTGRPGPVLVDLPKDIQLTKIKYEQKPVKIKKNVTANLPKIDSKIINKVVDLLINAKKPIIYGGGGVINAGPKASTLLTELVDLLNIPVTLTLMGLGAVSNKNKNFLGMLGMHGTYEANLAMHNCDVMLNVGARFDDRVTGRLNAFAPKSKKIHIDIDKSSINKVVSVDYGIVGDCEDVLLALVQQVKKLHNQKNQKSNTNWWSQISEW

SEQ ID NO: 110605 - protein, 227 aa, Unknown
  Bacterial polypetide isolated from the Sargasso Sea
MSDRGTVMQLTGSEIIVKTLVDQGADTIFGYPGGAVLPIYDAIFKQNELRHILVRHEQAAVHAAEGYARSTGKVGVVLVTSGPGATNAVTGLTDALMDSVPIVCLTGQVPTHLIGNDAFQEADTVGITRPCTKHNYLVKAADDLSKTITEAFFVASTGRPGPVVVDLPKDVVNSSAEYRKIGGVVRQSYSPVVKVEQGLVDSAVTLLAEAEQPIVYSGGGVINSGIE

SEQ ID NO: 110606 - protein, 86 aa, Unknown
  Bacterial polypetide isolated from the Sargasso Sea
MTDNITGAEIVLKSLTEQGVEVVFGYPGGAVLPIYDSLFKQNSIRHILVRQEAGAIHAAEGYARSSGKIGVVLVTSGPGATNVVTG

SEQ ID NO: 110607 - protein, 270 aa, Unknown
  Bacterial polypetide isolated from the Sargasso Sea
TGAQLLCEGIIHHGGTKIFGIPGGAILPLYGTLSQYPELEHILVRHEQGASHAADGFSRASGKPGICFATSGPGATNLITGMATAMMDSSPMIAITGQVSRPGIGKDSFQEIDITGASLPVTKHNYLVMNASEIPQVVKEAFHIATTGRPGPVLIDIPRDVFLEEVEFDSSFWKEDIEILGYNPPKFAHDYQIEKAIKLIEQSKRPVILAGHGVIISHAYEELLKLAESAQIPVVTTLLGISSFPENHVLSLSFPGMHGVAWASLALDQA

SEQ ID NO: 110608 - protein, 253 aa, Unknown
  Bacterial polypetide isolated from the Sargasso Sea
MKKRILTGAEIIWECLIKEGVEVVFGYPGGAILPTYDALSKYSDSVHHVLTRHEQGATHMADGYARASGKVGVAIATSGPGAANMITGLATAMMDSSPIVCVTGQVPRPAIGSDAFQEMDISGAVIPVTKHSYLVMEIKDLAKTIKEAFAIARSGRPGPVLIDIPKDLQAEEFEFIYPEEKVTIPGENPIKSDISSVDLDSAVKMIANAKKPVILAGHGVLLSGASDEVISLSEKSSIPISWTLLGSGAVPAS

SEQ ID NO: 110609 - protein, 248 aa, Unknown
  Bacterial polypetide isolated from the Sargasso Sea
MTDAYMDSVPLVCISGQVPTHLIGTDAFQECDTTGITRPCTKHNWLVKDIKDLSKTLHEAFRVATTGRPGPVLVDIPKDIQFAKTSYSKPKVQKKLNGRSLNLFSQKEIDELINLMDKSKKPIIYSGGGVINSGPEASDVLRELVQLTGFPITSTLQGLGAYPGDDNQFLGMLGMHGTYEANNAMHDCDLLINIGARFDDRITGKIDEFSPNSKKVHIDIDPSSINKIIKVDLALVGDVKDILKGINK

SEQ ID NO: 110610 - protein, 284 aa, Unknown
  Bacterial polypetide isolated from the Sargasso Sea
FGLEAKKIHIDFDPSSIDKIINVDVALQGDAKLVLSQLCKEFENSKLENTDLKPWWGQINEWKEKHGLNHDMLNLENQKEIILPQQVIQSLYKVTKGKAFITSDVGQHQMFAAQYYKFDEPRKWINSGGLGTMGFGLPSAMGVKFAFPDADVACVTGEGSIQMCIQELSTCSQYGLPVKIINLNNRALGMVKQWQDMQYGGRYSSISYEDSLPDFVKLAESFGHVGLKVEKFSELNEAMEEAFSLKDKLVFLDVLIDPDEHVYPMLEAGGSMSEMRISKKDKTF

SEQ ID NO: 110611 - protein, 154 aa, Unknown
  Bacterial polypetide isolated from the Sargasso Sea
MPKSAPNDASEQLMPGAEVLLKALEDEGVEVVFGYPGGAVLPIYDALFKNNKIKHILVRHEQAAVHAAEGYARSTGKTGVVLVTSGPGATNAVTGLTDALMDSVPVVCLTGQVPTHLIGNDAFQEADTTGITRACTKHNYLVKEGNRLQEIVMK

SEQ ID NO: 110612 - protein, 274 aa, Unknown
  Bacterial polypetide isolated from the Sargasso Sea
APVTSVMGSVAKHVFLVTDENKLAATLKAAFEVATSGRPGPVVVDIPKDVQTAEISEEDYEDTNISAYSNRILAIEKSRLNEEKSSEFFTHLGNSKRPLIYFGGGVISASASKELREFVDYFNLPAVSTLMGLGAVDTRHPSSLHMLGMHGTPYANYAVQESDFLIAIGSRFDDRVAGVPEKFAPKAKVIAHFDVDPSEINKVKNAAWSHLGVLSLALKDLIKHAKSNDLEFNFGDWLSHTGELKSKYPLNFNRSSDLIQPEHVIECINKITKG

SEQ ID NO: 110613 - protein, 286 aa, Unknown
  Bacterial polypetide isolated from the Sargasso Sea
PARGLTEDLEKAAELISSSKKPLLYVGAGAVIAQASRQVIGLAEKLQAPVTTTLLGKGAFPETHPLSVGMLGMHGTAYANKTVVDCDLIMAIGARWDDRITGKVSEFCPDATKIHIDVDPAEFGKIIDPDVSIAGDAKLVLEDLIPLVSKLDSQSWLKQIEKWKKKYPLKFPKRGGLRAQQVLKELDTLTDSKAIISTDVGQHQMWTAQFCKTNEERKWLSSGGAGTMGYGLPSAIGAQLGCPDELVVAVVGDGGFQMTMPELATAAIHKLPIKILIINNRYLGMV

SEQ ID NO: 110614 - protein, 265 aa, Unknown
  Bacterial polypetide isolated from the Sargasso Sea
TGELGVVIATSGPGATNLITPLANALMDSTPLLAITGQVASTAIGNDAFQEAYTVGLSMAATKHNYLITDASEIPQVLKEAKFIATTGRPGPVLVDIPKDILNQVASWVEPGDLDLPGYKPTTEPNPKMVQQASSLIKKSKKPILYVGGGIIHSKANNELFELATKFNIPVVTTLMGRGAFPDGHELCLEMPGMHGNYTATTSIQNADLLIAIGVRFDDRVTANPSFFAQNAKVIHADIDPAEIGKVRDAQVPIVGDAKSVIKGD

SEQ ID NO: 110615 - protein, 153 aa, Unknown
  Bacterial polypetide isolated from the Sargasso Sea
SNITSGGLGTMGFALPAAIGAKMGRPDREVVAIIGDGGFQMTIQELGTIFQTQVPVKIVILNNEFLGMVRQWQELFFDNRYASTKMINPNFVAIAEGYHIKSKKVTQREDLDEAVAEMLASKDSYFLEVMVEKENNVFPMIPTGACVSEIRLS

SEQ ID NO: 110616 - protein, 174 aa, Unknown
  Bacterial polypetide isolated from the Sargasso Sea
KPNRWMTSGGLGTMGYGLPAAVGVQIAHPDKLVIDIAGEASVLMTMQEMSTAVQYNLPIKIFILNNQYMGMVRQWQELLHEKNYSESYSEALPDFVKLAEAYGCKGIKADNPDELDFKIKEMIDYNGPVIFDCHVDPNENCFPMIPSGKPHNQMILGPNDKEENKITGKGKSLV

SEQ ID NO: 110617 - protein, 60 aa, Unknown
  Bacterial polypetide isolated from the Sargasso Sea
MSKLYSGAEIVFKCLEDHGVEVVFGYPGGAVLPIYDELKNFPSVKHYLVRHEQGAGHAAE

SEQ ID NO: 110618 - protein, 174 aa, Unknown
  Bacterial polypetide isolated from the Sargasso Sea
MTGAEIVLQSLADQGVEVVFGYPGGAVLPIYDTLFKQNSIKHVLVRQEGGAIHAAEGYARSTGKVGVVLVTSGPGATNVVTGLTDAMMDSIPIVCITGQVPQHLIGSDAFQECDTTGITRPCTKHNYLVKDPNKLSPVFHEAFTIAQDGRPGPVLIDIPKDVQFAKGNYTNKEK

SEQ ID NO: 110619 - protein, 279 aa, Unknown
  Bacterial polypetide isolated from the Sargasso Sea
MDSVPLVCISGQVPTHLIGTDAFQECDTTGITRPCTKHNWLVKDINDLSEIMHEAFKVATTGRPGPVLVDIPKDIQFAKAKYKKPKKEKKLNGKSNNKFSQKQIDQLIDLLKNTKKPVIYSGGGVINSGPKASDALREFVELTGFPITSTLQGLGAYPGDDNQFLGMLGMHGTYEANNAMHDCDLLINIGARFDDRITGKIDEFSPNSKKVHIDIDPSSINKIIKVDLAIVGDVTKVIGKVNKTILKKKNGHSKSNKSNIAKWWEQIQKWRGKDSLNFV

SEQ ID NO: 110620 - protein, 182 aa, Unknown
  Bacterial polypetide isolated from the Sargasso Sea
MLSGAAMVIRALADEGVEYLYGYPGGAVLHIYDALFQQNKVKHVLVRHEQAATHMADAYARASGKAGVVLVTSGPGATNAVTGIATAYMDSIPMVVLTGQVMSHLIGGDAFQETDMLGISRPICKHNMSVRRPEDIPLLIKKAFHIAQSGRPGPVVLDIPKDMTMPDQKFPYHYPSDVSLRS

SEQ ID NO: 110621 - protein, 205 aa, Unknown
  Bacterial polypetide isolated from the Sargasso Sea
ILGDLIYAPAMLRRLANKLPEDSVVACDVGQHQMWVAQHMWFRRPEDHLSSAGLGTMGFGLPAAIGAQVARPDATVVTVSGDGSFMMNVQELTTIKRRKLPVKILLIDNQKLGMVKQWQQLFFEERYSETDLSDNPNFVLMASAFDIPGRTINHADQVEQALDEMLNSSGPYMLHVAIDDAFNVWPLVPPGASNSDMMDQMEKQT

SEQ ID NO: 110622 - protein, 361 aa, Unknown
  Bacterial polypetide isolated from the Sargasso Sea
MVGNRLTGGEIILRALGDQDVDVLFGYPGGVTLPLYDKIFQQNKIRHILVGHEQGGVHAAEGYARSTGKTGVVLATSGPGATNTVTGLVDAMMDSIPLVCITGQVVSSLIGNDAFQEADTTGITRAATKHNYLVRSTDDLARIIHEAFYVAKNGRPGPVLIDIPKDVILDTGEYVVPEDVSPRNYKPKTEGDEDKIKEAVDLLAGARKPIIYVGGGVINSGPEASKLVEKLVDLTGYPCTTTLMALGALPASHPNFLGMPGMHGTYEANMVMHECDVMLNIGARFDDRVTGKVDGFSPQSKKIHIDIDPSSINKNVFVDIGIIGDAHGIVKKLIEGWSEKDIEKSSDLKPWWNKIKAWREI

SEQ ID NO: 110623 - protein, 262 aa, Unknown
  Bacterial polypetide isolated from the Sargasso Sea
CTNCGSAKESLTALIEELKSRDLKTNESDISEWNQQIANWRDAHGLNHSLLEMGAQNGKILPQQVIQSLYKETNGEAFVTSDVGQHQMFAAQYYHFDKPRQWINSGGLGTMGFGLPSAMGVQLAYPDSIVSCVTGEGSIQMCIQELSTCLQYGLPIKIINLNNAALGMVKQWQDMQYGGRHSSSTYENSLPDFVALTESYGHVGIKVSKFDELESAMKECISLKDKLVFLDVDVDPNEHVYPMLEAGNAMDHMRLSKDEKTW

SEQ ID NO: 110624 - protein, 191 aa, Unknown
  Bacterial polypetide isolated from the Sargasso Sea
MKASDLFVKALEAEGVEYVFGIPGEENLDLLESFRESSIKLVLTRHEQGAGFMAATYGRLTGKVGVCLSTLGPGATNLVTPAAYAQLGAMPMLMITGQKPIKTSKQGRFQVIDIVDMMRPITKFTNQIVSGDRIPSTVREAFRLAHEERPGAVHIELPEDIAAEQTSAQILTPSMARRPIAEYKQLLLRLL

SEQ ID NO: 110625 - protein, 184 aa, Unknown
  Bacterial polypetide isolated from the Sargasso Sea
MWAAQHYKFNKPNRWMTSGGLGTMGYGLPAAVGVQVAHPNKLVIDIAGEASVLMTMQEMSTAVQYSLPIKIFILNNEYMGMVRQWQELLHDKNYSESYTAALPDFVKLAEAYGCVGIRAKRPEELDDKIIEMLNTDRPVIFDCMVDKQENCFPMIPSGKPHNQMLLGPKDQEEKKITGKGRTLV

SEQ ID NO: 110626 - protein, 293 aa, Unknown
  Bacterial polypetide isolated from the Sargasso Sea
MKTGSEIIVDVLADEGVETIFGYSGGAILPTYDEVFKYNEANPENPMPLIVPSNEQGAGFMASGYARSTGKPGVVMVTSGPGATNTVTPVRDAMADSIPMVIICGQVSRQAIGSDAFQEAPVTSVMGSVAKHVFLVTDENKLAATLKAAFEVATSGRPGPVVVDIPKDVQTAEISEEDYEDTNISAYSNRILAIEKSRLNEEKSSEFFTHLSNSKRPLIYFGGGVISASASKELREFVDYFNLPAVSTLMGLGAVDTRHPSSLHMLGMHGTPYANYAVQESDFLIAIGSRLTI

SEQ ID NO: 110627 - protein, 288 aa, Unknown
  Bacterial polypetide isolated from the Sargasso Sea
MNNEITGAEIVLKSLAEQGVEVVFGYPGGAVLPIYDTLFKQNSIKHVLVRQEGGAIHAAEGYARSTGKTGVVLVTSGPGATNVVTGLTDAMMDSVPVVCITGQVPTHLIGSDAFQECDTTGITRPCTKHNYLVKDVNKLSSVFHEAFTIAQNGRPGPVLIDIPKDVQFAKGSYEEKNKIIIPSHRLFEPSPDFEKSKIDEAVELIAKSKKPIFYIGGGCINSGPKASRLVRQFINMVGSPVTMTLMGLGVVGSSDKNSLGMLGMHGMYEANMAMHECDVMINIGARFD

SEQ ID NO: 110628 - protein, 186 aa, Unknown
  Bacterial polypetide isolated from the Sargasso Sea
HQMWAAQFYKFEEPNRWLTSGGLGTMGYGFPAAIGAQVGHPDALVVDIAGDASILMNIQEMSTAVQYRLPVKIFILNNEYMGMVRQWQELLHGGRYSESYTDSLPDFVKLAESYKAVGLRAKTTDELDDVITEMIETKNTVIADIWVTKEENCFPMIQSGSAHNEMMLSKDQKQDKKSAEKGKILV

SEQ ID NO: 110629 - protein, 120 aa, Unknown
  Bacterial polypetide isolated from the Sargasso Sea
MKKRILTGAEIIWECLIKEGVEVVFGYPGGAILPTYDALSKYSDSIHHVLTRHEQGATHMADGYARASGKVGVAIATSGPGAANMITGLATAMMDSSPIVCITGQVPRPAIGSDAFQEMD

SEQ ID NO: 110630 - protein, 56 aa, Unknown
  Bacterial polypetide isolated from the Sargasso Sea
MKLAGNDILIQSLINEDVEYIFGYPGGAALHIYDAIFKQNKMEHILVRHEQGATHA

SEQ ID NO: 110631 - protein, 179 aa, Unknown
  Bacterial polypetide isolated from the Sargasso Sea
HYKFNKPNRWMTSGGLGTMGYGLPAAVGVQIAHPDKLVIDIAGEASILMTMQEMSTAVQYNLPIKIFILNNQYMGMVRQWQELLHEKNYSESYSEALPDFVKLAEAYGCKGIKAENPNELDTKISEMVNHNGPVIFDCHVDPSENCFPMIPSGKPHNQMILGPNDKKENKITGKGKALV

SEQ ID NO: 110632 - protein, 158 aa, Unknown
  Bacterial polypetide isolated from the Sargasso Sea
SGGLGTMGFGLPSAMGVKLAYPEEEVICITGEGSIQMCIQELSTCSQYKLPIKIFNINNLALGMVKQWQDMNYDGRHSSISYEDSLPDFVGLAESYGHVGIKITKNSELKEGIAKALAIKDKLVFVDIYVDPNEHVYPMLVAPNGSLKDMWLGKGEKT

SEQ ID NO: 110633 - protein, 97 aa, Unknown
  Bacterial polypetide isolated from the Sargasso Sea
MIGATALMKALEKEGVKEVFGLPGGANLPMYDELGKSNIRHILVRHEQSAAHMADGFGRVSRKPGVCFATSGPGATNLLTGIATAQADSAPMVAVTG

SEQ ID NO: 110634 - protein, 174 aa, Unknown
  Bacterial polypetide isolated from the Sargasso Sea
FAAQYYHFDEPRKWINSGGLGTMGFGLPSAMGVKLAYPDEEVICITGEGSIQMCIQELSTCAQYKLPIKIFNINNLALGMVKQWQDMNYDGRHSSISYEDSLPDFKELVESYGHVGIKITKNSDLKKGIEEAFSIKDKLVFVDIYVDPNEHVYPMLVAPNGSLKDMWLAKGSKT

SEQ ID NO: 110635 - protein, 231 aa, Unknown
  Bacterial polypetide isolated from the Sargasso Sea
MKLSGSEIIIECLKKEGVEFIFGYPGGAVLHIYDALFNAKKIKHVLARHEQGATHAADGYARACGKPGVVLVTSGPGITNCVTGLATAHMDSIPMIIISGQVSRQYVGSDAFQEADATGITRPVTKHNFLVDSRESIADVFKKAFTIATTGRPGPVLIDIPKDLTDPSVKIEFTYPKKVKIRSYKPIPRESEDKISTAAKLLCSAKKPMIYTGGGIILGNAYKELNKLVRV

SEQ ID NO: 110636 - protein, 150 aa, Unknown
  Bacterial polypetide isolated from the Sargasso Sea
MGFGLPAAIGVKAALPNSDVICIAGDASVLMNIQELGTLSQYGLNVKLVIINNRWQGMVRQWQESFYDERYSSSDMSCGEPDFVKLAESFGVKGYLISDRKQLQNELQHAFDHDGPALINILVRRGENCYPMVPPGKSNAQMVGYVNCEE

SEQ ID NO: 110637 - protein, 177 aa, Unknown
  Bacterial polypetide isolated from the Sargasso Sea
YKFNQPNRWMTSGGLGTMGYGLPAAVGVQIAHPDKLVVDIAGEASVLMTMQEMSTAVQYKLPIKIFILNNQYMGMVRQWQELLHEKNYSESYTAALPDFVKLAEAYGCVGIQATKPDELDEKINEMINTKEPVIFDCRVDPNENCYPMIPSGKPHNQMLLGPEDDKEEVTDEGKTLV

SEQ ID NO: 110638 - protein, 165 aa, Unknown
  Bacterial polypetide isolated from the Sargasso Sea
SGGLGTMGFGLPSAMGVQLAHPEAAVACVTGEASIIMCIQELSTCKQYDLPIKIINLNNRYMGMVRQWQEFFYDRRYSHSYMDSLPDFVELASSFGHTGLRIEKPSDVEGALREAFAKKDQLFFLDFVTDQTENVYPMIAAGAGHNEMVLKPLPDGSAPAERELA

SEQ ID NO: 110639 - protein, 375 aa, Unknown
  Bacterial polypetide isolated from the Sargasso Sea
MKASDLFVKALEAEGVEYVFGIPGEENLDLLESLRASSIKLVLTRHEQGAGFMAATYGRLTGKVGVCLSTLGPGATNLVTPAAYAQLGAMPMLMITGQKPIKTSKQGRFQVIDIVDMMRPITKFTNQIVSGDRIPSTVREAFRLAHEERPGAVHIELPEDIAAEETSEQILSPSMTRRPIAEYKAIAAAISMIEEAQSPLLLIGAGANRKLTAKMLREFVDKTCIPFVTTQMGKGVLNESDPRFAGNTALSDGDFVHRAIERADLIINVGHDVVEKPPFFMHHNDKKVIHVNFDSAAVDPVYFPHLEVVGDIANSIWQIKEGITPQDDWKLDFYKDVHQAYVEHRAEAEDDNRFPILPERLVRDIRKVMPDNGIV

SEQ ID NO: 110640 - protein, 307 aa, Unknown
  Bacterial polypetide isolated from the Sargasso Sea
MNAKRPIVFGGGGIVISEATKVLQKFANRLKIPVTLTLMGLGGYPPDDPMRVSWIGMHGSYFANMAVHHSDLVICIGARFDDRSTGGVFDKFAPNAKVIHIDIDPSTLNKNIKVHCPIVGDAKSVITQLDESIPLEFKPDSKTRKDWFNQIKEWELHHPTVASQNGKHIKTSFAIDTISKITKGKAVVVTDVGQHQMWVAQYYQFENPRNQITSGGLGTMGFGFPAAIGAKLGRPNDMVLAICGDGSFQMNMQEFSTAVENNLDLKIILINNGHHGMVRQWQTLFFNKNYSCCKFDLNPELCKDCPI

SEQ ID NO: 110641 - protein, 98 aa, Unknown
  Bacterial polypetide isolated from the Sargasso Sea
MKLSGSEIIIECLKKEGVEFIFGYPGGAVLHIYDALFNAKKIKHVLARHEQGATHAADGYARACGKPGVVLVTSGPGITNCVTGLATAHMDSIPMIII

SEQ ID NO: 110642 - protein, 272 aa, Unknown
  Bacterial polypetide isolated from the Sargasso Sea
FRNIRPALKTLNKLISQEKHLPDFSEWRADIEVQRKEFPFPIPEQVGDVIAPQAAIELLCKMTEGKAIISTGVGQHQMWAAQHYKFDEPRNWLTSGGLGSMGFGLPAAIGAQAARPDELVVDIDGDGSFVMNVQELATLHAENLPVKCFVLNNQYLGMVVQWEDRFYKANRGHTYLGSPDDDFQVSKEEAHIFPDFVTIANGFRIPAERVMRMSDLEGAIKRMIEADGPYLLDVMVPHVEHVLPMVPGGGTFKDTITTGDGRNPEEKDMKTL

SEQ ID NO: 110643 - protein, 250 aa, Unknown
  Bacterial polypetide isolated from the Sargasso Sea
AINNYLRSRKDEINREKLSPWHQQIREWKEKHGLNHELYKNDSDEHPILPQAAVQHIYQESGGKAFVTSDVGQHQMFAAQYYHFDEPRKWINSGGLGTMGFGLPSAMGVKLAYPEEEVICITGEGSIQMCIQELSTCSQYKLPIKIFSINNLALGMVKQWQDMNYDGRHSSISYEDSLPDFVGLAESYGHVGIKITKNSELKEGIAKALAIKDQLVFVDIYVDPNEHVYPMLVAPNGSLKDMWLGKGEKT

SEQ ID NO: 110644 - protein, 450 aa, Unknown
  Bacterial polypetide isolated from the Sargasso Sea
QSAAHMADGFGRVSRKPGVCFATSGPGATNLLTGIATAQADSAPMVAVTGQVPVAMIGKDAFQESDIIGMANPALKYSYQPRTPEEIPTMVKQGFYIAETGRPGPVLLDIPKDVQQNEANIPFPDEVRVPGYHPWTDPDMQNTGRAVELLLSAQKPIILAGGGVIISSAFAELQSIAELLMIPVVTTFKGKGAFPEDHPLSLGPIGMHGHAEANKLMTEADCVLAIGTRFSDRSVGTFEEFEKNLKIIHMDVDPAEIGKNQTTSVAVVGDVRTSLRIFGKLLMDKAVRPSDDNPWLKHVKETKQYWRENLKLHPGEMGAAKILRKLRELLPKESIVTTEVGQHQMWASLFFDAIHPGTFFSSTGLGTMGWGFPAAIGAKTARPDVPVVDIAGDGSFNMTEHSLATAVLEDLPVIVFLINNYSLGMVAQWQRTFYDRRMVGVDLKKCPDYV

SEQ ID NO: 110645 - protein, 179 aa, Unknown
  Bacterial polypetide isolated from the Sargasso Sea
MEMLSGAEMVVRSLIDQGVKQVFGYPGGAVLDIYDALHTVGGIDHVLVRHEQAAVHMADGLARATGEVGVVLVTSGPGATNAITGIATAYMDSIPLVILSGQVATSLIGYDAFQECDMVGISRPVVKHSFLVKQTEDIPQVLKKAFWLAASGRPGPVVVDLPKDILNPAKNCLIAGRTR

SEQ ID NO: 110646 - protein, 324 aa, Unknown
  Bacterial polypetide isolated from the Sargasso Sea
NKLSSVFHEAFSIAANGRPGPVLIDIPKDVQFAKGNYQSSKEVKIDSHRLFEPKIKANDRNIEEATKLIANAKKPIFYIGGGCINSGPKASKLVTKFVEETKAPATMTLMGLGVIGAKNKYSLGMLGMHGMYEANMAMHECDVMINIGARFDDRVTGRLDAFAPNSKKIHIDIDPSNINKTIKIDVPIIGDIESVMNQIFSSWKNNNYKSQKEDLIKWWNKIEEWKKVDCLNYNQGEGSIKPQHAIKRLYELTKDKKTFITTEVGQHQMWAAQYYKFEEPNRWLTSGGLGTMGYGFPAAIGAQIANPDSLVVDIAGDASILMNI

SEQ ID NO: 110647 - protein, 215 aa, Unknown
  Bacterial polypetide isolated from the Sargasso Sea
MSKLYTGAEIVFKCLEDQDVEYIFGYPGGAVLPIYDELKNHSTIKHILVRHEQGAGHAAEGYARSSGKPGVVLVTSGPGATNVVTALTDAYMDSIPLVCISGQVPTHLIGTDAFQECDTTGITRPCTKHNWLVKDIKDLSKVMHEAFKVATTGRPGPVLIDIPKDIQFAKTNYTKFKKEKKLNGKIHNKFSEKEIDQLIDLISKAKKPVFIPEVE

SEQ ID NO: 110648 - protein, 292 aa, Unknown
  Bacterial polypetide isolated from the Sargasso Sea
VVISGQVQSHLIGTDAFQETDMIGVSRPIVKHSFTVDKQENIAQIVKEAFHIATSGRQGPVVIDVPKDLTNPDELFDFNYPEKANIRSYNPPVKPENHQVSRAVDAILTAERPVIYAGGGTISSNASDELRELNELLDFPVTNTLMGLGVYPGTGKRFLGMLGMHGTYQANMAMHNADLIIAVGARFDDRITNTPEKFAPKAKVIHFDVDHSSVSKIIEADIAVFGQVKDSLKAINNYLRSRKDEINREKLSPWHQQIREWKEKHGLNHELYKNDSDSIQFYLRQPCNIYIK

SEQ ID NO: 110649 - protein, 283 aa, Unknown
  Bacterial polypetide isolated from the Sargasso Sea
MKIAGNDILIQSLINEGVEYIFGYPGGAALHIYDAIFNQKEMQHILVRHEQGATHAADGYARATGKPGVVLVTSGPGATNAITGIATAFMDSIPMVVISGQVQSHLIGTDAFQETDMIGVSRPIVKHSFTVDKQENIAQIVKEAFHIATSGRQGPVVIDVPKDLTNPDELFDFNYPEKANIRSYNPPVKPENHQVSRAVDAILTAERPVIYAGGGTISSNASDELRELNELLDFPVTNTLMGLGVYPGTGKRFLGMLGMHGTYQANMAMHNADLIIAVGARFD

SEQ ID NO: 110650 - protein, 331 aa, Unknown
  Bacterial polypetide isolated from the Sargasso Sea
TLPIVKHSWVIRDPSDIAKVVSEAFFIASSGRPGPVLIDIPKDVGQEFFNYQRVLPGEIIPKGFKRNGEINDCDINKAIKLIEDSERPLLYVGGGAISSGAHDEIKTLAKNYQIPVTTTLMGKGAFDEKDNLSVGMLGMHGTAYANFAVTECDLLIAIGARFDDRVTGKLDTFAPNAKVIHIDIDPAEVNKNRRVDVAIVSDVSKAVLKINEQSLKNKFTCQTKNWLEKIDFWKNKHPLYDPPKEGEIYPQEVLLKVRELSPEAYVTTDVGQHQMWAAQYLRNSPRKWISSAGLGTMGFGLPAAIGVKAALPNSDVICIAGDASVLMNIQE

SEQ ID NO: 110651 - protein, 196 aa, Unknown
  Bacterial polypetide isolated from the Sargasso Sea
DTYVTTEVGQHQMWAAQHYKFNKPNRWMTSGGLGTMGYGLPAAVGVQIAHPEKLVVDIAGEASVLMTMQEMSTAVQYNLPIKIFILNNQYMGMVRQWQELLHEKNYSESYSEALPDFLKMAEAYGCKGIKAENPSELDEKIQEMIDYKGPVIFDCHVDPNENCFPMIPSGKPHNQMILGPNEQEENKIKGKGKALV

SEQ ID NO: 110652 - protein, 354 aa, Unknown
  Bacterial polypetide isolated from the Sargasso Sea
QAATHAADGYARATGKPGVVLVTSGPGATNAITGIATAYMDSIPLVVISGQVQSHLIGEDAFQETDMIGVSRPIVKHSFLVQKPEDIPSTIKKAFFIASTGRPGPVVVDIPKDLTHPEHKFEYEYPETVSMRSYQPSSKGHSGQIRKAARMLLSARRPVIYAGGGVIQGEGSAQMTALARRLNYPVTNTLMGLGAYPGSDRQFLGMLGMHGFYEANMAMHHSDVILAVGARFDDRVTNTVSKFCPGAKIIHVDIDPASIAKIVPVDIPIVGPVDTILEELDKQVALQMKSAERALPDPEALAQWWQQIDSWREAHGLWHGRRYGESASIMPQDAICALYEATNGEAYVTSDVGQ

SEQ ID NO: 110653 - protein, 334 aa, Unknown
  Bacterial polypetide isolated from the Sargasso Sea
RHEQGATHMADGYAKATGKPGVVLVTSGPGATNTVTGILTAQMDSVPLVILTGQTITPNLGKDAFQEADVFGVTMPIVKHSYLVRDVKDLSRVVNEAFHLASTGRPGPVLVDLPKDVVSNEWDEDFSADLDLPGYKVQTRGSTDGIEYAAELLTKSKQPLLYVGAGAVISGAGRQVKNLAEKLQAPVTTTLLGKGAFSEMHPLSVGMLGMHGTAYANKAVINCDLIMAIGARWDDRITGKVSEFCPNATKIHIDIDPAEFGKIIQPDVSVNGDAADVLAELIPLVDKLDTSAWLKKIENWKIKYPLKFPKRGGLRAQHVLAELDRLTGSNAIIS

SEQ ID NO: 110654 - protein, 148 aa, Unknown
  Bacterial polypetide isolated from the Sargasso Sea
MPKLFTGAEIVFKALEDQKVEYIFGYPGGAVLPIYDELKNHKSIKHILARHEQGAGHAAEGYARSSGKPGILLVTSGPGATNAVTALTDAYMDSIPLVCISGQVPTHLIGTDAFQECDTTGITRPCTKHNWLVKDVNDLARVLHLAFE

SEQ ID NO: 110655 - protein, 365 aa, Unknown
  Bacterial polypetide isolated from the Sargasso Sea
AEGYARSSGKPGVVLVTSGPGATNVVTALTDAYMDSVPLVCISGQVPTHLIGTDAFQECDTTGITRPCTKHNWLVKDIKDLSKIIHEAFKVATTGRPGPVLVDIPKDIQFAKATYSKPKIEKKLNGKSKNYYSQKDIDNLIHLINKSKKPIIYSGGGVINSGPEASEALREFVQSTGFPITSTLQGLGAYPGDDNQFLGMLGMHGTYEANNAMHDCDLLINIGARFDDRITGKIDEFSPKSKKVHIDIDPSSINKIIKVDLALVGDVKEVLKSINKTFKKKNHDFKKSNKQNISNWWEQIQKWRTKNSLHFKNSDETIKPQHAVQRLYELTKNNDVFITTEVGQHQMWAAQHYKFNKPNRWMTSG

SEQ ID NO: 110656 - protein, 213 aa, Unknown
  Bacterial polypetide isolated from the Sargasso Sea
KIIKPQHAVQRLYELTKDQDTFITTEVGQHQMWAAQHYKFNKPNRWMTSGGLGTMGYGLPAAIGVQIANPGKLVVDIAGEASVLMTMQEMSTAVQYRLPIKIFILNNEYMGMVRQWQELLHEKNYSESYTAALPDFVKLAESYGCVGIRAKTPDELDEKIKEMISVQKPVIFDCVVDKSENCFPMIPSGKPHNQMLLGPEEDEEISDEGKILV

SEQ ID NO: 110657 - protein, 109 aa, Unknown
  Bacterial polypetide isolated from the Sargasso Sea
MKKESGGSALIRALADENVDLLFGYPGGAALHIYDAIYQQDKVQHILVRHEQAAVHAADGYARATGKVGTVLVTSGPGATNAITGIATAYMDSIPLVVISGQVASHLIR

SEQ ID NO: 110658 - protein, 224 aa, Unknown
  Bacterial polypetide isolated from the Sargasso Sea
DWKSQHGLNHEMHLCETDDKPIMPQAVVQHLYNITNGKAFITSDVGQHQMFAAQYYHFDEPRKWINSGGLGTMGFGLPAAMGAKLAYPNDEVICITGEGSIQMCIQELSTCTQYNLPIKIININNEALGMVKQWQDMNYGGRHSASTYQSSLPNFVELAESYGHVGIKIVKNSELKSGLEKALSMKDRLVFVDVYVDPNEHVYPMLVAPNGSLKDMWLDKETKT

SEQ ID NO: 110659 - protein, 283 aa, Unknown
  Bacterial polypetide isolated from the Sargasso Sea
VKKFCPNATIVHVDVDPTSISKTIKAHIPVVGCLDTVLKQLQDGIDKSTIQIDRSAQEDWWRQIISWREQKCLGYKQSPSEKIKPQAVIEALYKATDGEAYISSDVGQHQMFAAQYYPFKYPRQWINSGGLGTMGFGLPAAMGVKLAFPDKESVCVTGDGSIQMNIQELSTCLQYNLAVKVVSLNNRSLGMVRQWQDMVYGGRHSSSYMDSLPDFIKLVESYGHVGIQVNTLDELQPAIDKAMSITDRLVFLDILVDEKEHVYPMQIKLGGIDEMWLRKGVKA

SEQ ID NO: 110660 - protein, 302 aa, Unknown
  Bacterial polypetide isolated from the Sargasso Sea
DIDPSSINKNVKVDIPIVGDVKTVIASTLKSLEKKKPNFLKSNKQHVSKWWEKIEKWRSKKSLDYIGSEETIKPQYAIERLYELTKDKDTYITTEVGQHQMWAAQHYKFNKPNRWMTSGGLGTMGYGLPAAVGVQIAHPKKLVIDIAGEASVLMTMQEMSTAVQYSLPIKIFILNNEYMGMVRQWQELLHDKNYSESYTAALPDFVKLAEAYGCVGIRAKTPEELDDKIIEMLNTDRPVIFDCMVDKQENCFPMIPSGKPHNQMLLGPKDQEEKKITGKRKNFSLMATFKSAYSSAGKKQNL

SEQ ID NO: 110661 - protein, 323 aa, Unknown
  Bacterial polypetide isolated from the Sargasso Sea
GEINGCDINKAIKLIEDSERPLLYVGGGAISSGAHDEIKTLAKNYQIPVTTTLMGKGAFDEKDNLSVGMLGMHGTAYANFAVTECDLLIAIGARFDDRVTGKLDTFAPNAKVIHIDIDPAEVNKNRRVDVAIVADVSKAVLKINEQSLKNKFTCQTKNWLEKIDFWKHKHPLYDPPKEGEIYPQEVLLKVRELSPEAYITTDVGQHQMWAAQYLRNSPRKWISSAGLGTMGFGLPAAIGVKAALPNSDVICIAGDASVLMNIQELGTLSQYGLKVKLIIINNRWQGMVRQWQESFYDERYSSSDMSCGEPDFVKLAESFGVKG

SEQ ID NO: 110662 - protein, 322 aa, Unknown
  Bacterial polypetide isolated from the Sargasso Sea
FYTGGGVINSGPKASDFLRELVHSTGFPITSTLQGLGSYPADDNQFLGMLGMHGTYEANNAMYECDLMINIGARFDDRITGKIDEFSPKSKKVHIDIDPSSINKNVKVDLAIVGDVKTVVASTIKTLNKKKPNFVKSNKQKTSKWWEKIQKWRSKRSLDYIGSEETIKPQYAIERLYELTKDKDTYITTEVGQHQMWAAQHYKFNKPNRWMTSGGLGTMGYGLPAAVGVQVAHPKKLVIDIAGEASVLMTMQEMSTAVQYGLPIKIFILNNEYMGMVRQWQELLHEKNYSESYTAALPDFVKLAEAYGCVGLRAKTPEEIRR

SEQ ID NO: 110663 - protein, 221 aa, Unknown
  Bacterial polypetide isolated from the Sargasso Sea
WNREFKILEKQELNQVIYKSIRPKSGKIKMAEVINLLSKKADKKTIVTTDVGQHQMVTSRYYKYENTRSNITSGGLGTMGFALPAAIGAKLGAKNKTVIAIIGDGGFQMNIQELGTIMQSNIDIKIIILNNNFLGMVRQWQEMFFNKRYSFTDIQNPNFIKIAEGYGIKGNKIEKRSLLDSGINQLLKSKGSFILEVICEKEENVFPMVKTGSSVSEIILK

SEQ ID NO: 110664 - protein, 207 aa, Unknown
  Bacterial polypetide isolated from the Sargasso Sea
YAIQRLYELTKDKDTYVTTEVGQHQMWAAQHYKFDKPNRWMTSGGLGTMGYGLPAAIGVQIANPGKLVVDIAGEASVLMTMQEMSTAVQYRLPIKIFILNNEYMGMVRQWQELLHEKNYSESYTAALPDFVKLAESYGCVGIRAKTPSELDDKIKEMIDVDKPVIFDCLVDKTENCFPMIPSGKPHNQMILGPEEEEEISDEGKILV

SEQ ID NO: 110665 - protein, 292 aa, Unknown
  Bacterial polypetide isolated from the Sargasso Sea
AFSLNSKKIHIDIDESNINKTINVDVPIIGDVKQVVEKMISIWKDKKYKIDTDSLKLWWDKINKWKEVDCLNYNNEGKQIKPQYAVQRLYELTKNTKTFVTTEVGQHQMWAAQFYKFEEPNRWLTSGGLGTMGYGFPAAIGAQIGHPDALVVDIAGDASILMNIQEMSTAVQYRLPVKIFILNNEYMGMVRQWQELLHGGRYSESYTDSLPDFVKLAESYKAVGLRAKTTDELDDVITQMIETKNTVIADIWVTKEENCFPMIQSGSAHNEMMLSKDQKQDKRSAEKGKILV

SEQ ID NO: 110666 - protein, 176 aa, Unknown
  Bacterial polypetide isolated from the Sargasso Sea
MPKLYSGAEIVFKCLEDQNVSHIFGYPGGAVLPIYDELKNFNSIKHILVRHEQGAGHAAEGYARSTGKPGVLLVTSGPGATNAVTALTDAYMDSVPLVCITGQVPTHLIGTDAFQECDTTGITRPCTKHNWLVKDVNDLAEIMHKAFEVATTGRPGPVLVDIPKDIQFQKAKYKNY

SEQ ID NO: 110667 - protein, 138 aa, Unknown
  Bacterial polypetide isolated from the Sargasso Sea
MPKLYSGAEIVFKCLKDQGVSNIFGYPGGAVLPIYDELKNFNSIKHILVRHEQGAGHAAEGYARSSGKPGVLLVTSGPGATNAVTALTDAYMDSIPLVCISGQVPTHLIGTDAFQECDTTGITRPCTKHNWLVKDIKD

SEQ ID NO: 110668 - protein, 112 aa, Unknown
  Bacterial polypetide isolated from the Sargasso Sea
MSKLFTGAEIVFKCLEDQKVEYIFGYPGGAVLPIYDELKNHSSIKHILVRHEQGAGHAAEGYARSSGKPGVVLVTSGPGATNVVTALTDAYMDSVPLVCISGQVPTHLIGND

SEQ ID NO: 110669 - protein, 303 aa, Unknown
  Bacterial polypetide isolated from the Sargasso Sea
YEANMAMHDCDLLINVGARFDDRITGKVDEFSPNSKKIHIDIDPSSINKTIDVDVALVGDVAHVLEDAIKLWKSNVYKTDKPAVKSWWSMIDKWKEKDSLSFNDSKTTIKPQFAIQRLYELTKEKDTYVTTEVGQHQMWAAQFYKFNKPNRWITSGGLGTMGFGLPAAIGAQVAHPDKLVIDIAGEASILMCIQEMSTAIQHKLPVKIFIINNQYMGMVRQWQELLHDKRYSHSYTDALPDFVKLAEAYGAKGIRVQKPSELDKGIQEMIDYDGPVIFDCVVDENENVYPMIPSGKAHNEMLL

SEQ ID NO: 110670 - protein, 244 aa, Unknown
  Bacterial polypetide isolated from the Sargasso Sea
KSNKQKISKWWEKIEKWRSIKSFNFVNSTETIKPQYAVQKLYELTKNKDTYITTEVGQHQMWAAQHYKFDKPNRWMTSGGLGTMGYGLPAAVGVQVAHPEKLVIDIAGEASVLMTMQEMSTAVQYNLPIKIFILNNEYMGMVRQWQELLHDKNYSESYTAALPDFVKLAEAYGCVGIRATKPDELDDKILEMININKPVIFDCLVDKEENCFPMIPSGKPHNQMLLGPKDQKENKIKGKGKTLV

SEQ ID NO: 110671 - protein, 210 aa, Unknown
  Bacterial polypetide isolated from the Sargasso Sea
KPQHAVKRLYELSKHKDAYITTEVGQHQMWAAQHYKFNKPNRWMTSGGLGTMGYGLPAAVGVQVANPDKLVIDIAGEASVLMTMQEMSTAVQYNLPIKIFILNNQYMGMVRQWQELLHEKNYSESYTAALPDFVKLAEAYGCIGIQAKKPDELDEKINEMLNVNKPVIFDCVVDPNENCFPMIPSGKPHNQMLLGPEDEEEISSEGKVLV

SEQ ID NO: 110672 - protein, 133 aa, Unknown
  Bacterial polypetide isolated from the Sargasso Sea
MTSQMTGAKMVVKALKDQGVDTVFGYPGGAVLPIYDEIFQQNEIRHILVRHEQGAVHAAEGYARSTGKPGVVLVTSGPGATNAVTGLTDALMDSIPLVVLTGQVPTFMIGSDAFQEADTVGITRPCTKHNLGC

SEQ ID NO: 110673 - protein, 305 aa, Unknown
  Bacterial polypetide isolated from the Sargasso Sea
SFLVQSLEELPRIMAEAFAVANSGRPGPVLVDIPKDIQLASGTLEPYFTTVKNVEVFPHADVEQARKMLAQAQKPILYVGGGVGMAQAVPALREFIAVTQMPVACTLKGLGAVEADYPYYLGMLGMHGTKAANFAVQECDLLIAVGARFDDRVTGKLNTFAPNASVIHMDIDPAEMNKLRQAHVALQGDLNSLLPALQQSLKIDAWRQHSAELRTEHTWRYDHPGEAIYAPLLLKQLSDRKPADSVVTTDVGQHQMWSAQHMTYTRPENFITSSGLGTMGFGLPAAVGAQVARPNDTVICISGDG

SEQ ID NO: 110674 - protein, 169 aa, Unknown
  Bacterial polypetide isolated from the Sargasso Sea
MPKLYSGAEIVFKCLEDQGVSHIFGYPGGAVLPIYDELKNFNFIKHILVRHEQGAGHAAEGYARSTGKPGVLLVTSGPGATNAVTALTDAYMDSVPLVCITGQVPTHLIGTDAFQECDTTGITRPCTKHNWLVKDINDLSEIMHKAFEVATTGRPGPVLVDIPKDIQFQ

SEQ ID NO: 110675 - protein, 317 aa, Unknown
  Bacterial polypetide isolated from the Sargasso Sea
LNILLVRHEQGACHAAEGYARSSGKPGVVLVTSGPGATNVVTALTDAYMDSVPLVCISGQVPTHLIGTDAFQECDTTGITRPCTKHNWLVKDVKDLSKIIHEAFRVATTGRPGPVLVDIPKDIQFAKVSYSKPKKEKKSNVKLHNKFSQNDIDELINLISNAKKPVIYTGGGVINSGPKASETLREFVRLIGFPITSTLQGLGAFPGDDSQFIGMLGMHGTYEANNAMHDCDLLINIGARFDDRITGKIDEFSPKSKKVHIDIDPSSINKIIKVDLAIVGDVNEVLKTVIKKINKKHNGFKTSNKQNTSKWWEQIQK

SEQ ID NO: 110676 - protein, 144 aa, Unknown
  Bacterial polypetide isolated from the Sargasso Sea
MPKLLTGAEIVFKCLEDQKVNHIFGYPGGAVLPIYDELKNHPSIKHILVRHEQGAGHAAEGYARSSGKPGVVLVTSGPGATNVVTALTDAYMDSVPMVCISGQVPTHLIGTDAFQECDTTGITRPCTKHNWLVKDINELSECYA

SEQ ID NO: 110677 - protein, 319 aa, Unknown
  Bacterial polypetide isolated from the Sargasso Sea
CTSGRPGPVVIDVPKDTTAPDKLYEFKYPNDVNIRSYKPPIDPDPRQIERAVDAIIESNKPVIYAGGGAINSNASEELIRLNEILDFPVTNTLMGLGVYPATHKRFLGMLGMHGTYQANMSMHNADLIIAIGARFDDRITNTPKLFAPKAKIIHLDVDYSSVSKIIEANIAVFGQVKNALLEMIKLLEVKKELIDPKKILPWKEQISDWKSQYGLNHEMHLYETDDKPIMPQAVVQHLYNITNGKAFITSDVGQHQMFAAQYYHFDEPRKWINSGGLGTMGFGLPAAMGAKLAYPNDEVICITGEGSIQMCIQELSTCT

SEQ ID NO: 110678 - protein, 137 aa, Unknown
  Bacterial polypetide isolated from the Sargasso Sea
MPKLLSGAEIVFKALEDQKVEYIFGYPGGAVLPIYDELKNHKSIKHILARHEQGAGHSAEGYARSSGKPGVLLVTSGPGATNAVTALTDAYMDSVPLVCISGQVPTHLIGTDAFQECDTTGITRPCTKHNWLVKDVK

SEQ ID NO: 110679 - protein, 302 aa, Unknown
  Bacterial polypetide isolated from the Sargasso Sea
FIDVPKDTTAPDKLFEFNYPDEVNIRSYSPPIDPEKNQIERAVEAIIASEKPVIYAGGGAINSNASSELIKLNEILDFPVTNTLMGLGVYPATDERFLGMLGMHGTYQANMAMHNADLIIAIGARFDDRITNTPKLFAPNAKIIHFDVDHSSVSKIIEANIAVFGQVKNSLNEIIKLCELKKEMINTKKISSWKNQIEEWKKSHGLNHDMYLEDSDDSPIMPQVVVQHVYNITKGKAFVTSDVGQHQMFAAQYYHFDEPRKWINSGGLGTMGFGLPSAMGVKLAFPNDEVVCITGEGSIQMC

SEQ ID NO: 110680 - protein, 318 aa, Unknown
  Bacterial polypetide isolated from the Sargasso Sea
IGMLGMHGTYEANMAMHDCDVMLCVGARFDDRITGNLKYFSPNSKKIHIDIDPSSINKNVKVDIALVGDCYFVLDMMLKELKINKSKLDTKSIDKWWHTINKWKKKDCLSFTDSDKIIKPQKALKVLNEALKGKDAFITTEVGQHQMWAAQYLDFYKPNRWMTSGGLGTMGYGFPAAIGVQVAHPKKPVICVAGEASFLMNMQELSSLRQLNIPVKIFILNNEYMGMVRQWQQFFHGGRYAESYTDSLPDFISLANSFGIKGMRVMDPNKLKSSIKEMLDHDGPVLMDVCVAKMENVFPMIPAGAAHNEMKLSDKDDK

SEQ ID NO: 110681 - protein, 286 aa, Unknown
  Bacterial polypetide isolated from the Sargasso Sea
GKLDTFAPRARVIHFEIDPAEIGKTRRPDVAVLGDLGLSVARLVELSLQQQVQPSTAPWLARIAEWKQTYPLTVPPAEGPLFPQEVLLAVRELAPNAIVTTDVGQHQMWAAQYLRNGPRGWISSAGLGTMGFGMPAAMGAQVACPDRQVVCIAGDASILMNIQELGTLAAYGLPVKVVIVNNHWQGMVRQWQESFYEERYSASDMLNGMPDFVALARSFGVDGVHIRERESLKRDLEAALKAPGPMLIDIHVRRGENCYPMVPPGKSNAEMVGLPAPMPVLNAPTS

SEQ ID NO: 110682 - protein, 197 aa, Unknown
  Bacterial polypetide isolated from the Sargasso Sea
MTLMGLGVIASSDKNSLGMLGMHGMYEANMAMHECDVMINIGARFDDRVTGRLDAFSPNSKKIHIDIDASNINKTINVDVPIIGDVKNVVEQMISMWKNKKYQLDKNTLNEWWDKINKWKEVDCLSYNNNSKQIKPQYAVQRLYELTKNTKTFVTTEVGQHQMWAAQYYKFEEPNRWLTSGGLGTMGYGFPAAIGAQ

SEQ ID NO: 110683 - protein, 342 aa, Unknown
  Bacterial polypetide isolated from the Sargasso Sea
TNTLMGLGVYPGTGKRFLGMLGMHGTYQANMAMHNADLIIAVGARFDDRITNTPEKFAPKAKVIHFDVDHSSVSKIIEADIAVFGQVKDSLQAINNHLKSRKDEIKKEKLSPWHQQISEWKEKHGLDHELYKNNSDEHPILPQAVVQHIYQESEGKAFVTSDVGQHQMFAAQYYHFDEPRKWINSGGLGTMGFGLPSAMGVKLAYPEEEVICITGEGSIQMCIQELSTCSQYKLPIKIFNINNLALGMVKQWQDMNYEGRHSSISYEDSLPDFVGLAESYGHVGIKITKNSELKEGIAKALSMKDQLVFVDIYVDPNEHVYPMLVAPNGSLKDMWLGKGKKT

SEQ ID NO: 110684 - protein, 319 aa, Unknown
  Bacterial polypetide isolated from the Sargasso Sea
FFQIPVTTTLMGKGAFEDQDQLALGMLGMHGTAYANFSVSECDLLLAVGARFDDRVTGKLDDFACHAQVIHIDIDPAEISKNRIPQISLVGDVKVILQELLKEQLYESDFDLAQTDPWRKRISRWKQTYPLIVPSNENSLSPQKVISLVNLFKKDAFFTTDVGQHQMWSAQFLNCEPRHWASSAGLGTMGFGLPAAIGIQVAFPNESVVCITGDSSFQMNIQELGTIAQYDLPIKIVIVNNHWQGMVRQWQQSFYGERYSHSNMEKGAPNFSLVAESYGIKGVKLAKTETFEEDFLQALSLPGPVLIDVVVTEDENCYP

SEQ ID NO: 110685 - protein, 137 aa, Unknown
  Bacterial polypetide isolated from the Sargasso Sea
MKKGKSNTKKYSNSGESIISGAEAVIRSLLSEKVDLLYGYPGGAIMPVYDELFKYRDKLNHILVRHEQGATHAAQGYARASGKVGVVIATSGPGATNLVTGITDAQIDSTPLVCITGQVASHLLGSDAFQETDIIGI

SEQ ID NO: 110686 - protein, 173 aa, Unknown
  Bacterial polypetide isolated from the Sargasso Sea
MSKLYSGAEIVFKCLEAQDVEYIFGYPGGAVLPIYDELKNHESIKHILARHEQGAGHAAEGYARSSGKPGVVLVTSGPGATNAVTALTDAYMDSIPLVCISGQVPTHLIGTDAFQECDTTGITRPCTKHNWLVKDVKDLSKIIHKAFEVATTGRPGPVLVDIPKDIQFQKTKY

SEQ ID NO: 110687 - protein, 106 aa, Unknown
  Bacterial polypetide isolated from the Sargasso Sea
MSKLYTGAEIVFKCMEDQKVEFIFGYPGGAVLPIYDELKNHDSIKHILARHEQGAGHAAEGYARSCGKPGVVLVTSGPGATNVVTALTDAYMDSIPLVCISGQVPT

SEQ ID NO: 110688 - protein, 271 aa, Unknown
  Bacterial polypetide isolated from the Sargasso Sea
YAKQAKIIHFEIDPAEVNKNVKVDLAILGDCNKTLNEIIPYVKNKDHSIWINRFDSLMKIEKKKVIQDDLFPKKNGLTMGESINAINKVTNGNAIIVTDVGQHQMAACRYAKFTKSKSNITSGGLGTMGFALPAAIGAKMGDPKRQVVAVIGDGGYQMTIQELGTIFQYKVAVKIVVLNNDFLGMVRQWQQMFFEKRYASTEMVNPDFVAIAKGYYIKAERVTKRNDLDSAINRMLLNDEPYFLEICVEKEDNVFPMIPSGASVSEYKIII

SEQ ID NO: 110689 - protein, 100 aa, Unknown
  Bacterial polypetide isolated from the Sargasso Sea
MANLMSGAEIVFKVLEDQGVRHIFGYPGGAVLPIYDELKNHNKIKHILVRHEQGAGHAAEGYARSSGKPGVLLVTSGPGATNAVTALTDAYMDSVPIVCI

SEQ ID NO: 110690 - protein, 275 aa, Unknown
  Bacterial polypetide isolated from the Sargasso Sea
SQKKLNGKTHNNFSQKEIDELIKLMSKSSKPIFYTGGGVVNSGPRASELLRELVDLTGFPITSTLQGLGSFPGDDNQFLGMLGMHGSYEANNAMHDCDLMINIGARFDDRITGKIDEFSPNSKKVHIDIDPSSINKNVKVDLPIVGDVAEVIGSTMKTIKKVKPNFAKSNKQKISKWWEKIQKWRSVNSFNFINSSETIKPQYAIQRLYELTKNKETYVTTEVGQHQMWAAQHYKFNKPNRWMTSGGLGTMGYGLPAAVGVQVAHPNKLVIDIAG

SEQ ID NO: 110691 - protein, 285 aa, Unknown
  Bacterial polypetide isolated from the Sargasso Sea
KKLNGKATHKISNLELDKFINLIKKSSKPIFYTGGGVINSGPEASKYLRELVSLTGFPITSTLQGLGAYPGDDPQFLGMLGMHGTYEANNAMHDCDLMINIGARFDDRITGKVDEFSPGSKKIHVDIDPSSIGKNIKVDLAIVSDVTELLKSLIKRFKEKNKNFSSSNKQKISNWWEQIGKWREKKSLNFINSDKVIKPQHAVQRLYELTKNQDTFITTEVGQHQMWAAQHYKFNKPNRWMTSGGLGTMGYGLPAAIGVQIANPKKLVVDIAGEASVLMTMQEMS

SEQ ID NO: 110692 - protein, 214 aa, Unknown
  Bacterial polypetide isolated from the Sargasso Sea
TIKPQYAIQRLYELTKNKDTYVTTEVGQHQMWAAQHYKFNKPNRWMTSGGLGTMGYGLPAAVGVQVAHPNKLVIDIAGEASVLMTMQEMSTAVQYSLPIKIFILNNEYMGMVRQWQELLHDKNYSESYTAALPDFVKLAEAYGCVGIRATKPEELDDKIIEMINTDRPVIFDCLVDKEENCFPMIPSGKPHNQMLLGPKDQKEKKITGKGKTLV

SEQ ID NO: 110693 - protein, 265 aa, Unknown
  Bacterial polypetide isolated from the Sargasso Sea
MSKLYSGAEIVFKCMEDQGVETIFGYPGGAVLPIYDELKNHKFVKHILVRHEQGAGHAAEGYARSSGKPGVLLVTSGPGATNAVTALTDAYMDSVPLVCISGQVPTHLIGTDAFQECDTTGITRPCTKHNWLVKNVDDLAKTIHKAFEVATTGRPGPVLVDIPKDVQFQKTKYTKYKKQKKLNGKKHSQFSKEVIDELIKLMIKSSKPIFYTGGGVINSGPKASELLRELVNLTGFPITSTLQGLGSYPGGDNQFLGMLGMHGSY

SEQ ID NO: 110694 - protein, 306 aa, Unknown
  Bacterial polypetide isolated from the Sargasso Sea
HDNKFFLGMLGMHGTYEANLSMYNCDVMLNIGARFDDRITGNLKEFSPYSKKIHIDIDPSSINKSVPVDIPIISDAGSALKELIYELKKLKFKNSENRIGVWLRQINEWRSKKCLDFNQKGKIIKPQYAIKRLFEKTKNIETYITTEVGQHQMWAAQYYGFSKPNRWMTSGGLGTMGYGLPSAMGVQIAHPEKLVIDISGEASFLMNMQELSTLKQYKLPVKVFIINNQWMGMVRQWQQLIHGGRYSESYTDSLPDFKSLAESFGLEGLRAENVDQLDDVIDQMMASKSAVLCDIQVAKEENCFPM

SEQ ID NO: 110695 - protein, 292 aa, Unknown
  Bacterial polypetide isolated from the Sargasso Sea
GLGSIPQDHVLSYGMMGMHGSYWANHAASNADLIIGLGMRMDDRALGRFADLNPTANVIHVDIDPAEHNKNIITTTPIVGNVREVLKILITQFEPLSHIDWIHWIDELRRDHKDSFKVPEVDELTPQYIESRIAEKIGNEGVVVTGVGQHQMWAAQLMNISRPRQLITSGGLGTMGFEVPAALGAQVAEPNRTVWTICGDGGFQMTNQEIATMIDENLPVKMAIMNNGFLGMVRQWQELFYGNNYVSVNMSQPDFVKLGEAYGIKSLRVSHKSEVDDVIKEANNHPGPVLID

SEQ ID NO: 110696 - protein, 274 aa, Unknown
  Bacterial polypetide isolated from the Sargasso Sea
KKPVIYSGGGVNQNNASEELTALAKLLNFPVTNTLMGLGAFPGSDPQFMGMLGMHGTYQANMAMHNADLIIAVGARFDDRITNDPKQFALSAKKIHIDVDPASVSKIIHADIPIVGSAKESLTALIEELKSRDLKTNEPAISEWNQQIIDWTDAHGLNHSLLEVGSQNGKILPQQVIQSLYKETKGEAFITSDVGQHQMFAAQYYHFDKPRQWINSGGLGTMGFGLPSAMGVQLAFPDSTVACVTGEGSIQMCIQELSTCLQYGLPIKIINLNN

SEQ ID NO: 110697 - protein, 233 aa, Unknown
  Bacterial polypetide isolated from the Sargasso Sea
CTNTLMGLGCYPAIDKQFIGMLGMHGTYEANLAMHDSDLIIAVGSRFDDRVTGNLSKFSPYAKKVHIDIDPSSINKNVKVDVALIGDVKTIVNSIYLELKKNKNFLKYENINKWWLQIDLWKKKNCLGYKKVNYPIKPQYAIERLYELTKNKDCFITTGVGQHQMWAAQYYKFNKPNRWMTSGGLGTMGYGLPAAIGAQIANPKKLVIDIDGEASFLMTMQELSTICQYKLPV

SEQ ID NO: 110698 - protein, 129 aa, Unknown
  Bacterial polypetide isolated from the Sargasso Sea
MSKLYSGAEIVFKCLEDQDVEYIFGYPGGAVLPIYDELKNHESIKHILVRHEQGAGHAAEGYARSSGKPGVVLVTSGPGATNAVTALTDAYMDSIPLVCISGQVPTHLIGTDAFQECDTTGITRPCTKH

SEQ ID NO: 110699 - protein, 285 aa, Unknown
  Bacterial polypetide isolated from the Sargasso Sea
MSKLYSGAEIVFKCLEDQKVEFIFGYPGGAVLPIYDELKNHSSIKHILVRHEQGAGHAAEGYARSSGKPGVVLVTSGPGATNVVTALTDAYMDSVPLVCISGQVPTHLIGTDAFQECDTTGITRPCTKHNWLVKDIKDLSKTLHEAFRVATTGRPGPVLVDIPKDIQFAKISYSKPKIRNKLNGKSLNNFSQKNIDELISLMNQSKRPIIYSGGGVINSGPEASDALRELAQLTGFPITSTLQGLGAYPGDDNQFLGMLGMHGTYEANNAMHDCDLLINIGARFD

SEQ ID NO: 110700 - protein, 204 aa, Unknown
  Bacterial polypetide isolated from the Sargasso Sea
MEMLSGAEMVVQSLVDQGVKQVFGYPGGAVLDIYDALHTLGGIDHVLVRHEQAAVHMADGLARATGEVGVVLVTSGPGATNAITGIATAYMDSIPLVILSGQVATSLIGYDAFQECDMVGISRPVVKHSFLVKQTEDIPGVLKKAFWLAASGRPGPVVVDLPKDILNPAKKLPYAWADTVSMRSYNPTTSGHKGQIKRALQTLV

SEQ ID NO: 110701 - protein, 285 aa, Unknown
  Bacterial polypetide isolated from the Sargasso Sea
KVHFDIDASSFNKSVNVDLTVQGDLSKILQIINKKIEEKKIIFKQKKIKNWWLQINKWRSKDCLKFKNSDKIIKPQHALKRLDHLTKNYNPYITTEVGQHQMWAAQFLTFNKPKHWMTSGGLGTMGYGLPAAMGVQIAHPKSLVIDVAGEASILMNIQEMSTIKQFKLPVKVFILNNHYMGMVRQWQELLHGNRLSESYMDSLPDFVKLAESFGATGLRTEKPSEIDDLIKEMIKINGSVICDIIVDPGENCFPMIPSGSTHNQMLLGPDDKSDGEISEDGMVLV

SEQ ID NO: 110702 - protein, 294 aa, Unknown
  Bacterial polypetide isolated from the Sargasso Sea
KNFNSVKHILVRHEQCAGHAAEGYARSSGKPGVLLVTSGPGATNAVTALTDAYMDSVPLVCISGQVPTHLIGTDAFQECDTTGITRPCTKHNWLVKDVKHLEKTIHKAFEVATTGRPGPVLVDIPKDVQFQKTSYTKFKKQKKLNGKVNNQFSQKDIDELIKLMSKASKPVFYTGGGVINSGPKASELLRELVNMTGFPITSTLQGLGSYPGEDSQFLGMLGMHGSYEANNAMHDCDLMINIGARFDDRITGKIDEFSPKSKKVHIDIDPSSINKNVKVDLPIVGDVAEVITST

SEQ ID NO: 110703 - protein, 221 aa, Unknown
  Bacterial polypetide isolated from the Sargasso Sea
GKIDEFSPKSKKVHIDIDPSSINKNVKVDLAIVGDIKSVLTSTLKTLKKSKNNFSKSNKHQISNWWEQIQKWRSKRSLDYIGSEETIKPQYAIERLYELTKDKDTYITTEVGQHQMWAAQHYKFNKPNRWMTSGGLGTMGYGLPAAVGVQIAHPKKLVIDIAGEASVLMTMQEMSSAVQYNLPIKIFILNNEYMGMVRQWQELLHDKNYSDKLYSRIARFC

SEQ ID NO: 110704 - protein, 208 aa, Unknown
  Bacterial polypetide isolated from the Sargasso Sea
AIERLYELTKDKDSYITTEVGQHQMWAAQHYKFNKPNRWMTSGGLGTMGYGLPAAVGVQVAHPKKLVIDIAGEASVLMTLQEMSTAVQYNLPIKIFILNNEYMGMVRQWQELLHDKNYSESYTAALPDFVKLAEAYNCVGIRAKTPEELDDKITEMLNTNRPVIFDCMVDKVENCFPMIPSGKPHNQMILGPKDQESNKITGKGKSLV

SEQ ID NO: 110705 - protein, 211 aa, Unknown
  Bacterial polypetide isolated from the Sargasso Sea
PQYAVQRLYELTKNKKTFITTEVGQHQMWAAQYYKFEEPNRWLTSGGLGTMGYGFPAAIGAQVGNPDALVVDIAGDASILMNIQEMSTAIQYRLPVKIFILNNEYMGMVRQWQELLHGGRYSESYTDSLPDFVKLAESYKAVGLRAKTTDELDGVIAEMMDTDNTVIADIWVTKEENCFPMIQSGSAHNEMLLSKDQKQDKKSAEKGKILV

SEQ ID NO: 110706 - protein, 242 aa, Unknown
  Bacterial polypetide isolated from the Sargasso Sea
PDASKLLRELVDKTNFPITSTLMGLGCYPASGKRWLGMLGMHGLYEANLAMHDCDLMINIGARFDDRITGRIDAFSPNSKKAHVDIDPSSINKVISVDIPIIGDVGSVLQDVLELWKSRGQKTNVEEISSWWKEIENWKSIDCLAFSQEGKTIKPQFAISRLEELTKKYKKRFIATEVGQHQMWAAQYLGFEEPNQWMTSGGLGTMGYGFPASIGVQIAHPNSLVINVAGEASWLMNMQELG

SEQ ID NO: 110707 - protein, 309 aa, Unknown
  Bacterial polypetide isolated from the Sargasso Sea
PVVVDIPKDVQTADISEEDYEDTNISAYSNRILAIEKSRLNEEKSSEFFTHLGNSKRPLIYFGGGVISASASKELREFVDYFNLPAVSTLMGLGAVDTRHPSSLHMLGMHGTPYANYAVQESDFLIAIGSRFDDRVAGVPEKFAPKAKVIAHFDVDASEINKVKNAAWSHLGVLSLALKDLIKHAKSNDLEFNFGDWLSHTGELKSKYPLNFNRSSDLIQPEHVIECINKITKGDAIVTTGVGQHQMWAAQYFDFKEPRLWLTSGSMGTMGFGIPAAIGAQIAHPDKTVIDVDGDGSIRMNLGDLETIT

SEQ ID NO: 110708 - protein, 296 aa, Unknown
  Bacterial polypetide isolated from the Sargasso Sea
FGYPGGAVLPIYDELKHHKSIKHILARHEQGAGHAAEGYARSSGKPGVVLVTSGPGATNVVTALTDAYMDSVPLVCISGQVPTHLIGTDAFQECDTTGITRPCTKHNWLIKDVKDLAKTIHKAFEVATTGRPGPVLVDIPKDIQFNKFSYSKFKKQKKLNGKAHNYYSQKEIDELIKLIIKSKKPIIYSGGGVINSGIEASKLLRELVDATGFPITSTLQGLGAYPGEDNQFLGMLGMHGTYEANNAMHGCDLMINIGARFDDRITGKIDEFSPKSKKVHIDIDPSSINKNVKVDL

SEQ ID NO: 110709 - protein, 243 aa, Unknown
  Bacterial polypetide isolated from the Sargasso Sea
MAVKIIVIGWSQINEWRKKECLHYEQGDEVIKPQHAISRLYELTKQKDTYVTTEVGQHQMWAAQYYKFSKPNRWITSGGLGTMGFGMPAAVGAQMANPDSLVIDIAGEASFLMNIQEIATAVQYKLPIKIFILNNEYMGMVRQWQELLHGSRYSESYVDALPDFKKLAESFNAVGVRAKNISELDDTINEMISIDRPVIADIWVDKKENCFPMIPSGAAHHEMLLSKYDKENPENQEKGKVLV

SEQ ID NO: 110710 - protein, 319 aa, Unknown
  Bacterial polypetide isolated from the Sargasso Sea
ILHLAFEVATTGRPGPVLVDIPKDIQFKKGKYKFFKNTLKKKLNGKAIHKISNSELDKFINLIKKSSKPIFYTGGGVINSGPEASKYLRELVSLTGFPITSTLQGLGAYPGDDPQFLGMLGMHGTYEANNAMHDCDLMINIGARFDDRITGKVDEFSPGSKKIHVDIDPSSIGKNIKVDLAIVSDVTQLLRSLIKRFKEKNKNFANSNKQKTSKWWEQIEKWREKKSLNYNNSDKIIKPQYAVQRLYELTKNQDTFITTEVGQHQMWAAQHYKFNKPNRWMTSGGLGTMGYGLPAAIGVQIANPGRLVVDIAGEASVLM

SEQ ID NO: 110711 - protein, 286 aa, Unknown
  Bacterial polypetide isolated from the Sargasso Sea
GAEIVFKCMEDQGVETIFGYPGGAVLPIYDELKNHSSVKHILVRHEQGAGHAAEGYARSSGKPGVLLVTSGPGATNAVTALTDAYMDSVPLVCISGQVPTHLIGTDAFQECDTTGITRPCTKHNWLVKNIEDLAKTVHKAFEVATSGRPGPVLVDIPKDVQFQKAKYTKFTKPKKLNGKKNIKFSNNEIDELMKLMVKSSKPIFYTGGGVINSGPRASELLRELVNLTGFPITSTLQGLGSYPGDDNQFLGMLGMHGSYEANNAMHDCDLMINIGARFDDRITGKI

SEQ ID NO: 110712 - protein, 266 aa, Unknown
  Bacterial polypetide isolated from the Sargasso Sea
SNSLGMLGMHGMYEANMAMHECDLLINIGARFDDRVTGRLDAFSPNSKKIHIDIDESNINKTIKVDVPVVGDVTSILNRVVKVWKDNNLKTNKSDLKLWWDKINNWKKIDCLHFTNNEKEIKPQYAIQRLYELTKDKKTFITTEVGQHQMWAAQYYKFEKPNRWLTSGGLGTMGYGFPAAIGAQVANPDALVIDVAGDASILMNIQEMSTAVQYRLPVKIFILNNEYMGMVRQWQELLHGGRYSESYTDSLPDFVKLAESYKAHWS

SEQ ID NO: 110713 - protein, 251 aa, Unknown
  Bacterial polypetide isolated from the Sargasso Sea
ARLVLDQMLELLEQEKSQQPLDDNRDWWQQIEHWRARQCLKYDTQSESIKPQAVIETIWRLTKGEAYVTSDVGQHQMFAALYYPFDKPRRWINSGGLGTMGFGLPAALGVKMALPDETVVCVTGDGSIQMNIQELSTALQYELPVLVLNLNNRYLGMVKQWQDMIYSGRHSQSYMQSLPDFVRLAEAYGHIGIQINRPEELESKLGEALEHVRNHRLVFVDVTVDGSEHVYPMQIRGGGMDEMWLSKTERT

SEQ ID NO: 110714 - protein, 181 aa, Unknown
  Bacterial polypetide isolated from the Sargasso Sea
MPKLYSGAEIVFKCLEDQGVTNIFGYPGGAVLPIYDELKNFKSIKHILVRHEQGAGHAAEGYARSSGKAGVLLVTSGPGATNAVTALTDAYMDSVPLVCITGQVPTHLIGTDAFQECDTTGITRPCTKHNWLVKDVKDLAKVIHKAFEVATTGRPGPVLVDIPKDIQFQKVAYKNYKKQKK

SEQ ID NO: 110715 - protein, 104 aa, Unknown
  Bacterial polypetide isolated from the Sargasso Sea
MPKLFTGAEIVFKALEDQKVEYIFGYPGGAVLPIYDELKNHKSIKHILARHEQGAGHAAEGYARSSGKPGILLVTSGPGATNAVTALTDAYMDSVPLVCISGQV

SEQ ID NO: 110716 - protein, 114 aa, Unknown
  Bacterial polypetide isolated from the Sargasso Sea
MSKLLSGSEIVFKCLEDQNVDFIFGYPGGAVLPIYDELKNHNSIKHILVRHEQGAGHAAEGYARSSGKPGVALVTSGPGATNIVTALTDAYMDSIPIVCISGQVPTHLIGTDAF

SEQ ID NO: 110717 - protein, 308 aa, Unknown
  Bacterial polypetide isolated from the Sargasso Sea
SGKPGVVLVTSGPGATNVVTALTDAYMDSVPLVCISGQVPTHLIGTDAFQECDTTGITRPCTKHNWLVKDVRDLAKTIHKAFEVATTGRPGPVLVDIPKDIQFNKFSYSNEKKQKKTNGKTHNLYSQKEIDDLINLIIKSKKPIIYSGGGVINSGVEASKLLREFVEATGFPITSTLQGLGAYPGEDNQFLGMLGMHGTYEANNAMYGCDLMINVGARFDDRITGKIDEFSPKSKKVHIDIDPSSINKNVKVDLAIVGDVAFVLKNIIKTLNKQKPNFSKSNKSNISKWWEQIQKWRSVNSLGYINSD

SEQ ID NO: 110718 - protein, 277 aa, Unknown
  Bacterial polypetide isolated from the Sargasso Sea
KGSFPENHDLSVGMLGMHGTAYASKAVAACDLIFSIGSRWDDRITPANIQRFCPDAIKLHIDIDPAEINKIVVPDGHAIGDAKAVLKKLIPLIKPLETKPWLKEVSANKKKFPLTYKKQGGLKAQFVIDELYRITKGQAIVTTDVGQHQMWAAQFYPTILPNGWISSGGAGTMGYGLPSAIGAQFGCPDDTVVAIVGDGGFQMTLCELATAAIHKLPVKILILDNKYLGMVRQWQGMFYDNRLSGVDLHGNPDFLKLGQAYGIAGYRIKRAADVKKS

SEQ ID NO: 110719 - protein, 223 aa, Unknown
  Bacterial polypetide isolated from the Sargasso Sea
MKLPGNDILIQSLLNEGVEYIFGYPGGAALHIYDAIFNQNEIEHILVRHEQGATHAADGYARATGKPGVVLVTSGPGATNAITGIATAFMDSIPMVVLSGQVATHLIGTDAFQETDMIGISRPIVKHSFTVESADKISEVIKQAFFIATSGRPGPVVIDIPKDTTAPDKLFDFVLPESINIRSYNPPIEPEIKQIKRAAEAIIDAEKPVIYAGGGSINSNASE

SEQ ID NO: 110720 - protein, 282 aa, Unknown
  Bacterial polypetide isolated from the Sargasso Sea
MTRQMTGAKMVVQALKDQGVDTVFGYPGGAVLPIYDEVFLQNDIRHILVRHEQGAVHAAEGYARSSGKPGVVLVTSGPGATNAVTGLTDALMDSIPLVVLTGQVPTFMIGSDAFQEADTVGITRPCTKHNWLVKDTNQLAETIHEAFHVATSGRPGPVLVDIPKDVQFATSKYIEKSKIPVSNYQPRVKGDADQITRLVDAIESAKRPIFYTGGGVINSGPHASKLLRELVDKTNFPITSTLMGLGCYPASGKRWLGMLGMHGLYEANLAMHDCDLMINIGA

SEQ ID NO: 110721 - protein, 231 aa, Unknown
  Bacterial polypetide isolated from the Sargasso Sea
MPKLLTGAEIVFKCLKDQKVEHIFGYPGGAVLPIYDELKNHPSIKHILVRHEQGAGHAAEGYARSSGKPGVVLVTSGPGATNVVTALTDAYMDSVPLVCISGQVPTHLIGTDAFQECDTTGITRPCTKHNWLVKDINDLSKVIHEAFRVATTGRPGPVLIDIPKDIQFAKTKYIKPNKEKKLNGKSHNKFSQDQIDELVKLLSKAKKPIIYSGGGVINSGPKASQALREFV

SEQ ID NO: 110722 - protein, 194 aa, Unknown
  Bacterial polypetide isolated from the Sargasso Sea
MGKLFSGAEIVFKVLEHHKVEHIFGYPGGAVLPIYDELKNHKTIKHILARHEQGAGHAAEGYARSSGKPGVMLVTSGPGATNAVTALTDAYMDSVPIVCISGQVPTHLIGTDAFQECDTTGITRPCTKHNWLVKDVKDLADVMDRAFEIATTGRPGPVLVDIPKDIQFKKTEFILKNKKKKQVNGTLNGKVSNT

SEQ ID NO: 110723 - protein, 251 aa, Unknown
  Bacterial polypetide isolated from the Sargasso Sea
LNKRFKDKNKDFLNSNKSNTSKWWKDIDKWRQKKSLGFKNSNQVIKPQHAVQRLYELSKHKDTYITTEVGQHQMWAAQHYKFNKPNRWMTSGGLGTMGYGLPAAVGVQVANPDKLVIDIAGEASVLMTMQEMSTAVQYNLPIKIFILNNQYMGMVRQWQELLHEKNYSESYTAALPDFVKLAEAYGCVGIQAKKPDELDEKIKEMIAINKPVIFDCVVDPNENCFPMIPSGKPHNQMLLGPEDDEEISSEG

SEQ ID NO: 110724 - protein, 272 aa, Unknown
  Bacterial polypetide isolated from the Sargasso Sea
KIVKVDVPLIGDVAHVLEDSIKLWKSKVYKINKSPLKEWWKTIDKWKEKDSLKYASDKNIIKPQHAIQRLYELTKDKDVFVTTEVGQHQMWAAQYYKFSKPNRWITSGGLGTMGFGLPAAIGAQVAHPDKLVIDIAGEASILMCIQEMSTAIQHKLPVKIFIINNQYMGMVRQWQELLHDKRYSHSYTDALPDFVKLAEAYGAKGIRVQKPNELDKAINEMIEYDGPVIFDCVVEQNENVFPMIPSGKAHNEMLLGDETVKEEISDEGKVLV

SEQ ID NO: 110725 - protein, 307 aa, Unknown
  Bacterial polypetide isolated from the Sargasso Sea
PGDDNQFIGMLGMHGTYEANNAMHDCDLLINIGARFDDRITGKIDEFSPKSKKVHIDIDPSSINKIIKVDLAIVGDVNEVIKSAIKKINTKQNGLKDSNKQKISKWWEQIQKWRTKDSLGFVNSDKEIKPQHAVKRLYELTKNQDTFITTEVGQHQMWAAQHYKFNKPNRWMTSGGLGTMGYGLPAAVGVQIAHPDKLVIDIAGEASVLMTMQEMSTAVQYNLPIKIFILNNQYMGMVRQWQELLHEKNYSESYSEALPDFVKLAEAYGCKGIKADNPQELDDKIQEMIDYKGPVIFDCHVDPNENC

SEQ ID NO: 110726 - protein, 318 aa, Unknown
  Bacterial polypetide isolated from the Sargasso Sea
IINPDKSKIIEVAKLLVNAKKPIIYGGGGIINSGPEASNLLRELVDLVEIPTTLTLMGLGALPHDNKFFLGMLGMHGTYEANLSMYNCDVMLNIGARFDDRITGNLKEFSPNSKKIHIDIDPSSINKSVPVDIPIISDAGSALKELIYELKKLKFKDSENRIGVWLTQIDEWRSKKCLDFNQTGKIIKPQYAIKRLFEKTKNIETFITTEVGQHQMWAAQYYGFSKPNRWMTSGGLGTMGYGLPSAMGVQIAHPEKLVIDISGEASFLMNMQELSTLKQYKLPVKVFIINNQWMGMVRQWQQLIHGGRYSESYTDSFA

SEQ ID NO: 110727 - protein, 303 aa, Unknown
  Bacterial polypetide isolated from the Sargasso Sea
LSRILHLAFEVATTGRPGPVLVDIPKDIQFKKGKYKFFKNTLKKKLNGKATRKISNLELDKFISLIKKSSKPIFYTGGGVINSGPEASKYLRELVSLTGFPITSTLQGLGAYPGDDPQFLGMLGMHGTYEANNAMHDCDLMINIGARFDDRITGKVDEFSPGSKKIHVDIDPSSIGKNIKVDLAIVSDVTSLLKSLIKRFKEKNKNFVSSNKQKTSKWWEQIGKWREKKSLNFINSDKIIKPQHAVQRLYELTKNQDTFITTEVGQHQMWAAQHYKFNKPNRWMTSGGLGTMGYGLPASPLVY

SEQ ID NO: 110728 - protein, 121 aa, Unknown
  Bacterial polypetide isolated from the Sargasso Sea
MPKLYSGAEIVFKCLEDQNVSHIFGYPGGAVLPIYDELKNFNSIKHILVRHEQGAGHAAEGYARSTGKPGVLLVTSGPGATNAVTALTDAYMDSGSVSLHHRTSSNAFNWYRCIFQNVTQQ

SEQ ID NO: 110729 - protein, 270 aa, Unknown
  Bacterial polypetide isolated from the Sargasso Sea
LAIVGDVPSVISKINKTFTKGKNGHIKSNKSNIAKWWEQIEKWREKNSLNFVNSDESIKPQHAVQRLYELTKNKDTYVTTEVGQHQMWAAQHYKFNKPNRWMTSGGLGTMGYGLPAAVGVQIAHPEKLVIDIAGEASVLMTMQEMSTAVQYNLPIKIFILNNQYMGMVRQWQELLHEKNYSESYSEALPDFMKMAEAYGCKGIKSDNPSDLDEKIQEMIDYDGPVIFDCHVDPNENCFPMIPSGKPHNQMILGPNDQEDNKIKGKGKALV

SEQ ID NO: 110730 - protein, 291 aa, Unknown
  Bacterial polypetide isolated from the Sargasso Sea
SGRPGPVLIDIPKDIQFAKAKYIKPKETKNNNQTNIKFNGLDKNIDIAVELIKKSSKPILYTGGGVINSGPKATELLRELVSLTGFPITSTLQGLGAFPGDDQQFLGMLGMHGTYEANNAMHDCDLMINIGARFDDRITGKIDEFSPNSKKIHIDIDPSSINKNVAVDLALVGDVKNVLEKLVVAVKKQNPNFGQSNKQKISAWWNQIDLWRKKNSLGYKNSNEVIKPQYAVQRLYELTKAQDAFITTEVGQHQMWAAQHYKFDKPNRWMTSGGLGTMGYGLPAAIGVQVA

SEQ ID NO: 110731 - protein, 305 aa, Unknown
  Bacterial polypetide isolated from the Sargasso Sea
AFQECDTTGITRPCTKHNWLVKDVKDLSKTLHEAFKVATTGRPGPVLVDIPKDIQFAKINYSKPKIEKKLNGKSINYFSQKNIDELINLMNKSKKPIIYSGGGVINSGPEASDALRELVQLTGFPITSTLQGLGAYPGDDNQFLGMLGMHGTYEANNAMHDCDLLINIGARFDDRITGKIDEFSPRSKKVHIDIDPSSINKIIKVDLALVGDVKDVLKSINKTLKKKNIDLKKSNKQKISKWWEQIQKWRTKNSLHFKNSDETIKPQHAVQRLYELTKDKDVFITTEVGQHQMWAAQHYKFNKPN

SEQ ID NO: 110732 - protein, 182 aa, Unknown
  Bacterial polypetide isolated from the Sargasso Sea
MPKLYSGAEILFKCLEDQDVEFIFGYPGGAVLPIYDELKNFNFLKHILVRHEQGAGHAAEGYARSTGKPGVLLVTSGPGATNAVTALTDAYMDSIPLVCISGQVPTHLIGTDAFQECDTTGITRPCTKHNWLVKDIKNLEKTIHKAFEVATTGRPGPVLVDIPKDVQFQKTSYTKYKKQKKL

SEQ ID NO: 110733 - protein, 280 aa, Unknown
  Bacterial polypetide isolated from the Sargasso Sea
LPIYDELQNFKSIKHVLVRHEQGAGHAAEGYARSSGKPGVILVTSGPGATNVVTALTDAYMDSIPLVCISGQVPTHLIGTDAFQECDTTGITRPCTKHNWLVKDINDLANTIHKAFEVATTGRPGPVLVDIPKDIQFQKTKYNRPKKEKKSNGKSHNHFNQNSIDELIELMSKSSKPIFYTGGGVINSGPKASELLRELVYATGFPITSTLQGLGSFPGDDNQFLGMLGMHGTYEANNAMHDCDLMINIGARFDDRITGKIDEFSPKSKKVHIDIDPSSI

SEQ ID NO: 110734 - protein, 305 aa, Unknown
  Bacterial polypetide isolated from the Sargasso Sea
LYVGGGVVNAGPEASQMVTHLVRMTGFPCTTTLMALGAFPASDPLFIGMPGMHGTYEANMVMHDCDVMFNIGARFDDRVTGKVNAFSPNSKKVHIDIDPSSLNKNVSVDIGIIGDAASVLEDILAIWDEKQPVIESGALKNWWKQIDEWRGVDCLAYDQGPEIIKPQFALETLNNALGGTDYYVTTDVGQHQMWSAQFLHFDEPNRWMTSGGLGTMGYGVPAAMGVQVAHPDSSVICVTSEGSLMMNIQEMNTIAKNGLPVKILNLNNQILGMIRQWQELFHDNHESECDLSGGPDFIKLAEAFG

SEQ ID NO: 110735 - protein, 324 aa, Unknown
  Bacterial polypetide isolated from the Sargasso Sea
GITRPCTKHNWLVKDVKDLSKIIHKAFEVATTGRPGPVLVDIPKDIQFQKTKYVNSIKRKKLNGKIHNKFNQSEIDQLVKLMVNSSRPILYTGGGVINSGPKASELLRELVSLTGFPITSTLQGLGSYPGDDNQFLGMLGMHGTYEANNAMHDCDLMINIGARFDDRITGKIDEFSPKSKKVHIDIDPSSINKNVKVDLPIVGDVSEVMLSVIKTLKKKNPNFASSNKEKTSKWWEKISEWRSVNSLNFINSDKTIKPQHAIQRLYELTKDKDTYITTEVGQHQMWAAQHYKFNKPNRWMTSGGLETMGYGLPAAVGVQNAHPD

SEQ ID NO: 110736 - protein, 304 aa, Unknown
  Bacterial polypetide isolated from the Sargasso Sea
AGGGTISSNAADELRELNELIDFPVTNTLMGLGVYPGTGKRFLGMLGMHGTYQANMAMHNADLIIAVGARFDDRITNTPKKFAPKAKVIHFDVDHSSVSKIIEADIAVFGQVKDSLKAINNYLRSRKDEINKEKLSPWHQQIKEWKEKHGLNHELYKNDSDEHPILPQAAVQHIYQESEGKAFVTSDVGQHQMFAAQYYHFDEPRKWINSGGLGTMGFGLPSAMGVKLAYPEEEVICITGEGSIQMCIQELSTCSQYKLPIKIFNINNLALGMVKQWQDMNYDGRHSSISYEDSLPDFVGLAES

SEQ ID NO: 110737 - protein, 209 aa, Unknown
  Bacterial polypetide isolated from the Sargasso Sea
MSKLYSGAEIVFKCLEDQDVEFIFGYPGGAVLPIYDELKNHNTIKHILVRHEQGAGHAAEGYARSSGKPGVVLVTSGPGATNVVTALTDAYMDSVPLVCISGQVPTHLIGTDAFQECDTTGITRPCTKHNWLVKDIKDLSKTLHEAFRVATTGRPGPVLVDIPKDIQFAKVNYSKPKTQKKLNGGSSNHFSQKDIDKLIDLMNNSKKPI

SEQ ID NO: 110738 - protein, 312 aa, Unknown
  Bacterial polypetide isolated from the Sargasso Sea
MSKLYSGAEIVFKCLEDQGVKFIFGYPGGAVLPIYDELKNFESIKHILVRHEQGAGHAAEGYARSTGKPGVLLVTSGPGATNAVTALTDAYMDSIPLVCISGQVPTHLIGTDAFQEADTTGITRPCTKHNWLVKDIKDLPEVIHKAFEVATTGRPGPVLVDIPKDIQFQKTNYIKNKKKKKLNGKNNNKFSQKDINELINLMNKANKPIFYTGGGVINSGPKASELLRELVHMSGFPITSTLQGLGSYPGEDSQFLGMLGMHGSYEANNAMHDCDLMINIGARFDDRITGKIDEFSPNSKKVHIDIDPSSIN

SEQ ID NO: 110739 - protein, 247 aa, Unknown
  Bacterial polypetide isolated from the Sargasso Sea
RPMIYAGGGVILGKASNDLVKLTKHLNFPITNTLMGLGAYPSSDEQFLGMLGMHGTYEANMAMHECDVLLAIGARFDDRVTGDTNQFCPKAKIIHIDIDPSSISKIIEVDLSLIGDTKRILKKLLEQTKNFEKDINKDALSKWWSKINSWQKKKCLSYKKSTKVIKPQSVIESLHKITKGKAFVTSDVGQHQMWVAQYYKFDKPNRWINSGGLGTMGFGLPAAIGAQLAYPKEQVICVTGEASILMC

SEQ ID NO: 110740 - protein, 280 aa, Unknown
  Bacterial polypetide isolated from the Sargasso Sea
SKKPLIVWGQGVILAEAENEFREFVENSGIPAVWTILGLSALPTDHPLNMGMVGMHGNYGPNILTNQCDVLIAVGMRFDDRVTGNLNTYAKQAKIVHLEIDPAEISKNVFSHFPILGDCKESLKKLSNLINKKSLDSWIGLFDKYMKIEYKSVIEKDLFPNKDGLTMGEVINSINKHSKGDAIIVTDVGQHQMVACRYAKFNSSKSNITSGGLGTMGFALPAAIGAKIGASHREVVAVIGDGGYQMTIQELGTIFQTKAAVKIVVLNNDYLGMVRQWQQL

SEQ ID NO: 110741 - protein, 266 aa, Unknown
  Bacterial polypetide isolated from the Sargasso Sea
MPGMHGNYTATTSMQNSDLLIALGVRFDDRVTANPKYFAQKAKVIHADIDPAEIGKVREPEVPIVGDAKSVIKGLIETLGDTKVDTQDWLKEIKEMKKSYPLSYNQEEKGPLKVPYVLEELQKMSEEDSIVVSGVGQHQMWISLHWKFTSPNTWLNSGGLGTMGYSLPAAIGAKAAFPEKQVLALDGDGCFQMTCQELITASTENIPLKIVVFNNGNHGMVRQWQKIFYNHRFSASELTHHTPDYVALAEAMGAVGLRMVEKSDVN

SEQ ID NO: 110742 - protein, 310 aa, Unknown
  Bacterial polypetide isolated from the Sargasso Sea
GFPNTSTLQGLGAYPGDDNQFLGMLGMHGTYEANNAMHDCDLLINIGARFDDRITGKIDEFSPNSKKVHIDIDPSSINKIIKVDLAIVGDVTSVISKINKTITKSKNGHSKSNKSNIAKWWEQIEKWREKDSLNFINSSESIKPQHAVQRLYELTKDKDTYVTTEVGQHQMWAAQHYKFNKPNRWMTSGGLGTMGYGLPAAVGVQIAHPEKLVIDIAGEASVLMTMQEMSTAVQYNLPIKIFILNNQYMGMVRQWQELLHEKNYSESYSEALPDFMKMAEAYGCKGIKADNPADMDDKIQEMIDYDGPSY

SEQ ID NO: 110743 - protein, 199 aa, Unknown
  Bacterial polypetide isolated from the Sargasso Sea
MGKLISGAEIVFKVLEHHKVEHIFGYPGGAVLPIYDELKNHKTIKHILARHEQGAGHAAEGYARSSGKPGVLLVTSGPGATNAVTALTDAYMDSVPLVCISGQVPTHLIGTDAFQECDTTGITRPCTKHNWLVKDVNDLAKIMDLAFEVATTGRPGPVLVDIPKDIQFKKTNFILKSSNKKKLNGKSSPNGKISSSGFR

SEQ ID NO: 110744 - protein, 295 aa, Unknown
  Bacterial polypetide isolated from the Sargasso Sea
KKPLIYAGGGVINSGPAASKLLTQFVKMTGVPCTLTLMGLGAFPASNKQFIGMLGMHGTYEANLAMHDCDVMVCIGARFDDRVTGRLDAFSPGSTKIHVDIDPSSINKNVRVDIPIIGDVGHVLEDMIKIWKGTQAKVDTKALKAWWKKVDAWRSVNCLKFKQEGEIIKPQHALTRLWELCHEAKKEPFITTEVGQHQMWAAQYLGFEKPNQWMTSGGLGTMGYGLPAAMGVQVAHPNELVVCVAGEASYLMNVQELSTISQYKLPVKSFILNNFYLGMVRQWQELLHGQRYSES

SEQ ID NO: 110745 - protein, 261 aa, Unknown
  Bacterial polypetide isolated from the Sargasso Sea
MTSTPNQIEDSRPQTQHEMSGADALMDSLRRHGVDTIFGYPGGAILPIYDAVFKAEQEGWLKHILVRHEQGGTHAADGFARATGKVGVCFGTSGPGATNLVTGIATAQMDSVPLVVITGQVPRPAIGTDAFQETDIFGITLPIVKHSWVVRDPSEIAKVVAQAFLIASSGRPGPVLIDIPKDVGQEMFKYLPVEPGSIKPLGFELPIAPEHKAISSAIDLIENAEQPLLYVGGGVISSGAHETLAAIANRYQIPVTTTLMG

SEQ ID NO: 110746 - protein, 314 aa, Unknown
  Bacterial polypetide isolated from the Sargasso Sea
IFMTQFLSKRKWEHILFRHEQGATHAADGYARATGKPGVVLVTSGPGATNAITGIATAFMDSIPMIVISGQVAKHLIGTDAFQETDMIGISRPIVKHSFTVDSAENIPEIIKQAFHIATSGRPGPVVIDVPKDTTAPDKLFEFKYPNDVDIRSYKPPIDPDPRQIERAVDAIIESNKPVIYAGGGAINSNASEELIRLNEILDFPVTNTLMGLGVYPATHKRFLGMLGMHGTYQANMSMHNADLIIAIGARFDDRITNTPKLFAPNAKIIHLDVDYSSVSKIIEANIAVFGQVKNSLLEMIKLLEAKKELIDPK

SEQ ID NO: 110747 - protein, 300 aa, Unknown
  Bacterial polypetide isolated from the Sargasso Sea
MTINYISGAEAVIKALVENGVEVIFGYPGGAVLPLYDALFENKKIKHILVRHEQAAVHAAEGYARSTGKVGCVLVTSGPGATNAITGLTDALMDSVPIICLSGQVPTHLIGTDAFQEADTTGISRPCTKHNYLVKDVNRLCEIIHKSFEIASSGRPGPVLIDLPKDIQLSTLKYENKISKIKKISNDYSSKINEDLINKVAKLILQAERPIIYGGGGVVNSGPKASKLLTELVNMLDCPVTLTLMGLGCVPNTNKNFLGMLGMHGTYEANLAMHNCDVMLNVGARFDDRVTGKLNAFAPK

SEQ ID NO: 110748 - protein, 298 aa, Unknown
  Bacterial polypetide isolated from the Sargasso Sea
FRSNNAMHDCDLMINIGARFDDRITGKVDEFSPKSKKIHVDIDPSSIGKNIKVDLAVVSDVSELLKSLIKRFKEKNKNFLNSNKQKTSKWWEQIDKWREKKSLNFINSSKIIKPQYAVQRLYELTKDQDTFITTEVGQHQMWAAQHYKFNKPNRWMTSGGLGTMGYGLPAAIGVQIANPGKLVVDIAGEASVLMTMQEMSTAVQYRLPIKIFILNNEYMGMVRQWQELLHEKNYSESYTAALPDFVKLAESYGCVGIRAKTPDELDEKIKEMIDIQKPVIFDCMVDKSENCFPMIPSG

SEQ ID NO: 110749 - protein, 211 aa, Unknown
  Bacterial polypetide isolated from the Sargasso Sea
DDPQFLGMLGMHGTYEANNAMHDCDLMINIGARFDDRITGKVDEFSPGSKKIHVDIDPSSIGKNIKVDLAIVSDVTTLLKSLIKRFKEKNKNFVNSNKQKTSKWWEQIEKWREKKSLNFINSDKIIKPQHAVQRLYELTKNQDTFITTEVGQHQMWAAQHYKFNKPNRWMTSGGLGTMGYGLPAAIGVQIANPGKLVVDIAGEASVLMTMQ

SEQ ID NO: 110750 - protein, 301 aa, Unknown
  Bacterial polypetide isolated from the Sargasso Sea
MIELLGNLSKFSPYAKKVHIDIDPSSINKNVKVDVALIGDVKTIINSIYSQLNKSKSILDFNNIKQWWNKINIWKKKNCLGYKKINYPIKPQYAVERLYELTKNKDCFITTGVGQHQMWAAQYYKFNKPNRWMTSGGLGTMGYGLPAAIGAQIANPNKLVIDIDGEASFLMTMQELSTISQYKLPVKIFIVNNRWMGMVRQWQELIHGGRYSESYTESLPDFVKLAESFGIVGLKANKSSEVDNTIKEMLRIKKPVLLDMVVDQKENCFPMIPSGAAHNEILLGPEDQTDETINEEGMVLV

SEQ ID NO: 110751 - protein, 241 aa, Unknown
  Bacterial polypetide isolated from the Sargasso Sea
QIFCEVGWEQIQKWRGKDSLNFVNSNDSIKPQHAVQRLYELTKDKDTYVTTEVGQHQMWAAQHYKFNKPNRWMTSGGLGTMGYGLPAAVGVQIAHPEKLVVDIAGEASVLMTMQEMSTAVQYNLPIKIFILNNQYMGMVRQWQELLHEKNYSESYSEALPDFLKMAEAYGCKGIKAENPSELDEKIQEMIDYKGPVIFDCHVDPNENCFPMIPSGKPHNQMILGPNDQEENKIKGKGKALV

SEQ ID NO: 110752 - protein, 160 aa, Unknown
  Bacterial polypetide isolated from the Sargasso Sea
MEKSKRISGSQVFFECLKNEKVTTIFGYPGGAVLPFYDTLYDIKDLEHILVRHEQGAVHMAEGYAKATGKTGVVLVTSGPGATNTVTGITDAFMDSVPIVVFTGQVPRPFLGLDSFQEADVIGVTRPITKWNKLVRSPQELLEAIPKAFEIANKGRPGPV

SEQ ID NO: 110753 - protein, 327 aa, Unknown
  Bacterial polypetide isolated from the Sargasso Sea
RQALACLGMHGTYEANMTMHHSDVIFAVGVRFDDRTTNNLAKYCPNATVLHIDIDPTSISKTVTADIPIVGDARLVLDQMLELLEQEKSQQPLDDNRDWWQQIEHWRARQCLKYDTQSESIKPQAVIETIWRLTKGEAYVTSDVGQHQMFAALYYPFDKPRRWINSGGLGTMGFGLPAALGVKMALPDETVVCVTGDGSIQMNIQELSTALQYELPVLVLNLNNRYLGMVKQWQDMIYSGRHSQSYMQSLPDFVRLAEAYGHIGIQINRPEELESKLGEALEHVRNHRLVFVDVTVDGSEHVYPMQIRGGGMDEMWLSKTGEDLIMR

SEQ ID NO: 110754 - protein, 283 aa, Unknown
  Bacterial polypetide isolated from the Sargasso Sea
ITSTLQGLGAFPGDDNQFIGMLGMHGTYEANNAMHDCDLLINIGARFDDRITGKIDEFSPKSKKVHIDIDPSSINKIIKVDLAIVGDVNEVLKATIKKINKKQNGLRTSNKQNISKWWEQIQKWRTKNSLGFINSDKNIKPQHAVQRLYELTKDQDTFITTEVGQHQMWAAQHYKFNKPNRWMTSGGLGTMGYGLPAAVGVQIAHPDKLVIDIAGEASVLMTMQEMSTAVQYNLPIKIFVLNNQYMGMVRQWQELLHEKNYSESYSEALPDFVKLAEAYGCKG

SEQ ID NO: 110755 - protein, 281 aa, Unknown
  Bacterial polypetide isolated from the Sargasso Sea
MVKLLRKAKKPIIYSGGGVINSGPKASQALREFVDLTGFPITSTLQGLGAYPGDDNQFLGMLGMHGTYEANNAMHDCDLLINIGARFDDRITGKIDEFSPNSKKVHIDIDPSSINKIIKVDLAIVGDVTSVISKINKTIIKSKNGHSKSNKSNIAKWWEKIEKWRGKNSLNFVNSDKSIKPQHAVQRLYELTKNKDTYVTTEVGQHQMWAAQHYKFNKPNRWMTSGGLGTMGYGLPAAVGVQIAHPEKLVIDIAGEASVLMTLQEMSTAVQYNLPIKKYLF

SEQ ID NO: 110756 - protein, 290 aa, Unknown
  Bacterial polypetide isolated from the Sargasso Sea
FGYPGGAVLPIYDELKNHSTIKHILVRHEQGAGHAAEGYARSSGKPGVVLVTSGPGATNVVTALTDAYMDSVPLVCISGQVPTHLIGTDAFQECDTTGITRPCTKHNWLVKDIKDLSKILHEAFLVATTGRPGPVLVDIPKDIQFAKTNYSKPKKKNKVRGKLNNKFTQNELDKLIDLISKAKRPVIYTGGGVINSGPEASETLREFVRLIGFPITSTLQGLGAFPGDDNQFIGMLGMHGTYEANNAMHDCDLLINIGARFDDRITGKIDEFSPKSKKVHIDIDPSSINK

SEQ ID NO: 110757 - protein, 302 aa, Unknown
  Bacterial polypetide isolated from the Sargasso Sea
KVNIKFNGQDKKIDHAIELIKKSSKPILYTGGGVINSGPKAAELLRELVSLTGFPITSTLQGLGAYPGNDPQFLGMLGMHGTYEANNAMHDCDLMINIGARFDDRITGKIDEFSPKSKKIHIDIDPSSINKNVKVDIALVGDVKFVLEKLVSIVKQRYPDFENSNKQKIAAWWGKIENWRKKNSLNYINSKEVIKPQFAVQRLYELTKAQDAFITTEVGQHQMWAAQHYKFDKPNRWMTSGGLGTMGYGLPAAVGVQVAHPDKLVIDIAGEASVLMTMQEMSTAVQYKLPIKIFILNNEYMG

SEQ ID NO: 110758 - protein, 292 aa, Unknown
  Bacterial polypetide isolated from the Sargasso Sea
TDPKATFAYDYPKEVKMRSYSVPGKGHSGQIKKAIELLLDAKRPMIYTGGGVIQGEGSELLTKLTRKLGFPITNTLMGLGAFPASDKQFLGMLGMHGTYEANMAMHNCDVLLCIGARFDDRVTNSDTSKFCPNAKILHVDIDPAAISKTVTADIPIVGSVNSVLEEMLQLLNSSKKTINAKELEVWWSQIDAWREKKCLEINSRSDGIILPQQAVRAVFEITKGDAYVSSDVGQHQMFAAQHYGFDKPRRWINSGGLGTMGFGFPAAMGVQFAFPDEISVCITGEGSFLMNQ

SEQ ID NO: 110759 - protein, 282 aa, Unknown
  Bacterial polypetide isolated from the Sargasso Sea
IQFQKTTYKNYKKINKSNGKTHNHFSQNDIDQLINLMGKASKPIFYTGGGVINSGPRASELLRELVNVTGFPITSTLQGLGSYPADDNQFLGMLGMHGTYEANNAMYECDLMINIGARFDDRITGKIDEFSPKSKKIHIDIDPSSINKNVKVDLAIVGDVKTVVSSIIKTLKNKKPNFIKSNKHKISKWWEKIQKWRSKKSLDYIGSEETIKPQYAIERLYELTKEKDAYITTEVGQHQMWAAQHYKFSKPNRWMTSGGLGTMGYGLPAAVGVQVAHPNKLV

SEQ ID NO: 110760 - protein, 304 aa, Unknown
  Bacterial polypetide isolated from the Sargasso Sea
ARSSGKPGVLLVTSGPGATNAVTALTDAYMDSVPLVCISGQVPTHLIGTDAFQECDTTGITRPCTKHNWLVKDVNDLSRVMHLAFEVATTGRPGPVLVDIPKDVQFKKGKYKFIKNSLKKKLNGKTTHKISNKDLDEFIDLMKNSSKPIFYTGGGVINSGPDASKYLRELLSLTGFPITSTLQGLGAYPGDDPQFLGMLGMHGTFEANNAMHDCDLMINIGARFDDRITGKVDEFSPKSKKIHVDIDPSSIGKNIKVDLAVVSDVTELLKNLIKRFKEKNKNFLNSNKQKTSKWWEQMTNERKK

SEQ ID NO: 110761 - protein, 274 aa, Unknown
  Bacterial polypetide isolated from the Sargasso Sea
MAMHECDVMINIGARFDDRVTGRLDAFSPNSKKIHIDIDESNINKTINVDVPIIGDVKQVVEKMIEVWKEKKFKIDDEALKLWWDKINKWKEVDCLNYNNEGKQIKPQYAVQRLYELTKNTKTFITTEVGQHQMWAAQFYKFEEPNRWLTSGGLGTMGYGFPAAIGAQVGHPDALVVDIAGDASILMNIQEMSTAVQYRLPVKIFILNNEYMGMVRQWQELLHGGRYSESYTDSLPDFVKLAESYKAVGLRAKTTDELDDVISEMIETKNTVIA

SEQ ID NO: 110762 - protein, 180 aa, Unknown
  Bacterial polypetide isolated from the Sargasso Sea
MTKKITGSEIVLKALQEQGVEVVFGYPGGAVLPIYDSLFKQNSIRHILVRQEAGAIHAAEGYARSSGKIGVVLVTSGPGATNVVTGLTDAMMDSVPIVCITGQVPQHLIGTDAFQECDTTGITRPCTKHNYLVKDVNKLASTFHEAFEIAKDGRPGPVLIDVPKDVQFAEGNYTESKDNI

SEQ ID NO: 110763 - protein, 179 aa, Unknown
  Bacterial polypetide isolated from the Sargasso Sea
MKNNGAEIIIKTLVDLDVEIIFGYPGGAVLPIYDSIFKQNRIRHVLVRHEQAAVHMAEGYSRSTGKVGVVLVTSGPGATNAVTGLTDAFMDSIPILCLTGQVPTHLIGTDAFQEADTIGITASCTKHNYLVKDISKLEDTLHEAYYIAKSGRPGPVVVDLPKDVQNSKKTYNKRNNTKT

SEQ ID NO: 110764 - protein, 259 aa, Unknown
  Bacterial polypetide isolated from the Sargasso Sea
MTLKEINSFIDSNNIDFGGKDYSNWWGQINEWRKKECLHYEQGDEVIKPQHAISRLYELTKQRDTFVTTEVGQHQMWAAQYYKFSKPNRWITSGGLGTMGFGMPAAVGAQMANPDSLVIDIAGEASFLMNIQEIATAVQYKLPIKIFILNNEYMGMVRQWQELLHGSRYSESYVDALPDFKKLAESFNAVGVRAKNIAELDDTINEMISIDRPVIADIWVDKKENCFPMIPSGAAHHEMLLSKYDKENPENQEKGKVLV

SEQ ID NO: 110765 - protein, 264 aa, Unknown
  Bacterial polypetide isolated from the Sargasso Sea
SDVSELLKSLIKRFKEKNKNFLNSNRQKTSKWWEQIEKWREKKSLNFINSDKIIKPQHAVQRLYELTKNQDTFITTEVGQHQMWAAQHYKFNKPNRWMTSGGLGTMGYGLPAAIGVQIANPGKLVVDIAGEASVLMTMQEMSTAVQYRLPIKIFILNNEYMGMVRQWQELLHEKNYSESYTAALPDFVKLAESYGCIGIRAKTPDELDEKIKEMINIDKPVIFDCVVDKAENCFPMIPSGKPHNQMILGPEEEEEISDEGKILV

SEQ ID NO: 110766 - protein, 306 aa, Unknown
  Bacterial polypetide isolated from the Sargasso Sea
VKHKSYRPKLKANIDIIDEALQLISSAEKPVFYTGGGVINSGNAAVQLLREFVRLTGFPITSTLQGLGAFPGDDNQFIGMLGMHGTYEANMTMNQCDLMINIGARFDDRITGKVDEFSPNSKKIHIDIDPSSINKTVNVDVPIIGDVAHVLEDAIKLWKTKVYKTNKAEIKNWWNTISNWRKKDSLKFDQGNKTIKPQYAIQRLYELTKDQDTFVTTEVGQHQMWAAQHYKFSKPNRWITSGGLGTMGFGFPAALGVQVAYPDKLVIDIAGEASILMCIQEMSTAIQHKLPVKIFIINNQYMGMVR

SEQ ID NO: 110767 - protein, 288 aa, Unknown
  Bacterial polypetide isolated from the Sargasso Sea
SAKKPMIYSGGGVILGEASRELTKFARTLNFPITNTLMGLGAYPATDKQFVGMLGMHGTYEANMAMHNCDVLIAIGARFDDRVTGDLEKFCPYAKIIHIDVDPSSIAKNVPVDIPIVGDVKHVLKDLNEILKNTRDKLQENKKDLDSWWKQIDEWAKIDCLKYDRTSSVIKPQFVVEKLWELTKGDAYVTSDVGQHQMWAAQFYKFDKPRRWINSGGLGTMGFGLPAAMGVKLAFPNETVACITGEASLVMCIQELSTCLQYGTPVKIINLNNRYMGMVRQWQEFFYS

SEQ ID NO: 110768 - protein, 270 aa, Unknown
  Bacterial polypetide isolated from the Sargasso Sea
VKADIPIVGPVKTVLTDMLALLDEALGGKEAPNQDAIAAWNTQIEQWKDAHGFYRKPNYKQDPNGVIKPQEVLRVLEKVTGGDAYVCSDVGQHQMFAAQWYRFNKPRRWINSGGLGTMGFGLPAAMGCKLADYDADVVCVTGEGSIQMNIQELATCTQYGLPVKIINLNNEALGMVKQWQDMQYEGRYSHSTTYAESLPDFVKLAESYGHVGMVIEKHEDLEPMLAKAMAMKDKLVFVDIKVDPKEHVYPMQIAPTGAMDDMWLSRTERT

SEQ ID NO: 110769 - protein, 279 aa, Unknown
  Bacterial polypetide isolated from the Sargasso Sea
GMLGMHGSYEANNAMHDCDLMINIGARFDDRITGKIDEFSPKSKKVHIDIDPSSINKNVKVDLPIVGDVAEVITSTIKTIKKVKPNFAKSNKQKISKWWEKIQKWRSVNSFDFVNSSETIKPQYAIQRLYELTKNKDTYITTEVGQHQMWAAQHYKFDKPNRWMTSGGLGTMGYGLPAAVGVQVAHPNKLVIDIAGEASVLMTMQEMSTAVQYSLPIKIFILNNEYMGMVRQWQELLHDKNYSESYTAALPDFVKLAEAYGCLGIKATSPEELDDKIMK

SEQ ID NO: 110770 - protein, 314 aa, Unknown
  Bacterial polypetide isolated from the Sargasso Sea
NITELVKDINDLAEVMHKAFEVATTGRPGPVLVDIPKDIQFQKAKYKLYTKPKKLNGKSHDNFSQKNIDDLIELISKSRRPIFYTGGGVINSGAKASDLLRELVYATGFPITSTLQGLGCFPADDNQFLGMLGMHGTYEANNAMYSCDLMINVGARFDDRITGKIDEFSPKSKKVHIDIDPSSINKNVKVDLAIVGDIKSVLTTTLKTFKKSKKNFSKSNKHQISNWWEQIQKWRSKRSLDYIGSEETIKPQYAIERLYELTKDKDTYITTEVGQHQMWAAQHYKFNKPNRWMTSGGLGTMGYGLPAAVGVQIA

SEQ ID NO: 110771 - protein, 147 aa, Unknown
  Bacterial polypetide isolated from the Sargasso Sea
MSKLYSGAEIVFKCLEDQEVEFIFGYPGGAVLPIYDELKNFNFLKHILVRHEQGAGHAAEGYARSSGKPGVLLVTSGPGATNAVTALTDAYMDSIPLVCISGQVPTHLIGTDAFQECDTTGITRPCTKHNWLVKDVNNLEETIHKAF

SEQ ID NO: 110772 - protein, 273 aa, Unknown
  Bacterial polypetide isolated from the Sargasso Sea
EDCDFLIAVGARFDDRVAGDPEGFAPNAKKIAHFDIDISEINKVKSVDWYHVGNLKKDLNDLITLGKQIEFVSDFSEWHSHIEKLKEEYKLNYNKNSELIQPYEVIEEINKISRGEAIISTGVGQHQMWAAQYFDYKEPRLWLTSGSMGTMGFGLPAAIGAQFAKPNTLVIDIDGDASIRMNIGELETATTYDLPIKVLVLNNYGDGMVRQWQKLYYKGRMSASDKSLHRKDFIKTAEADGFEFSERLDNKNEIKSTVKKFIEFDGPAFLEVI

SEQ ID NO: 110773 - protein, 227 aa, Unknown
  Bacterial polypetide isolated from the Sargasso Sea
MSNDITGAEIVLKSLKEQEVEVVFGYPGGAVLPIYDTLFKQNSIKHVLVRQEGGAIHAAEGYARSTGKTGVVLVTSGPGATNVVTGLTDAMMDSVPIVCITGQVPQHLIGSDAFQECDTTGITRPCTKHNYLVKDVNKLSAVFHEAFTIAQNGRPGPVLIDVPKDVQFANGNYVEKNKIVIPSHRLFEPSPDFESKKIEDAVDIISKAKKPIFYIGGGCINSGPKAS

SEQ ID NO: 110774 - protein, 194 aa, Unknown
  Bacterial polypetide isolated from the Sargasso Sea
FITTEVGQHQMWAAQFYKFEKPNRWLTSGGLGTMGYGFPAAIGAQVANPDALVIDIAGDASILMNIQEMSTAVQYRLPVKIFILNNEYMGMVRQWQELLHGGRYSESYTDSLPDFVKLAESYKAVGLRAKKPEDLDNVIKEMIDTDKTVIADIWVSKEENCFPMIQSGSAHNEMVLSKDQKQDKDSAEKGKILV

SEQ ID NO: 110775 - protein, 226 aa, Unknown
  Bacterial polypetide isolated from the Sargasso Sea
MTGAQMVLKAFEDHQVDTIFGYPGGAVLPIYDELAKERDTNQPIRHYLVRHEQGASHSAEGYARSSGKVGVMLVTSGPGVTNAVTGLTDAMMDSIPIVCISGQVPTHLIGTDAFQECDAVGITRPCTKHNWLVKDINDLSRILHEAFYVASSGRPGPVLVDIPKDIQFQTGTYIGPETVKHKSYRPKLKANIDQIDDALKLIADAEKPIFYTGGGVINSGNAAVQY

SEQ ID NO: 110776 - protein, 261 aa, Unknown
  Bacterial polypetide isolated from the Sargasso Sea
PSSINKNVKVDIALVGDVKSVLEKLILVFKQKHPNFESSNKQKIAAWWSQIENWRKKNSLGFVNSKEIIKPQFAVQRLYELTKAQDTFITTEVGQHQMWAAQHYKFDKPNRWMTSGGLGTMGYGLPAAVGVQVANPDKLVIDIAGEASVLMTMQEMSTAVQYKLPIKIFILNNEYMGMVRQWQELLHEKNYSESYTAALPDFVKLAEAYGCVGIRANKPDELDGKISEMLSVNRPVIFDCVVDKAENCYPMIPSGKPHNQM

SEQ ID NO: 110777 - protein, 259 aa, Unknown
  Bacterial polypetide isolated from the Sargasso Sea
KATIKTISKKKLNFSKSNKQKISKWWEKIQKWRSIKSLDYINSEESIKPQYAIERLYELTKNKETFITTEVGQHQMWAAQHYKFNKPNRWMTSGGLGTMGYGLPAAVGVQVAHPNKLVIDIAGEASVLMTMQEMSTAVQYSLPIKIFILNNEYMGMVRQWQELLHDKNYSESYTAALPDFVKLAEAYGCVGIRAKTPEELDDKIIEMLNTDRPVIFDCLVDKEENCFPMIPSGKPHNQMLLGPKDQKNNKISGKGKTLV

SEQ ID NO: 110778 - protein, 227 aa, Unknown
  Bacterial polypetide isolated from the Sargasso Sea
MPKLLTGAEIVFKCLEDQKVEHIFGYPGGAVLPIYDELKNHPSIKHILVRHEQGAGHAAEGYARSSGKPGVVLVTSGPGATNVVTALTDAYMDSVPLVCISGQVPTHLIGTDAFQECDTTGITRPCTKHNWLVKDINDLSKVIHEAFRVATTGRPGPVLIDIPKDIQFAKTKYKKPNKEKSLNGKSHNKFSQDQIDELVKLLSKAKKPIIYSGGGVINSGPKASQAL

SEQ ID NO: 110779 - protein, 251 aa, Unknown
  Bacterial polypetide isolated from the Sargasso Sea
MGKLFSGAEIVFKVLEHHKVEHIFGYPGGAVLPIYDELKNHKTIKHILARHEQGAGHAAEGYARSSGKPGVMLVTSGPGATNAVTALTDAYMDSVPIVCISGQVPTHLIGTDAFQECDTTGITRPCTKHNWLVKDVNDLAKVMDLAFDVATSGRPGPVLVDIPKDIQFKKTKFFLRSKKNKKTNGKLNSKISNSNLDKIIQLMKKSSKPVFYTGGGVINSGPEASKLLRELVSLTGFPITSTLQGIGRLPR

SEQ ID NO: 110780 - protein, 148 aa, Unknown
  Bacterial polypetide isolated from the Sargasso Sea
MPKLYSGAEIVFKCLEDQNVSHIFGYPGGAVLPIYDELKNFNSIKHILVRHEQGAGHAAEGYARSTGKPGVLLVTSGPGATNAVTALTDAYMDSVPLVCITGQVPTHLIGTDAFQECDTTGITRPCTKHNWLVKDVNDLAEVMHKALK

SEQ ID NO: 110781 - protein, 317 aa, Unknown
  Bacterial polypetide isolated from the Sargasso Sea
AIQQGITRPCTKHNWLVKNVNDLSRVLHLAFEVATTGRPGPVLVDIPKDIQFKKGKYKFFKNTLKKKLNGKSTHKISNTDLDKFIDLIKKSSKPIFYTGGGVINSGPEASKNLRELVSLTGFPITSTLQGLGAYPGDDPQFLGMLGMHGTYEANNAMHDCDLMINIGARFDDRITGKVDEFSPGSKKIHVDIDPSSIGKNIKVDLAIVSDVTDLLKSLIKRFKEKNKNFLNSNKQKTSKWWEQIEKWREKKSLNYINSDKIIKPQYAVQRLYELTKNQDTFVTTEVGQHQMWAAQHYKFNKPNRWMTSGGLGTMGYG

SEQ ID NO: 110782 - protein, 253 aa, Unknown
  Bacterial polypetide isolated from the Sargasso Sea
NMTGSPVTMTLMGLGVVGSSDKNSLGMLGMHGMYEANMAMHECDVMINIGARFDDRVTGRLDAFSPNSKKIHIDIDESNINKTINVDVPIIGDVKQVVDKMISVWKDKKYKIDTESLKSWWEKINKWKKVDCLNYNNEGKQIKPQYAVQRLYELTKNIKTYVTTEVGQHQMWAAQFYKFEEPNRWLTSGGLGTMGYGFPAAIGAQVGNPDALVVDIAGDASILMNIQEMSTAIQYRLPVKIFILNNEYMGMVR

SEQ ID NO: 110783 - protein, 319 aa, Unknown
  Bacterial polypetide isolated from the Sargasso Sea
AEMLLAAKRPVMYAGGGVIMGGASAPLTELAQMLNLPVTNTLMGLGGYPGTDRQFIGMLGMHGSYTANLAMHHADVILAVGARFDDRVINGAAKFCPNAKIIHIDIDPASISKTIKADIPIVGPVDSVLTEMVAILKEIGETPNKDTVASWWKQIEEWRGSGRLFPYNEGDGSIIKPQTVIETLCDVTKGDAFITSDVGQHQMFAAQYYRFNKPNRWINSGGLGTMGFGFPAAMGIKLNFPDADVACVTGEGSIQMNIQELSTCLQYDLPVKIVNLNNGTLGMVRQWQDMQYNSRYSHSYMESLPDFVKLAEAYGHVGM

SEQ ID NO: 110784 - protein, 278 aa, Unknown
  Bacterial polypetide isolated from the Sargasso Sea
MHGTYEANNAMHDCDLMINIGARFDDRITGKIDEFSPKSKKVHIDIDPSSINKNVKVDLAIVGDVKTVLSSTLKSLKQKKSKFLKSNKQKTSKWWEKIQKWRSVRSLDYIGSEETIKPQYAIERLYELTKDKDSYITTEVGQHQMWAAQHYKFNKPNRWMTSGGLGTMGYGLPAAVGVQVAHPKKLVIDIAGEASVLMTIQEMSTAVQYNLPIKIFILNNQYMGMVRQWQELLHDKNYSESYTAALPDFVKLAEAYNCVGIRAKTPEELDDKIIEMLN

SEQ ID NO: 110785 - protein, 323 aa, Unknown
  Bacterial polypetide isolated from the Sargasso Sea
IPKDVQFASGTYEEKSKIIIPSHRLFEPSPDFEKNKIEEAVELISKAKKPIFYIGGGCINSGPKASKLVREFINIVGSPVTMTLMGLGVVGSSDKNSLGMLGMHGMYEANMAMHECDVMINIGARFDDRVTGRLDAFSPNSKKIHIDIDESNINKTINVDVPIIGDVKQVVEKMIAVWQDKKYKIDTVSLKLWWDKINKWKEVDCLNYNNEGKQIKPQYAVQRLYELTKNTKTFITTEVGQHQMWAAQFYKFEEPNRWLTSGGLGTMGYGFPAAIGAQVGHPDALVVDIAGDASILMNIQEMSTAVQYRLPVKIFILNNEYMG

SEQ ID NO: 110786 - protein, 257 aa, Unknown
  Bacterial polypetide isolated from the Sargasso Sea
MSKLYSGAEIVFKCLEDQEVEFIFGYPGGAVLPIYDELKNFNSVKHILVRHEQGAGHAAEGYARSSGKPGVLLVTSGPGATNAVTALTDAYMDSVPLVCISGQVPTHLIGTDAFQECDTTGITRPCTKHNWLVKDVKDLEKTIHKAFEVATTGRPGPVLVDIPKDVQFQKTNYTKFVKQKKLNGKVNNQFSQKDINELIKLMSKASKPIFYTGGGVINSGPNASELLRELVNTTGFPITSTLQGLGSYPGEDSRFLG

SEQ ID NO: 110787 - protein, 283 aa, Unknown
  Bacterial polypetide isolated from the Sargasso Sea
FTQLGFPITTTLQGLGSFPGDDNQFLGMLGMHGTYEANNAMYECDLMINVGARFDDRITGKIDEFSPKSKKVHIDIDPSSINKNVKVDLAIVGDVKSVITSTLKTLKKSKPNFIKSNKQKTSKWWEKIQKWRSKRSLDYIGSEETIKPQYAIERLYELTKDKDTFITTEVGQHQMWAAQHYKFNKPNRWMTSGGLGTMGYGLPAAVGVQIAHPQKLVIDIAGEASVLMTMQEMSTAVQYSLPIKIFILNNEYMGMVRQWQELLHDKNYSESYTAALPDFVQMA

SEQ ID NO: 110788 - protein, 198 aa, Unknown
  Bacterial polypetide isolated from the Sargasso Sea
NRKTFITTEVGQHQMWAAQFIKFEKPNRWLTSGGLGTMGYGFPAAIGAQVGNPDALVVDIAGDASILMNIQEMSTAIQYRLPVKIFILNNEYMGMVRQWQELLHGGRYSESYTDSLPDFVKLAESYKAVGLRAKTTDELDDVIKQMVESKDTVIADIWVTKEENCFPMIQSGSAHNEMLLSSDQKQDKKSAEKGKILV

SEQ ID NO: 110789 - protein, 240 aa, Unknown
  Bacterial polypetide isolated from the Sargasso Sea
AAINGLTKKIVEKKLKPNNIDEWWNNINEWRKKDSFRYKQGSEIIKPQYVIDRLYEITKGDAFITSDVGQHQMWAAQLYKFKKPKRWINSGGLGTMGFGLPSAMGTQFANPNSLVCCVTGEASIQMCIQELSTCLQYGLPIKIINLNNRYMGMVRQWQEFFYEKRYAMSYMDALPNFVKLAESFGHIGYKVEKPSDVDAAILEAIKQKDRLVFIDFITDQEENVFPMIATGAAHNKMILS

SEQ ID NO: 110790 - protein, 276 aa, Unknown
  Bacterial polypetide isolated from the Sargasso Sea
MHGTYEANNAMYSCDLMINVGARFDDRITGKIDEFSPKSKKVHIDIDPSSINKNVKVDLAIVGDIKSVLTSTLKTFKKSKNNFSKSNKHQISNWWEQIQKWRSKRSLDYIGSEETIKPQYAIERLYELTKDKDTYITTEVGQHQMWAAQHYKFNKPNRWMTSGGLGTMGYGLPAAVGVQIAHPQKLVIDIAGEASVLMTMQEMSTAVQYNLPIKIFILNNEYMGMVRQWQELLHDKNYSESYTAALPDFVKLAEAYGCVGIRAKTPEELDDKIIEM

SEQ ID NO: 110791 - protein, 299 aa, Unknown
  Bacterial polypetide isolated from the Sargasso Sea
QDQGVDVVFGYPGVAVLPLYDELFKTNKLRHILVRHEQAAVHAAEGYARSTGKIGVVLVTSGPGATNAVTGLTDALMDSIPIVCLTGQVPTHLIGTDAFQEADTTGITRACTKHNYLVKNSDELADVMHEAFYVAANGRPGPVVVDLPKDILFAEAPYFLPKDVRPCAYQPKMDGDTKKIEQAVELLANAERPIIYGGGGLINSGLTACKLLREFAELSGFPVTLTLMGLGAFPASNPNFLGMLGMHGTYEANLAMHHCDVMLNIGARFDDRVTGRIDAFSPNATKIHIDIDQSSLIRI

SEQ ID NO: 110792 - protein, 274 aa, Unknown
  Bacterial polypetide isolated from the Sargasso Sea
AKTKYKRPNKEKELNGKTHNKFSQDEINELANLLKKSKKPIIYSGGGVINSGPKASQALREFVEITGFPITSTLQGLGAYPGDDNQFLGMLGMHGTYEANNAMHDCDLLINIGARFDDRITGKIDEFSPNSKKIHIDIDPSSINKIIKVDLAIVGDVASVITKINKTITKSKNGHSKSNKSNIAKWWEQIEKWREKASLNFINSNESIKPQHAVQRLYELTKNKDTYVTTEVGQHQMWAAQHYKFNKPNRWMTSGGLGTMGYGLPAAVGVQIAH

SEQ ID NO: 110793 - protein, 263 aa, Unknown
  Bacterial polypetide isolated from the Sargasso Sea
GDVISVLTKIIKTWKDNNLKTNKSDLKLWWDKINNWKKIDCLHFSKNEKEIKPQYAVQRLYELTKDKKTFITTEVGQHQMWAAQFYKFEQPNRWLTSGGLGTMGYGFPAAIGAQVANPDALVIDIAGDASILMNIQEMSTAVQYRLPVKIFILNNEYMGMVRQWQELLHGGRYSESYTDSLPDFVKLAESYKAVGLRAKKPAELDNVINEMIKTDKTVIADIWVSKEENCFPMIQSGSAHNEMVLSKDQKQDKLSAEKGKILV

SEQ ID NO: 110794 - protein, 247 aa, Unknown
  Bacterial polypetide isolated from the Sargasso Sea
DQKVEHIFGYPGGAVLPIYDELKNHNSIKHILVRHEQGAGHAAEGYARSSGKPGVVLVTSGPGATNVVTALTDAYMDSVPLVCISGQVPTHLIGTDAFQECDTTGITRPCTKHNWLVKDINDLSEIMHEAFKVATTGRPGPVLVDIPKDIQFAKTKYKKIKKEKKLKGKSKNGFSQKHIDQLIDLLKNAKKPIIYSGGGVINSGPKASDALREFVELTGFPITSTLQGLGAYPGDDNQFLGMLGMHG

SEQ ID NO: 110795 - protein, 284 aa, Unknown
  Bacterial polypetide isolated from the Sargasso Sea
MMPGAELLLKALEDEGVEVVFGYPGGAVLPIYDALFKNNKIKHILVRHEQAAVHAAEGYARSTGKTGVVLVTSGPGATNAVTGLTDALMDSVPVVCLTGQVPTHLIGNDAFQEADTTGITRACTKHNYLVKEGGKLQSTVIEAFHVAATGRPGPVLIDLPKDILMKEAPYQKEAIRASATARYQPATEPDPAAICAAVDMMIRAERPVIYGGGGLINSGPRASELLTKLVHMTGWPTTLTLMGLGALSAADKHFLGMLGMHGTYEANLAMHGCDLMLNLGARFE

SEQ ID NO: 110796 - protein, 286 aa, Unknown
  Bacterial polypetide isolated from the Sargasso Sea
KIHVDIDPSSIGKNIKVDLAVVSDVSELLKSLIKRFKEKNKNFLSSNKQRTSKWWEQIEKWREKKSLNFINSDKIIKPQHAVQRLYELTKNQDTYITTEVGQHQMWAAQHYKFNKPNRWMTSGGLGTMGYGLPAAIGVQIANPGKLVVDIAGEASVLMTMQEMSTAVQYRLPIKIFILNNEYMGMVRQWQELLHEKNYSESYTAALPDFVKLAESYGCVGIRAKTPSELDEKIKEMITTDKPVIFDCVVDKAENCFPMIPSGKPHNQMILGPEEEEEISDEGKILV

SEQ ID NO: 110797 - protein, 165 aa, Unknown
  Bacterial polypetide isolated from the Sargasso Sea
MRALREEGVKFIFGYPGGAALHIYDSVFRQKSIEHILVRHEQGATHAADGYARATGKPGVVLVTSGPGATNAITGIATAFMDSIPMIVISGQVQSHLIGTDSFQETDMIGISRPIVKHSYIIQDVRDIPKVVQEAFHIATSGRPGPVVIDIPKDMTDPSKKFKYQ

SEQ ID NO: 110798 - protein, 81 aa, Unknown
  Bacterial polypetide isolated from the Sargasso Sea
MSKLFTGAEIVFKCLEDQDVEFIFGYPGGAVLPIYDELKNHSSIKHILVRHEQGAGHAAEGYARSSGKPGVVLVTSGPGAT

SEQ ID NO: 110799 - protein, 161 aa, Unknown
  Bacterial polypetide isolated from the Sargasso Sea
MPKLLTGAEIVFKCLEDQKVEHIFGYPGGAVLPIYDELKNHPSIKHILVRHEQGAGHAAEGYARSSGKPGVVLVTSGPGATNVVTALTDAYMDSVPLVCISGQVPTHLIGTDAFQECDTTGITRPCTKHNWLVKDINDLSKVIHEAFRVATTGRPGPVLID

SEQ ID NO: 110800 - protein, 281 aa, Unknown
  Bacterial polypetide isolated from the Sargasso Sea
PAYDPLYDSPIRHILARHEQGAGHMAEGYAQATGELGVVIATSGPGATNLITPLANALMDSTPLLAITGQVASTAIGNDAFQEAYTVGLSMAATKHNYLITDASEIPQVLKEAKFIATTGRPGPVLVDIPKDILNQVAAWVEPVDLDLPGYKPTTEPNPKMVQQASSLIKKSKKPILYVGGGIIHSKANNELFELATKFNIPVVTTLMGRGAFPDGHELCLEMPGMHGNYTATTSIQNADLLIAIGVRFDDRVTANPSFFAQNAKVIHADIDPAEIGKVRD

SEQ ID NO: 110801 - protein, 254 aa, Unknown
  Bacterial polypetide isolated from the Sargasso Sea
MLKIWKNKNYKIDEKALDAWWQKICKWKEIDCLSYVSDTKQIKPQYAVQRLYELTKNTKTFVTTEVGQHQMWAAQYYKFDEPNRWLTSGGLGTMGYGFPAAIGAQVGNPDALVIDIAGDASILMNIQEMSTAIQYRLPVKIFILNNEYMGMVRQWQELLHGGRYSESYTDSLPDFVKLAESYKAEGLRAKTADELDSVIIQMIESKNTVIADIWVTKEENCFPMIQSGSAHNEMLLSKDQKQDKKSAEKGKILV

SEQ ID NO: 110802 - protein, 84 aa, Unknown
  Bacterial polypetide isolated from the Sargasso Sea
MSKLYSGAEIVFKCLEDQNVKFIFGYPGGAVLPIYDELKNFNFLKHILVRHEQGAGHAAEGYARSTGKPGVLLVTSGPGATNAV

SEQ ID NO: 110803 - protein, 277 aa, Unknown
  Bacterial polypetide isolated from the Sargasso Sea
NKNVKVDLPIVGDVQDVITSTIKTIKKTKPNFAKSNKQKISKWWEQIQKWREKKSLDFINSDETIKPQYAVQRLYELTKGKDTFITTEVGQHQMWAAQHYKFDKPNRWMTSGGLGTMGYGLPAAVGVQIAHPTKLVIDIAGEASVLMTMQEMSTAVQYNLPIKIFILNNEYMGMVRQWQELLHDKNYSESYTAALPDFVKLAEAYGCVGIRATNPNELDDKIIEMLNTDRPVIFDCLVDKQENCFPMIPSGKPHNQMLLGPKDQEQNKITGKGKTLV

SEQ ID NO: 110804 - protein, 315 aa, Unknown
  Bacterial polypetide isolated from the Sargasso Sea
KHNWLVKDIKDLSKILHEAFIVATTGRPGPVLVDIPKDIQFAKTNYFKPKKQKKNKEKVHNKFSHNEIDELISLISRAKKPIIYTGGGVINSGPKASEALREFVRLIGFPITSTLQGLGAFPGDDNQFIGMLGMHGTYEANNAMHDCDLLINIGARFDDRITGKIDEFSPKSKKVHIDIDPSSINKIIKVDLAIVGDVNEVLKAAIKKINKKQNGFKISNKQNTSRWWEQIQKWRMKDSLGFINSEKMIKPQHAVQRLYELTKNQDTFITTEVGQHQMWAAQHYKFNKPNRWMTSGGLGTMGYGLPAAVGVQIAH

SEQ ID NO: 110805 - protein, 281 aa, Unknown
  Bacterial polypetide isolated from the Sargasso Sea
DPSSIGKNIKVDLAIVSDVGSFLKALNKRIKEKHKDFLNSNKQNISKWWKDIDKWRQKKSLSFKNSKEVIKPQYAVQRLYELSKNKDTFITTEVGQHQMWAAQHYKFNKPNRWMTSGGLGTMGYGLPAALGVQIAHPDKLVVDIAGEASVLMTMQEMSTAVQYKLPIKIFILNNQYMGMVRQWQELLHEKNYSESYTAALPDFVKLAEAYGCVGIQATKPDELDEKINEMINTKEPVIFDCRVDPTENCYPMIPSGKPHNQMLLGPEDEKEEVTDEGKTLV

SEQ ID NO: 110806 - protein, 226 aa, Unknown
  Bacterial polypetide isolated from the Sargasso Sea
FLGMLGMHGTYEANMAMQHCDVLIAIGARFDDRVIGDPAHFASRPRKIIHIDIDPSSISKRVKVDIPIVGDVKEVLKELIEQLQTAEHGPDTEALAQWWKDIEGWRAKDCLKYDRESEIIKPQYVVEKAWELTDGNAFVCSDVGQHQMWAAQFYRFNKPRRWINSGGLGTMGFGLPAAMGVKMAHPDDDVLCITGEGSIQMCIQELSTCLQYDTPVKIISLNNRYL

SEQ ID NO: 110807 - protein, 326 aa, Unknown
  Bacterial polypetide isolated from the Sargasso Sea
DAYMDSIPLVCISGQVPTHLIGTDAFQECDTTGITRPCTKHNWLVKDINDLASTIHKAFEVATTGRPGPVLVDIPKDIQFQKTKYKKPKKENKLNGKSHNHFNQNTIDQLIDLMSKSSKPIFYTGGGVINSGPKASELLRELVYATGFPITSTLQGLGSFPGDDNQFLGMLGMHGTYEANNAMHDCDLMINIGARFDDRITGKIDEFSPNSKKVHIDIDPSSINKNVKVDLAIVGDVKTVLSSTLKSLKQKKSKFLKSNKQKTSKWWEKIQKWRSVRSLDYIGSEETIKPQYAIERLYELTKDKDSYITTEVGQHQMWAAQHYKLT

SEQ ID NO: 110808 - protein, 295 aa, Unknown
  Bacterial polypetide isolated from the Sargasso Sea
ISLYGKLMTGAEIVFKVLEDRGVEHIFGYPGGAVLPIYDELKNHKKIKHILVRHEQGAGHAAEGYARSSGKPGVILVTSGPGATNAVTALTDAYMDSIPLVCITGQVPTHLIGTDAFQECDTTGITRPCTKHNWLVKDIKKLSSIMHKAFEVATTGRPGPVLVDIPKDIQFAKGKYIKPKELKSNKHLNIKFNGQDKDIEAAVELIKKSSKPILYTGGGVINSGPKATEMLREFVSLTGFPITSTLQGLGAYPGNDQQFLGMLGMHGTYEANNAMHDCDLMINVGARFDDRITGK

SEQ ID NO: 110809 - protein, 262 aa, Unknown
  Bacterial polypetide isolated from the Sargasso Sea
MPKLYSGAEIVFKCLEDQKVSHLFGYPGGAVLPIYDELKNHPSIKHILVRHEQGAGHAAEGYARSTGKPGVVLVTSGPGATNVVTALTDAYMDSVPIVCISGQVPTHLIGTDAFQECDTTGITRPCTKHNWLVKKIEDLPKIMHNAFKVATSGRPGPVLVDIPKDIQFAKTNYKNFNTKVLKQNGKTHRSFSSKEINKLIELMSKSKKPVFYTGGGVVNSGPEASNLLRELVSMTGFPITSTLQGIGCFPGDDNQFLGHVGN

SEQ ID NO: 110810 - protein, 274 aa, Unknown
  Bacterial polypetide isolated from the Sargasso Sea
AVLPIYDVIFNQEKLRHILVRHEQGAVHAAEGYARSTGKVGVVLVTSGPGATNAVTGLTDALMDSIPLVCFTGQVATHLIGNDAFQEADTTGITRPCTKHNYLVKDINNLNSIIHEAFYVAKSGRPGPVVIDLPKDIQLQQIDYESETPSIQTSYNPRTEGDQVAIESAAKLISEARNPVFYTGGGVINSGPVASNLLIDLVKYTGFPITSTLMGLGAYPGSDSQFLGMLGMHGTYEANMAMHQADLLIAVGSRFDDRITGRLDAFSPDSKKYI

SEQ ID NO: 110811 - protein, 121 aa, Unknown
  Bacterial polypetide isolated from the Sargasso Sea
MKLAGNDILIQSLIEEGVEYIFGYPGGAALHIYDSIFKQKEMEHILVRHEQGATHAADGYARATGKPGVVLVTSGPGATNAITGIATAFMDSIPMIVISGQVAKHLIGTDAFQETDMIGIS

SEQ ID NO: 110812 - protein, 321 aa, Unknown
  Bacterial polypetide isolated from the Sargasso Sea
QETDMIGIFRPMFKHSFTVDHQSNIPRIVKEAFYVATSGRQGPVVIDVPKDLTNPDDLFDFNYPDEANIRSYNPPIKPEENQIDRVIEALKNSKRPVIYAGGGTIASNASNELREFNSYIKAPVTNTLMGLGVYPGTDKYFLGMLGMHGTYQANMAMHNADLILAVGARFDDRITNTPEKFAPRAQIVHFDVDHSSVSKIIEADIAVFGQVKDSLKSINEKLKLESSYFNKDRFSDWHNQIANWKDAHGLNHDLYKNIDDKSPILPQAAVQQIYQTSEGRAFVTSDVGQHQMFAAQYYHFDEPRKWINSGGLGTMGFGLPS

SEQ ID NO: 110813 - protein, 220 aa, Unknown
  Bacterial polypetide isolated from the Sargasso Sea
MKKSYPLSYNQEEKGPLKVPYVLEELQKMSEEDSIVVSGVGQHQMWISLHWKFTSPNTWLNSGGLGTMGYSLPAAIGAKVAFPDKQVLALDGDGCFQMTCQELITASTENIPLKIVVFNNGNHGMVRQWQKIFYDHRFSASELTHHTPDYVALAEAMGAVGLRMVEKSDVNRVFEEMFKVNDRPVLVDCVVDPDDMVFPMVPAGGSNDVVLLNEDDLKNI

SEQ ID NO: 110814 - protein, 316 aa, Unknown
  Bacterial polypetide isolated from the Sargasso Sea
EFIIKTLADLNVEVIFGYPGGAVLPIYDAIFKQNRIRHVLVRHEQAAVHMAEGYARSTGKVGVILVTSGPGATNAVTGLTDALMDSVPLLCLTGQVPTHLIGTDAFQEADTIGITSSCTKHNYLVKDINDLENTIAEGFYVAKSGRPGPVVIDLPKDVQNSITNYKGIKVKSMASYKPAKKAKINNIKEAIDILIKAKKPVIYSGGGVINSGQKASSTLTKLVDYLNIPITQTLMGLGAVSAKNKNFIGMLGMHGTYEANMAMHDCDVMLCVGARFDDRITGNLKYFSPNSKKIHIDIDPSSINKNVKVDIALVGD

SEQ ID NO: 110815 - protein, 188 aa, Unknown
  Bacterial polypetide isolated from the Sargasso Sea
MSKLYSGAEIVFKCLEDQGVEFIFGYPGGAVLPIYDELKNFNFLKHILVRHEQGAGHAAEGYARSTGKPGVLLVTSGPGATNAVTALTDAYMDSVPLVCISGQVPTHLIGTDAFQECDTTGITRPCTKHNWLVKDVKDLEETIHKAFEVATTGRPGPVLVDIPKDVQFQKTKYIKHKKIKKLNGKTKS

SEQ ID NO: 110816 - protein, 241 aa, Unknown
  Bacterial polypetide isolated from the Sargasso Sea
RHEQGGTHMADGYARATGKPGVVLVTSGPGATNTVTGLLTAQMDSVPMVVLTGQTITPNLGKDAFQEADVFGVTMPVVKHSYLVRNVNDLPRVMNEAFHLATSGRPGPVLVDLPKDVVSAECEADFTDEFHLPGYAPPARGLTEDLEKAAELISSSKKPLLYVGAGAVIAQASKQVIGLAEKLQAPVTTTLLGKGAFPETHPLSVGMLGMHGTAYANKTVVDCDLIMAIGARWDDRITGKV

SEQ ID NO: 110817 - protein, 298 aa, Unknown
  Bacterial polypetide isolated from the Sargasso Sea
MHDCDLMINVGARFDDRITGKLDEFSPKSKKIHIDIDPSSINKNVKVDLPIVGDVADIINSTLNTIKKIKPSFMKSNKQKISKWWEKIAKWRSVNSLNFENSTETIKPQYAVQRLYELTKDKDTYITTEVGQHQMWAAQHYKFNKPNRWMTSGGLGTMGYGLPAAVGVQVAHPNKLVIDIAGEASVLMTMQEMSTAVQYSLPIKIFILNNEYMGMVRQWQELLHDKNYSESYTAALPDFVKLAEAYGCVGIRATTPEELDDKIIEMLNTDRPVIFDCRVDKIENCFPMIPSGKAHNQM

SEQ ID NO: 110818 - protein, 268 aa, Unknown
  Bacterial polypetide isolated from the Sargasso Sea
VIHIDIDPAEVNKNRRVDVAIVSDVSKAVQKINDKSLNNKFACQTKNWLEKIDFWKNKHPLYEPPKEGEIYPQEVLLKVREISPEAYVTTDVGQHQMWAAQYLRNSPRKWISSAGLGTMGFGLPAAIGVKAALPNSDVICIAGDASVLMNIQELGTLSQYGLKVKLIIINNRWQGMVRQWQESFYNERYSSSDMSCGEPDFVKLAESFGIKGYLISDRKQLHNELQHALDYDGPALINILVRRGENCYPMVPPGKSNAQMVGYVNCED

SEQ ID NO: 110819 - protein, 286 aa, Unknown
  Bacterial polypetide isolated from the Sargasso Sea
MVSEFVDLIGSPITMTLMGLGVVASSNKNSLGMLGMHGMYEANMAMHECDVMINIGARFDDRVTGRLDAFSPNSKKIHIDIDASNINKTISVDYPIVGDVKQIVEKMIGIWKKNNYKLDQQSLNQWWEKINKWKKVDCLKYNNNNEQIKPQYAVQRLYELTKNTKTFITTEVGQHQMWAAQYYKFEEPNRWLTSGGLGTMGYGFPAAIGAQIGNPDSLVVDIAGDASILMNIQEMSTAIQYRLPVKIFILNNEYMGMVRQWQELLHGGRYSESYTDSLPDFVKLAE

SEQ ID NO: 110820 - protein, 245 aa, Unknown
  Bacterial polypetide isolated from the Sargasso Sea
AMHECDVMINIGARFDDRVTGRLDAFSPNSKKIHIDIDESNINKTINVDVPIIGDVKQVVEKMITVWEEKKFQIDDKALKLWWDKINKWKQVDCLNYNNEGKQIKPQYAVQRLYELTKNTKTFITTEVGQHQMWAAQFYKFEEPNRWLTSGGLGTMGYGFPAAIGAQVGHPDALVIDIAGDASILMNIQEMSTAVQYRLPVKIFILNNEYMGMVRQWQELLHGGRYSESYNDSLPDFVKLAESYK

SEQ ID NO: 110821 - protein, 308 aa, Unknown
  Bacterial polypetide isolated from the Sargasso Sea
AEIVFKALEDQKVEYIFGYPGGAVLPIYDELKNHKSIKHILARHEQGAGHAAEGYARSSGKPGVLLVTSGPGATNAVTALTDAYMDSVPLVCISGQVPTHLIGTDAFQECDTTGITRPCTKHNWLVKDVNDLSRVLHLAFEVATTGRPGPVLVDIPKDIQFKKGKYKFIKNSLKKKLNGKAIHKLSNKELDKFIDLMKKSSKPIFYTGGGVINSGPDASKYLRELVSLTGFPITSTLQGLGAYPGDDPQFLGMLGMHGTFEANNAMHDCDLMINIGARFDDRITGKVDEFSPKSKKIHVDIDPSSIGK

SEQ ID NO: 110822 - protein, 286 aa, Unknown
  Bacterial polypetide isolated from the Sargasso Sea
AQNGRPGPVLIDIPKDVQFAKGKYVEKNKIVIPSHRLFEPSPNFETKKIEDAVEIISKSKKPIFYIGGGCINSGPVASKLVRKFINLVGSPVTMTLMGLGVVASSDKNSLGMLGMHGMYEANMAMHECDVMINIGARFDDRVTGRLDAFSPNSKKIHVDIDASNINKTINVDVPIIGDVKQVVEQMISVWENKKYAIDKLALADWWQKINKWKEVNCLSYNNDSKQIKPQYAVQRLYELTKNTKTFVTTEVGQHQMWAAQYYKFEEPNRWLTSGGLGTMGYGFQQL

SEQ ID NO: 110823 - protein, 229 aa, Unknown
  Bacterial polypetide isolated from the Sargasso Sea
KWKDVDCLNYNNEGKQIIPQYAVQRLYELTKNTKTFITTEVGQHQMWAAQFYKFEEPNRWLTSGGLGTMGYGFPAAIGAQVGHPDALVVDIAGDASILMNIQEMSTAVQYRLPVKIFILNNEYMGMVRQWQELLHGGRYSESYTDSLPDFVKLAESYKAVGLRAKTTDDLDNVINQMIETKNTVIADIWVTKEENCFPMIQSGSAHNEMMLSKDQKQDKKSAEKGKILV

SEQ ID NO: 110824 - protein, 210 aa, Unknown
  Bacterial polypetide isolated from the Sargasso Sea
MSKLYSGAEILFKCLEDQDVEFIFGYPGGAVLPIYDELKNFNFLKHILVRHEQGAGHAAEGYARSSGKPGVLLVTSGPGATNAVTALTDAYMDSVPLVCISGQVPTHLIGTDAFQECDTTGITRPCTKHNWLVKDVKDLEKTIHKAFEVATTGRPGPVLVDIPKDVQFQKTNYTKFKKQKKTNGKVHNHFSQKDIDKLIELMSKASKPNF

SEQ ID NO: 110825 - protein, 280 aa, Unknown
  Bacterial polypetide isolated from the Sargasso Sea
VSEILKAKKPVIYAGGGAINSNASKELFELNELLNFPVTNTLMGLGVYPAKNKRFMGMLGMHGTYQSNMAMHNADLIIAIGARFDDRITNTPDLFAPNAKIIHFDVDQSSVSKIIEANIAVFGQVKNSLIELNKQLKDKIDSIDSTLIQPWLDQIDEWTSLHGLNHELYKENSDEKKIIPQSVVQHVYQITDGNAFVTSDVGQHQMFAAQYYHFNEPRKWINSGGLGTMGFGLPAAMGVKLAFPEEEVVCITGEGSIQMCIQELSTCSQYDLPIKIININ

SEQ ID NO: 110826 - protein, 274 aa, Unknown
  Bacterial polypetide isolated from the Sargasso Sea
DINDLSEIMHEAFKVATTGRPGPVLVDIPKDIQFAKTKYKKPKKEKKLYGKSNNKFSQKQIDQLIDLLKKAKKPVIYSGGGVINSGPKASDALREFVELTGFPITSTLQGLGAYPGDDNQFLGMLGMHGTYEANNAMHDCDLLINIGARFDDRITGKIDEFSPNSKKIHIDIDPSSINKIIKVDLAIVGDVTKVIGKINKTILKKKNGHSKSNKSNIAKWWEQIQKWREKESLNFVNSNVSIKPQHAVQRLYELTKDKDTYVTTEVGQHQMWAA

SEQ ID NO: 110827 - protein, 261 aa, Unknown
  Bacterial polypetide isolated from the Sargasso Sea
MQGLGCFPADDNQFLGMLGMHGTYEANNAMYSCDLMINVGARFDDRITGKIDEFSPKSKKVHIDIDPSSINKNVKVDLAIVGDIKSVLTTTLKTFKKSKKNFSKSNKSQISDWWEQIQKWRSKRSLEYIGSEETIKPQYAIERLYELTKDKDTYITTEVGQHQMWAAQHYKFNKPNRWMTSGGLGTMGYGLPAAVGVQIAHPKKLVIDIAGEASVLMTMQEMSTAVQYNLPIKIFILNNEYMGMVRQWQELLHDKNYQKVF

SEQ ID NO: 110828 - protein, 127 aa, Unknown
  Bacterial polypetide isolated from the Sargasso Sea
MSKLYSGAEILFKCLEDQGVDHIFGYPGGAVLPIYDELKNHKSIKHILVRHEQGAGHAAEGYARSSGKPGVVLVTSGPGATNAVTALTDAYMDSVPLVCISGQVPTHLIGTDAFQECDTTGITRPMY

SEQ ID NO: 110829 - protein, 310 aa, Unknown
  Bacterial polypetide isolated from the Sargasso Sea
KLNIFFGYPGGAVLPIYDELKNHKSIKHILARHEQGAGHAAEGYARSSGKPGVLLVTSGPGATNAVTALTDAYMDSIPVVCISGQVPTHLIGTDAFQECDTTGITRPCTKHNWLVKDVNDLAEIMNQAFKIATTGRPGPVLVDIPKDIQFNKGIYKVRKNKLEKKLNGTLSNKINLKDVDNFIEMIKKSSKPIFYTGGGVINSGPKASELLRDLVSLTGFPITSTLQGLGAYPGDDPQFLGMLGMHGTYEANNAMHDCDLMINIGARFDDRITGKIDEFSPKSKKIHIDIDPSSIGKNVKVDLAITSDVT

SEQ ID NO: 110830 - protein, 235 aa, Unknown
  Bacterial polypetide isolated from the Sargasso Sea
MPKLLTGAEIVFKCLEDQKVEHIFGYPGGAVLPIYDELKNHPSIKHILVRHEQGAGHAAEGYARSSGKPGVVLVTSGPGATNVVTALTDAYMDSVPLVCISGQVPTHLIGTDAFQECDTTGITRPCTKHNWLVKNINDLSKVIHEAFRVATTGRPGPVLIDIPKDIQFAKTKYKKPNKEKKLNGKKHNKFSQDQIDELVKLLSKAKKPIIYSGGGVINSGPKASQALRDFVELTG

SEQ ID NO: 110831 - protein, 300 aa, Unknown
  Bacterial polypetide isolated from the Sargasso Sea
SCRVLHLAFEVATTGRPGPVLVDIPKDIQFKKGKYNFNKSTLKKKLNGRATNKVSNSELDKFIDLLKKSSKPIFYTGGGVINSGPQASKYLRELVSLTGFPITSTLQGLGAYPGDDPQFLGMLGMHGTFEANNAMHDCDLMINIGARFDDRITGKVDEFSPGSKKIHIDIDPSSIGKNIKVDLAIVSDVSEFLKSLIKRFKEKNKNFLNSNKQKTSKWWSTIEKWREKKSLNFINSDKLIKPQHAVQRLYELTKDKDTFITTEVGQHQMWAAQHYKFSQPNRWMTSGGLGTMGYGLPAAI

SEQ ID NO: 110832 - protein, 196 aa, Unknown
  Bacterial polypetide isolated from the Sargasso Sea
MKIAGNDILIQSLINEGVEYIFGYPGGAALHIYDSIFNQKEMQHILVRHEQGATHAADGYARATGKPGVVLVTSGPGATNAITGIATAFMDSIPMVIISGQVQSHLIGTDAFQETDMIGVSRPIVKHSFTVDKQENIANIVAEAFHIATSGRQGPVLIDVPKDLTNPVDLFDFVYPDKVHIRSYNPPTKPENHQVS

SEQ ID NO: 110833 - protein, 307 aa, Unknown
  Bacterial polypetide isolated from the Sargasso Sea
YIAQNGRPGPVLIDIPKDVGLEEFDSYTPITQKNIVNNKGYRFKFKTNRFQIRQTLNLIKQATQPLLYVGGGAITSNAEKELKEFAELFQIPITTTLMGKGCFGETHNLALGMLGMHGTAYANFSVSECDLLIAIGARFDDRVTGKLEDFACNAQVIHIDIDPAEISKNRIPQIALVGDVKLILQEILKEQISDLNLELDQTIPWRKRINRWKQTYPLIIPSNQISLSPQEVINKISNLAPNAFFTTDVGQHQMWSAQFVKCNPRQWASSAGLGTMGYGLPAAIGVQIAHPENQVICISGDSSFQMN

SEQ ID NO: 110834 - protein, 280 aa, Unknown
  Bacterial polypetide isolated from the Sargasso Sea
PITSTLQGLGSYPADDNQFLGMLGMHGTYEANNAMYECDLMINIGARFDDRITGKIDEFSPKSKKIHIDIDPSSINKNVKVDLAVVGDVKTVVSFIIKTLKKKKPKFIKSNKQQISKWWEKIQKWRSIRSLDYINSEETIKPQYAIERLYELTKDKDAYITTEVGQHQMWAAQHYKFNKPNRWMTSGGLGTMGYGLPAAVGVQVAHPNKLVIDIAGEASVLMTMQEMSTAVQYSLPIKIFILNNEYMGMVRQWQELLHDKNYSESYTAALPDFVKLAEAY

SEQ ID NO: 110835 - protein, 297 aa, Unknown
  Bacterial polypetide isolated from the Sargasso Sea
GRPGSVVPPGFRQPLPPEDDAIHAALGLIRDAQRPLLYVGGGAISAAAHDSLKVLADRFQLPVTTTLMGKGAFDENDPLSVGMLGMHGTAYANFAVTECDLLIAVGARFDDRVTGKLDTFAPRARVVHFEIDPAEVGKNRQAEVAVLGDLGLSLARLVELSLQHPAEPRTTAWLARIASWKERYPLTIPPAEGEIYPQEVLLKVRDLAPQAIVTTDVGQHQMWAAQYLRNGPRGWISSAGLGTMGFGMPAAMGAQVACPDQQVICIAGDASILMNIQELGTLAAYGLPVKVVIVNNH

SEQ ID NO: 110836 - protein, 218 aa, Unknown
  Bacterial polypetide isolated from the Sargasso Sea
MDKSNKSGAEALIHSLHLEGVELMFGYPGGAALHIYDAIFNQNYVDHILVRHEQGAVHAADGYARATGKPGVALVTSGPGATNAITGLATAYMDSTPIVVISGQVKSGLIGTDSFQETDMIGVSRPIVKHSFLVQSAEDIPEIVKKAFHIATTGRPGPVVIDIPKDFTDPEYKFEFNYPSEVNMRSYNPPKKGDTSRIKEAVDLIEQSKKPVIYSGGG

SEQ ID NO: 110837 - protein, 96 aa, Unknown
  Bacterial polypetide isolated from the Sargasso Sea
MPKLISGAEIVFKALEDQKVEYIFGYPGGAVLPIYDELKNHKSIKHILARHEQGAGHAAEGYARSSGKPGVLLVTSGPGATNAVTALTDAYMDSIP

SEQ ID NO: 110838 - protein, 307 aa, Unknown
  Bacterial polypetide isolated from the Sargasso Sea
AIDILIKAKKPVIYSGGGVINSGQKASSTLTKLVDYLNIPITQTLMGLGAVSAKNKNFIGMLGMHGTYEANMAMHDCDVMLCVGARFDDRITGNLKYFSPNSKKIHIDIDPSSINKNVKVDIALVGDCYFVLDMMLKELKINKSKLNIKSLDKWWNTINKWKKKDCLSFTDSDKIIKPQKALKVLNEALKSKDAFITTEVGQHQMWAAQYLDFYKPNRWMTSGGLGTMGYGFPAAIGVQVAHPKKPVICVAGEASFLMNMQELSTLRQLNIPVKIFILNNEYMGMVRQWQQFFHGGRYAESYTDSLP

SEQ ID NO: 110839 - protein, 152 aa, Unknown
  Bacterial polypetide isolated from the Sargasso Sea
MLCTGAEIVLKALKDLDVEFIFGYPGGAILPIYDEIFKQNRIRHILVRHEQGAVHMAEGYARSTGKTGVVLVTSGPGATNAVTGLTDALMDSIPIFCITGQVPTHLIGTDAFQEADTVGITRSCTKHNYLVKDVNDIQEVITEGFRIVLAVD

SEQ ID NO: 110840 - protein, 241 aa, Unknown
  Bacterial polypetide isolated from the Sargasso Sea
MGKLFSGAEIVFKVLEHHKVEHIFGYPGGAVLPIYDELKNHKTIKHILARHEQGAGHAAEGYARSSGKPGVMLVTSGPGATNAVTALTDAYMDSVPIVCISGQVPTHLIGTDAFQECDTTGITRPCTKHNWLVKDVKDLADIMDRAFEIAMTGRPGPVLVDIPKDIQFKKTEFFIKNKKKKKTNGKLNGKASNTEIDKVINMMKKSSRPVFYTGGGVINSGPEASKLLRELVSLTGFPITS

SEQ ID NO: 110841 - protein, 174 aa, Unknown
  Bacterial polypetide isolated from the Sargasso Sea
MSKLYSGAEIVFKCLEDQNVNHIFGYPGGAVLPIYDELKNFNSIKHILVRHEQGAGHAAEGYARSSGKPGVLLVTSGPGATNAVTALTDAYMDSVPLVCISGQVPTHLIGTDAFQECDTTGITRPCTKHNWLVKDVNDLARIIHKAFEVATTGRPGPVLVDIPKDIQFQKTTYK

SEQ ID NO: 110842 - protein, 216 aa, Unknown
  Bacterial polypetide isolated from the Sargasso Sea
MSKLSTGSEIVFKCLEDQGVEFIFGYPGGAVLPIYDELKHHKSIKHILVRHEQGAGHAAEGYARSSGKPGVVLVTSGPGATNVVTALTDAYMDSVPLVCISGQVPTHLIGTDAFQECDTTGITRPCTKHNWLVKDVKDLSKTIHKAFEVATTGRPGPVLVDIPKDIQFQKAVYSKFKKIKKLNGKSHNNFGQKEIENLIELMSKSKKPIFYTGGGV

SEQ ID NO: 110843 - protein, 185 aa, Unknown
  Bacterial polypetide isolated from the Sargasso Sea
MSKLYSGAEIVFKCLEDQGVKNIFGYPGGAVLPIYDELKNHQTIKHILVRHEQGAGHAAEGYARSTGKPGVLLVTSGPGATNAVTALTDAYMDSVPLVCITGQVPTHLIGTDAFQECDTTGITRPCTKHNWLVKNIHDLAKTIHKAFEVATSGRPGPVLVDIPKDIQFHKSTYQKFKKQKKLNGK

SEQ ID NO: 110844 - protein, 258 aa, Unknown
  Bacterial polypetide isolated from the Sargasso Sea
MCCEDSIKLWKSKVYKINKPSLKEWWKTIDKWKEKDSLKYVSDKNIIKPQHAIQRLYELTKDKDVFVTTEVGQHQMWAAQYYKFNKPNRWITSGGLGTMGFGLPAAIGAQVAHPDKLVIDIAGEASILMCIQEMSTAIQHKLPVKIFIINNQYMGMVRQWQELLHDKRYSHSYTDALPDFVKLAEAYGAKGIRVQKPNELDKAINEMIEYDGPVIFDCVVEQNENVFPMIPSGKAHNEMLLGDETEKEEISDEGKVLV

SEQ ID NO: 110845 - protein, 309 aa, Unknown
  Bacterial polypetide isolated from the Sargasso Sea
TTLMGKGAFDERDPLSVGMLGMHGTAYANFAVTECDLLIAIGARFDDRVTGKLDTFAPKAKVIHFEIDPAEINKNRVVEVSVLGDVGISLVKLLDLSNQRKTNPRTSQWLNKIKNWKNNFPLITPPKEGEIYPQEVLIALRDLAQDAYITTDVGQHQMWAAQYLLNGPRQWISSAGLGTMGFGMPAAMGVKVALPKEKVICIAGDASILMNIQELGTIAQYKLNLKVIIINNHWQGMVRQWQESFYDERYSASNMSVGEPDFISLSKAFGIEGIVISGRENLIPQLQKALENEGPVLVNVNVRRGKIVT

SEQ ID NO: 110846 - protein, 221 aa, Unknown
  Bacterial polypetide isolated from the Sargasso Sea
MNMTEQLSGGDMLIRSLQDEGVEYIFGYPGGSALHIYDAIFRQQKIEHILVRHEQAATHMADGYARSTGRPGVVLVTSGPGATNAITGIATAYMDSIPMVVISGQVPRDLIGTDAFQETDMVGISRPVVKHSFLVRDAEEIPSVVKKAFHIATTGRPGPVVIDVPKDTTDPFEQFPYAYPETVSMRSYTPAFAGDLTQIDRAVAAMLAAKKPVFYVGGGVI

SEQ ID NO: 110847 - protein, 213 aa, Unknown
  Bacterial polypetide isolated from the Sargasso Sea
VPPAEGPLFPQEVLLAVRELAPNAIVTTDVGQHQMWAAQYLRNGPRGWISSAGLGTMGFGMPAAMGAQVACPDRQVVCIAGDASILMNIQELGTLAAYGLPVKVVIVNNHWQGMVRQWQESFYEERYSASDMLNGMPDFVALARSFGVDGVHIRERESLKRDLEAALKAPGPMLIDIHVRRGENCYPMVPPGKSNAEMVGLPAPMPVLNAPTS

SEQ ID NO: 110848 - protein, 249 aa, Unknown
  Bacterial polypetide isolated from the Sargasso Sea
LVTSGPGATNAITGVATAYMDSIPMVVLSGQVATHLIGEDAFQETDMIGVSRPIVKHSFQVRRASDIPITIKKAFHLASTGRPGPVVIDIPKDLTKPDELFEYSYPETVKLRSYSPARRGHMGQIKKAVRLLSSARRPIIYAGGGVILGEGSDLLRELAEFGNFPVTNTLMGLGSFPASSPQFLGMLGMHGFYEANMAMHNSDVILAVGVRFDDRVTNTVSKFCPGAQIIHIDIDPASISKTVPADLPI

SEQ ID NO: 110849 - protein, 208 aa, Unknown
  Bacterial polypetide isolated from the Sargasso Sea
MPKLFTGAEIVFKCLEDQKVEHIFGYPGGAVLPIYDELKNHPTIKHILVRHEQGAGHAAEGYARSSGKPGVVLVTSGPGATNVVTALTDAYMDSVPLVCISGQVPTHLIGTDAFQECDTTGITRPCTKHNWLIKDINELSKVMHEAFRVATTGRPGPVLIDIPKDVQFAKTKYKKPNKEKKLNGKSHNKFCQDQIDELVKLLSKSKKP

SEQ ID NO: 110850 - protein, 295 aa, Unknown
  Bacterial polypetide isolated from the Sargasso Sea
LIAASGRPGPVLIDIPKDVGQEQFNYVPVEPGSVIPGGFHQPEPPLDAAVAAALDLIEQAQRPLLYVGGGAISAGAHDSLRMLAERYQLPVTTTLMGKGAFDENDVLSVGMLGMHGTAYANFAVTECDLLIAVGARFDDRVTGKLDTFAPRARVVHFEIDPAEIGKNRKADVAVLGDLGLSLARMVEISLQRTAEPRTAAWLERINTWKDRYPLRIPPAEGAVYPQEVLLAVRDLAPDAIVTTDVGQHQMWAAQYLRNGPRGWISSAGLGTMGFGMPAAMGAPGGHAGSAGGVHR

SEQ ID NO: 110851 - protein, 220 aa, Unknown
  Bacterial polypetide isolated from the Sargasso Sea
SFKNSKEVIKPQYAVQRLYELSKNQDTYITTEVGQHQMWAAQHYKFNKPNRWMTSGGLGTMGYGLPAAVGVQIAHPDKLVIDIAGEASVLMTMQEMSTAVQYKLPIKIFILNNQYMGMVRQWQELLHEKNYSESYTEALPDFVKLAEAYGCVGIQATKPDELDEKINEMINTKEPVIFDCRVDPAENCFPMIPSGKPHNQMLLGPEDEKEKVSDEGKTLV

SEQ ID NO: 110852 - protein, 184 aa, Unknown
  Bacterial polypetide isolated from the Sargasso Sea
MSKLYSGAEIVFKCLEDQDVEFIFGYPGGAVLPIYDELKNFNFLKHILVRHEQGAGHAAEGYARSSGKPGVLLVTSGPGATNAVTALTDAYMDSVPLVCISGQVPTHLIGTDAFQECDTTGITRPCTKHNWLVKDVKDLEKTIHKAFEVATTGRPGPVLVDIPKDVQFQKTNYTKFKKQKKRTA

SEQ ID NO: 110853 - protein, 195 aa, Unknown
  Bacterial polypetide isolated from the Sargasso Sea
MPKLYTGAEIVFKCLEDQKVEHIFGYPGGAVLPIYDELKNHTSIKHILVRHEQGAGHAAEGYARSSGKPGVVLVTSGPGATNVVTALTDAYMDSVPLVCISGQVPTHLIGTDAFQECDTTGITRPCTKHNWLVKEINDLSEIMHEAFKVATTGRPGPVLVDIPKDIQFAKAKYKKPKKEKKKNGKSNNKFSQKQK

SEQ ID NO: 110854 - protein, 301 aa, Unknown
  Bacterial polypetide isolated from the Sargasso Sea
PHASKLLRELVDKTNFPITSTLMGLGCYPASGKRWLGMLGMHGLYEANLAMHDCDLMINIGARFDDRITGRIDAFSPSSKKVHVDIDPSSINKVISVDIPIIGDVGSVLKDVLELWKSRGQKTNAKEISNWWKEIENWKSIDCLAFSQKGKTIKPQFALSRLEQLTKKYKKRFIATEVGQHQMWAAQYLGFEEPNQWMTSGGLGTMGYGFPASIGVQIAHPDSLVINVAGEASWLMNMQEMGTAVQYRLPVKQFILNNERLGMVRQWQELLHGERYSHSWSDALPDFVKLAEAFGAKGILC

SEQ ID NO: 110855 - protein, 265 aa, Unknown
  Bacterial polypetide isolated from the Sargasso Sea
MTGAEMVFRALEDQGVEHIFGYPGGAVLPIYDELKNHKKIKHILVRHEQGAGHAAEGYARSSGKPGVILVTSGPGATNTVTALTDAYMDSIPLVCITGQVPTHLIGTDAFQECDTTGITRPCTKHNWLVKDINKLSEVLHKAFEVATSGRPGPVLVDIPKDIQFQKGKYLKPKIINKRNIENKKNLNGLDKNINATVELFKKSSKPILYTGGGVINSGPRATKLLRELVLLTGFPITSTLQGLGAYPGYDQQFLGMLGMHGTYEA

SEQ ID NO: 110856 - protein, 217 aa, Unknown
  Bacterial polypetide isolated from the Sargasso Sea
SAESIKPQYAVQRLYELTKNKETYITTEVGQHQMWAAQHYKFDKPNHWMTSGGLGTMGYGLPAAVGVQVAHPNKLVIDIAGEASVLMTMQEMSTAVQYSLPIKIFILNNEYMGMVRQWQELLHEKNYSESYTAALPDFVKLAEAYGCVGIRAKTPDELDDKIIEMINTDRPVIFDCLVDKEENCFPMIPSGKPHNQMLLGPKDQKETKITKKGKTLV

SEQ ID NO: 110857 - protein, 211 aa, Unknown
  Bacterial polypetide isolated from the Sargasso Sea
MSKLYTGAEIVFKCLEDQGVEFIFGYPGGAVLPIYDELKNHKSIKHILARHEQGAGHAAEGYARSSGKPGIVLVTSGPGATNVVTALTDAYMDSVPLVCISGQVPTHLIGTDAFQECDTTGITRPCTKHNWLVKDIKDLAKTIHKAFEVATTGRPGPVLVDIPKDIQFNKHSYSKPKKQKKLNGKTHNFYSQKEIDELIKLITKAKKPIIY

SEQ ID NO: 110858 - protein, 282 aa, Unknown
  Bacterial polypetide isolated from the Sargasso Sea
METGAEALMDSLKIHGVKLIFGYPGGAILPIYDAVHKAEQEGWLKHYMVRHEQGGSHAADGYARSTGQVGVCFGTSGPGATNLVTGIATAQMDSVPLVVITGQVPRPAIGTDAFQETDIFGITLPIVKHSWVIRDPSDIAKVVSEAFFIASSGRPGPVLIDIPKDVGQEFFNYQRVLPGEIIPKGFKRNGDINDCDIKKAIKLIEESESPLLYVGGGAISSGAHDEIKTLANNYQIPVTTTLMGKGAFDEKDNLSVGMLGMHGTAYANFAVTECDLLIAIGA

SEQ ID NO: 110859 - protein, 219 aa, Unknown
  Bacterial polypetide isolated from the Sargasso Sea
MSKLYTGAEIVFKCLEDQNVEFIFGYPGGAVLPIYDELKNHSSIKHILVRHEQGAGHAAEGYARSSGKPGVVLVTSGPGATNVVTALTDAYMDSIPLVCISGQVPTHLIGTDAFQECDTTGITRPCTKHNWLIKDIKDLSKTLHEAFRVATTGRPGPVLVDIPKDIQFAKINYAKQKKIKKLNGKSDSKFSQDEIDKLINLISKAKKPVIYTGGGVINS

SEQ ID NO: 110860 - protein, 303 aa, Unknown
  Bacterial polypetide isolated from the Sargasso Sea
ELNEILSIPVTNTLMGLGVYPATDKRFLGMLGMHGTYQANMAMHNSDLIIAIGARFDDRITNTPKLFAPNAKIIHFDVDHSSVSKIIEANIAVFGQIKNSLRALINEIKSANKEYDINQIESWRNEIKLWKEQHGLNHDLYLSENDDAEILPQQVVQHAYHLTNGKAYVTSDVGQHQMFAAQYYHFDEPRKWINSGGLGTMGFGLPAAMGVKLAFPKDEVICITGEGSIQMCIQELSTCLQYGLPIKIININNEALGMVKQWQDMNYGGRHSESTYQSSLPDFIKLTESYGHVGIKIEKNSEL

SEQ ID NO: 110861 - protein, 191 aa, Unknown
  Bacterial polypetide isolated from the Sargasso Sea
ITTEVGQHQMWAAQHYKFNKPNRWMTSGGLGTMGYGLPAAIGVQIANPGKLVVDIAGEASVLMTMQEMSTAVQYGLPIKIFILNNEYMGMVRQWQELLHEKNYSESYTAALPDFVKLAESYGCVGIRAKTPDELDEKIKEMINVQKPVIFDCVVDKSENCFPMIPSGKPHNQMILGPEEDEEISDEGKILV

SEQ ID NO: 110862 - protein, 276 aa, Unknown
  Bacterial polypetide isolated from the Sargasso Sea
MDSVPMVVITGQVPRPMIGTDAFQETDIFGITLPIVKHSWLVRDPADLGSVIAQAFFIAATGRPGPVLVDIPKDVGQELFDYVPVEPGSIIPRGFIHPPQHDKQDICAALDLIEDAQRPLLYVGGGAVSAGAQEALNAIAQRHRIPVTTTLMGKGVFDENDPLAVGMLGMHGTAYANFAVTDCDLLIAVGARFDDRVTGKLDTFAPRAKVIHFEIDPAEVGKNRKPDVAVLGDVRRSLEELLLQSQQRHVEPHTAAWLARIESWKQNYPLTTPPAE

SEQ ID NO: 110863 - protein, 286 aa, Unknown
  Bacterial polypetide isolated from the Sargasso Sea
RKIHIDIDPSSINKSVSVDIPIIADATSALQELISEIKKLKFKQSENRIGIWLRQIDQWRKRKCLDFKQTDKIIKPQYAIQRLYEKTKEMETYITTEVGQHQMWAAQYYGFSKPNRWMTSGGLGTMGYGLPSAMGVQIAHPGKLVVDISGEASFLMNMQELSTLKQYKLPVKVFIINNQWMGMVRQWQQLIHGGRYSESYTESLPDFKALAESFGLKGLRAENVDQLDDVIDEMIASKSAVLCDIQVAKEENCFPMIPSGAAHYDMLLGPEDKQSSKVSKDGMVLV

SEQ ID NO: 110864 - protein, 276 aa, Unknown
  Bacterial polypetide isolated from the Sargasso Sea
MKKITGAQIVIETLIQENVKIIFGYPGGAVLPIYDELFKQKKIRHILVRHEQAAVHAAEGYARSTGNVGVVLVTSGPGATNTVTGLTDAMMDSVPVVCISGQVPTHMIGNDAFQEADIVGITRPCTKHNYLVKDVKNLAGSIHSAFYIARNGRPGPVLVDVPKDIQTFKTNYLGKKSTKLVSYYKPKVLPEVHKIEKVIDLLKNSKKPIFYVGGGVVNSGTKASKNLFNLIKKTGFPCTETLMGLGAFPTSDKQFIGMLGMHGTYEANMAMHQSDL

SEQ ID NO: 110865 - protein, 127 aa, Unknown
  Bacterial polypetide isolated from the Sargasso Sea
MSKLYSGAEIVFKCMEDQNVDHIFGYPGGAVLPIYDELQNFKSIKHVLVRHEQGAGHAAEGYARSSGKPGVILVTSGPGATNVVTALTDAYMDSIPLVCISGQVPTHLIGTDAFQECDTTGITRPCT

SEQ ID NO: 110866 - protein, 206 aa, Unknown
  Bacterial polypetide isolated from the Sargasso Sea
MFTGAEIFVKCLEAAGVENIFGYPGGAVLHIYDELFKQKNVNHILVRHEQGAVHAAEGYAKSSGKTGVVLVTSGPGATNSITGIADAYMDSVPIVVFTGQVRTNLIGNDAFQEVDTVGITRPCVKHNFMITDVKDMANTIKKAFYIANSGRPGPVVVDIPKDITEQEFYFDYPKSVSMRSYNPDIKVEDSKIEMIIEAIKKSNKPI

SEQ ID NO: 110867 - protein, 265 aa, Unknown
  Bacterial polypetide isolated from the Sargasso Sea
VDLTGFPITSTLQGLGAYPGDDNQFLGMLGMHGTYEANNAMHDCDLLINIGARFDDRITGKIDEFSPHSKKVHIDIDPSSINKIIKVDLAIVGDVTSVISKINKTIVKRKNGHSKSNKPNIAKWWEQIEKWREKNSLNFVNSDKSIKPQHAVQRLYELTKDKDTYVTTEVGQHQMWAAQHYKFNKPNRWMTSGGLGTMGYGLPAAVGVQIAHPEKLVIDIAGEASVLMTMQEMSTAVQYNLPIKIFILNNQYMGMVRQWQELLHE

SEQ ID NO: 110868 - protein, 294 aa, Unknown
  Bacterial polypetide isolated from the Sargasso Sea
MDLPGYQVQTRGSSDGIEYAAELISKSKQPLLYVGAGAVISGAGRQVQKLAEKLQAPVTTTLLGKGAISEMHPLSVGMLGMHGTAYANKAVINCDLIMAIGARWDDRITGKVSEFCPDATKIHIDIDPAEFGKIIQPDVSINGDAAEVLAELIPLMDKLDTSAWLKKIENWKIKYPLKFPKRGGLRAQHVLAELDRLTESNAIISTDVGQHQMWAAQFCKSIRERQWLSSGGAGTMGYGFPAAIGAQLGKPDDLVVAVVGDGGFQMTMSELATAAIHKLPIKIIIINNSYLGMV

SEQ ID NO: 110869 - protein, 300 aa, Unknown
  Bacterial polypetide isolated from the Sargasso Sea
LGAYPGDDNQFLGMLGMHGTYEANNAMHDCDLLINIGARFDDRITGKIDEFSPNSKKVHIDIDPSSINKIIKVDLAIVGDVTSVISKINKTIAKRKNGHSKSNKSNIAKWWEQIEKWREKDSLNFVNSNESIKPQHAVQRLYELTKNKDTYITTEVGQHQMWAAQHYKFNKPNRWMTSGGLGTMGYGLPAAVGVQIANPEKLVIDIAGEASVLMTMQEMSTAVQYNLPIKIFILNNQYMGMVRQWQELLHEKNYSESYSEALPDFMKMAEAYGCKGIKADNPSYLDDKIQEMIDYDGPSY

SEQ ID NO: 110870 - protein, 312 aa, Unknown
  Bacterial polypetide isolated from the Sargasso Sea
DVQTAEISEEDYEDANISAYSNRILAIEKSRLNQEKSSEFFTHLGNSKRPLIYFGGGVISASASKELREFVDYFNLPAVSTLMGLGAVDTRHPSSLHMLGMHGTPYANYAVQESDFLIAIGSRFDDRVAGVPEKFAPKAKVIAHFDVDPSEINKVKNAAWSHLGVLSLALKDLIKYAKSNDLEFNFGDWLSHTGELKSKYPLNFNRSSDLIQPEHVIECINKITKGNAIVTTGVGQHQMWAAQYFDFKDPRLWLTSGSMGTMGFGIPAAIGAQIAHPDKTVIDVDGDGSIRMNLGDLETITNYDLPVKVLLL

SEQ ID NO: 110871 - protein, 312 aa, Unknown
  Bacterial polypetide isolated from the Sargasso Sea
RHEQGAGHAVEGYARSSGKPGILLVTSGPGATNAVTALTDAYMDSVPLVCISGQVPTHLIGTDAFQECDTTGITRPCTKHNWLVKDVNDLARVLHLAFEVATTGRPGPVLVDIPKDIQFKKGKYSFSKSTLKKKLNGRATHKISNNELDKFIDLLKKSSKPIFYTGGGVINSGPQASEYLRELVALTGFPITSTLQGLGAYPGDDPQFLGMLGMHGTFEANNAMHDCDLMINIGARFDDRITGKVDEFSPGSKKIHVDIDPSSIGKNIKVDLAIVSDVSEFLKLLIKRFKEKNKNFLSSNKQKTSKWWSTMK

SEQ ID NO: 110872 - protein, 200 aa, Unknown
  Bacterial polypetide isolated from the Sargasso Sea
TKDKDTYITTEVGQHQMWAAQHYKFNKPNRWMTSGGLGTMGYGLPAAVGVQIAHPKKLVVDIAGEASVLMTMQEMSTAVQYNLPIKIFILNNEYMGMVRQWQELLHDKNYSESYTAALPDFVKMAEAYGCVGIRAKTPEELDDKIIEMLNTDRPVIFDCLVDKQENCFPMIPSGKPHNQMLLGPKDQKDKKITGKGRTLV

SEQ ID NO: 110873 - protein, 182 aa, Unknown
  Bacterial polypetide isolated from the Sargasso Sea
MSKLYSGAEIVFKCLEDQNVSHIFGYPGGAVLPIYDELKNFNSIKHILVRHEQGAGHAAEGYARSSGKPGVLLVTSGPGATNAVTALTDAYMDSIPLVCITGQVPTHLIGTDAFQECDTTGITRPCTKHNWLVKDVNDLAEIMHKAFEVATTGRPGPVLVDIPKDIQFQKTKYKNSKKNKKL

SEQ ID NO: 110874 - protein, 304 aa, Unknown
  Bacterial polypetide isolated from the Sargasso Sea
PITSTLQGLGAYPGDENQFLGMLGMHGTYEANNAMHDCDLLINIGARFDDRITGKIDEFSPHSKKVHIDIDPSSINKIIKVDLALVGDVNDVLQSINKTLKYKKIDLKKSNKQKISKWWEKIQKWRTKNSLNFKNSDENIKPQHAVQRLYELTKNKDTFITTEVGQHQMWAAQHYKFNKPNRWMTSGGLGTMGYGLPAAVGVQIAHPNKLVIDIAGEASVLMTMQEMSTAVQYNLPIKIFILNNQYMGMVRQWQELLHEKNYSESYSEALPDFIKLAEAYGCKGIMADKPDELDAKIKEMVEFD

SEQ ID NO: 110875 - protein, 301 aa, Unknown
  Bacterial polypetide isolated from the Sargasso Sea
ARFDDRVTRKLSTFAPKASVIHADIDPAEIGKNRTADIPIVGDVAEIIPELITAIEAELAEGSHPDYRDWWNQLNRLRETYPLGYDLPEDESLSPQYVIERLGALSGPDSIYAAGVGQHQMWAAQFVGYERPGTWLNSGGLGTMGFAVPAAMGAKVGRPDTTVWAVDGDGCFQMTNQELATCSINDIPIKVALINNSSLGMVRQWQTLFYNERYSNTDLHSHSFPDFVKLAEAYGCHGLQATNADDVDSTIEKALAMNDAPVVVDFRVHKDAMVWPMVAAGTSNDDIMVARAMAPEWGSDD

SEQ ID NO: 110876 - protein, 304 aa, Unknown
  Bacterial polypetide isolated from the Sargasso Sea
LMKKSSKPIFYTGGGVINSGPEASNLLRELISLTGFPITSTLQGLGAYPGDDPSFLGMLGMHGTYEANNAMYSCDLMVNIGARFDDRITGKVDEFSPNSKKIHIDIDPSSIGKNIKVDLAIVSDVGSFLKALNKRIKEKHKDFLNSNKHNISKWWKDIDKWRQKKSLSFKNSKEVIKPQYAVQRLYELSKNKDTFITTEVGQHQMWAAQHYKFNKPNRWMTSGGLGTMGYGLPAAVGVQIAHPDKLVIDIAGEASVLMTMQEMSTAVQYKLPIKIFILNNQYMGMVRQWQELLHEKNYSESYTA

SEQ ID NO: 110877 - protein, 170 aa, Unknown
  Bacterial polypetide isolated from the Sargasso Sea
MPKLISGAEIVFKALEDQKVEYIFGYPGGAVLPIYDELKNHKSIKHILARHEQGAGHAAEGYARSSGKPGVLLVTSGPGATNAVTALTDAYMDSVPLVCISGQVPTHLIGTDAFQECDTTGITRPCTKHNWLVKDANDLSRVLHLAFEVATTGRPGPVLVDIPKDIQFKK

SEQ ID NO: 110878 - protein, 287 aa, Unknown
  Bacterial polypetide isolated from the Sargasso Sea
DILGGAALHIYDAIFNQNYVDHILVRHEQGAVHAADGYARATGKPGVALVTSGPGATNAITGLATAYMDSTPIVVISGQVKSGLIGTDSFQETDMIGVSRPIVKHSFLVQSAEDIPEIVKKAFHIATTGRPGPVVIDIPKDFTDPDYKFEFNYPSEVNMRSYNPPKKGDTSRIKEAVDLIEQSKKPVIYSGGGVIQNDASEELTALAKLLNFPVTNTLMGLGAFPGSDPQFMGMLGMHGTYQANMAMHNADLIIAVGARFDDRITNDPKQFALGAKKIHIDVDAASV

SEQ ID NO: 110879 - protein, 217 aa, Unknown
  Bacterial polypetide isolated from the Sargasso Sea
MTRQMTGARMVVQALKDQGVDTVFGYPGGAVLPIYDEVFLQNDIRHILVRHEQGAVHAAEGYARSTGKPGVVLVTSGPGATNAVTGLTDALMDSIPLVVLTGQVPTFMIGSDAFQEADTVGITRPCTKHNWLVKDTNELAEVIHEAFHVATSGRPGPVLVDIPKDVQFATSEYIEKSKIPVSHYQPKTKADPQQIASLVDAIENAKKPLFYTGGGVI

SEQ ID NO: 110880 - protein, 245 aa, Unknown
  Bacterial polypetide isolated from the Sargasso Sea
SKSNKSQISNWWEQIQKWRSKKSLDYIGSEETIKPQYAIERLYELTKDKDAYITTEVGQHQMWAAQHYKFNKPNRWMTSGGLGTMGYGLPAAVGVQIAHPKKLVIDIAGEASVLMTMQEMSTAVQYNLPVKIFILNNEYMGMVRQWQELLHDKNYSESYTAALPDFVKMAEAYGCIGIRAKTPDELDDKIIEMLNTDRPVIFDCLVDKQENCFPMIPSGKPHNQMLLGPKDQKEKKITGKGRTLV

SEQ ID NO: 110881 - protein, 263 aa, Unknown
  Bacterial polypetide isolated from the Sargasso Sea
MSKLYSGAEIVFKCLEDQNVEFIFGYPGGAVLPIYDELKNFNSVKHILVRHEQGAGHAAEGYARSSGKPGVLLVTSGPGATNAVTALTDAYMDSVPLVCISGQVPTHLIGTDAFQECDTTGITRPCTKHNWLVKDVKDLEKTIHKAFEVATTGRPGPVLVDIPKDVQFQKTNYTKFKKQKSLNGKVNSQFTQKDIDELIKLMRKASKPIFYTGGGVINSGPKASELLRELVNTTGFPITSTLQGLGSYPGENSQFLGMLGMHG

SEQ ID NO: 110882 - protein, 283 aa, Unknown
  Bacterial polypetide isolated from the Sargasso Sea
HIDIDESNINKTINVDIPIIGDVKQVVEKMISIWKDKKYKIDTVSLKLWWDKIKKWKEVDCLNYNNEGKQIKPQYAVQRLYELTKNTKTFVTTEVGQHQMWAAQFYKFEEPNRWLTSGGLGTMGYGFPAAIGAQVGHPDALVVDIAGDASILMNIQEMSTAVQYRLPVKIFILNNEYMGMVRQWQELLHGGRYSESYTDSLPDFVKLAESYKAVGLRAKTTDQLDDVITQMIETKNTVIADIWVTKEENCFPMIQSGSAHNEMILSKDQKQDKKSAEKGKILV

SEQ ID NO: 110883 - protein, 298 aa, Unknown
  Bacterial polypetide isolated from the Sargasso Sea
FGITLPIVKHSWVVRDPSEIAKVVAQAFLIASSGRPGPVLIDIPKDVGQEMFKYLPVEPGSIKPPGFELPFAPEHKAISAALDLIENAEQPLLYVGGGVISSGAHETLAAIANRFQIPVTTTLMGKGAFDEREPLSVGMLGMHGTAYANFAVTECDLLIAIGARFDDRVTGKLDTFAPNAKVIHFEIDPAEINKNRVVEVSVLGDVGISLVKLLDLSNQRKINPRTSNWIKKIENWKNNFPLTTPPKEGEIYPQEVLIALRDLAQDAYITTDVGQHQMWAAQYLLNGPRQWISSAGLG

SEQ ID NO: 110884 - protein, 277 aa, Unknown
  Bacterial polypetide isolated from the Sargasso Sea
YIFGYPGGAVLPIYDELKNHESIKHILVRHEQGAGHAAEGYARSSGKPGVVLVTSGPGATNAVTALTDAYMDSIPLVCISGQVPTHLIGTDAFQECDTTGITRPCTKHNWLVKDVKDLSKIIHKAFEVATTGRPGPVLVDIPKDIQFQKTKYVNSIKRKKLNGKIHNKFNQGEIDQLVKLMVNSSKPILYTGGGVINSGPKASELLRELVSLTGFPITSTLQGLGSYPGDDNQFLGMLGMHGTYEANNAMHDCDLMINIGARFDDRITGKIDEFSPK

SEQ ID NO: 110885 - protein, 192 aa, Unknown
  Bacterial polypetide isolated from the Sargasso Sea
ITTEVGQHQMWAAQHYKFNKPNRWMTSGGLGTMGYGLPSAIGVQVANPDKLVIDIAGEASVLMTMQEMSTAVQYNLPIKIFILNNQWMGMVRQWQELLHEKNYSESYTAALPDFVKLAEAYGCVGIRATKPEELDGKIAEMLSVDKPVIFDCVVDKVENCYPMIPSGKAHNQMLLGSQDEEEKISDEGKILV

SEQ ID NO: 110886 - protein, 273 aa, Unknown
  Bacterial polypetide isolated from the Sargasso Sea
LPIYDELKNHPSIKHILVRHEQGAGHAAEGYARSSGKPGVVLVTSGPGATNVVTALTDAYMDSVPLVCISGQVPTHLIGTDAFQECDTTGITRPCTKHNWLVKDINDLSKVMHEAFRVATTGRPGPVLIDIPKDIQFAKAKYKKPNKEKKLNGKFHNKFSQDQIDELVKLLSKAKKPIIYSGGGVINSGPKASQALREFVELTGFPITSTLQGLGAYPGDDNQFLGMLGMHGTYEANNAMHDCDLLINIGARFDDRITGKIDEFSPNSKKRFI

SEQ ID NO: 110887 - protein, 307 aa, Unknown
  Bacterial polypetide isolated from the Sargasso Sea
MPKLLTGAEIVFKCLEDQKVEHIFGYPGGAVLPIYDELKNHPSIKHILVRHEQGAGHAAEGYARSSGKPGVVLVTSGPGATNVVTALTDAYMDSVPLVCISGQVPTHLIGTDAFQECDTTGITRPCTKHNWLVKDINDLSKVMHEAFRVATTGRPGPVLIDIPKDIQFAKAKYKKPNKEKKLNGKFHNKFSQDQIDELVKLLSKAKKPIIYSGGGVINSGPKASQALREFVELTGFPITSTLQGLGAYPGDDNQFLGMLGMHGTYEANNAMHDCDLLINIGARFDDRITGKIDEFSPKFKKRFNIDM

SEQ ID NO: 110888 - protein, 312 aa, Unknown
  Bacterial polypetide isolated from the Sargasso Sea
EQGATHAADGYARATGKPGVVLVTSGPGATNAITGIATAFMDSIPMIIISGQVAKHLIGTDAFQETDMIGISRPIVKHSFSVESAEDIPEIVKQAFYIATSGRPGPVVIDVPKDTTSPDELFDFVYPDSAHIRSYNPPISPEKKQIERAVEAMLKARKPVIYAGGGAINSNASSELIKLNDILDFPVTNTLMGLGVYPATHKRFLGMLGMHGTYQANMAMHNADLIIAVGARFDDRITNTPKLFAPNAKIIHFDVDQSSVSKIIEANIAVFGQVKDSLQEILNELESRRNEIDEKKLDDWKQQIKYGKKSMA

SEQ ID NO: 110889 - protein, 324 aa, Unknown
  Bacterial polypetide isolated from the Sargasso Sea
AEGYARSSGKPGVALVTSGPGATNIVTALTDAYMDSIPIVCISGQVPTHLIGTDAFQECDTTGITRPCTKHNWLVKDVKDLSKIIHRAFEVATTGRPGPVLIDIPKDIQFQKTKYNGYKKLKKLNGKVQNHFKQSEIDKLIKLMSVASKPIFYTGGGVINSGPKASELLRELVSATGFPITSTLQGLGAFPADDNQFVGMLGMHGTYEANNAMHDCDLMINVGARFDDRITGKLDEFSPKSKKVHIDIDPSSINKNVKVDLPIIGDVTDVISSTLKTIKKKKPSFMKSNKQKTSKWWEQIEKWRSVNSLNYENSSETIKHNTPF

SEQ ID NO: 110890 - protein, 258 aa, Unknown
  Bacterial polypetide isolated from the Sargasso Sea
VLNKIIKTWQDKKLKTNSSNLKLWWDKINNWKKIDCLNFSNDEKEIKPQYAIQRLYELTKDKKTFITTEVGQHQMWAAQFYKFEKPNRWLTSGGLGTMGYGFPAAIGAQVANPDALVIDIAGDASILMNIQEMSTAVQYRLPVKIFILNNEYMGMVRQWQELLHGGRYSESYTDSLPDFVKLAESYKAVGLRAKKPEELDDVINEMISTDKTVIADIWVSKEENCFPMIQSGSAHNEMVLSKDQKQDKSSAEKGKILV

SEQ ID NO: 110891 - protein, 277 aa, Unknown
  Bacterial polypetide isolated from the Sargasso Sea
MSKLYSGAEIVFKCLQDQGVEVIFGYPGGAVLPIYDELKNFKSIKHYLVRHEQGAGHAAEGYARSSGKPGVLLVTSGPGATNAVTALTDAYMDSVPLVCISGQVPTHLIGTDAFQECDTTGITRPCTKHNWLVKDVKDLSKIIHKAFEVAMTGRPGPVLVDIPKDIQFQKTNYKKYKKQKKSNGKSFNQFTQNDINKFVKLMAKASKPIFYTGGGVINSGPKASELLRELVSATGFPITSTLQGLGAYPGGDNQFLGMLGMHGSYEANNAMHDCDLM

SEQ ID NO: 110892 - protein, 316 aa, Unknown
  Bacterial polypetide isolated from the Sargasso Sea
AFQECDTTGITRPCTKHNWLVKDINDLSRVLHLAFEVATTGRPGPVLVDIPKDIQFKKGKYKFFNNTLKKKLNGKAIRKISNIELDKFIDLIKKSSKPIFYTGGGVINSGPHASKYLRELVSLTGFPITSTLQGLGAYPGDDPQFLGMLGMHGTYEANNAMHDCDLMINIGARFDDRITGKVDEFSPGSKKIHVDIDPSSIGKNIKVDLAIVSDVTTLLKSLIKRFKEKNKNFVNSNKQKTSKWWEQIGKWREKKSLNFINSDKIIKPQHAVQRLYELTKNQDTFITTEVGQHQMWAAQHYKFNKPNRWMTSGGLG

SEQ ID NO: 110893 - protein, 230 aa, Unknown
  Bacterial polypetide isolated from the Sargasso Sea
WIGKINIWKDKHGLDHEIYMKHLKTKAILPQAVVQELYHATNGDAYVTSDVGQHQMFVAQYYHFNKPRRWINSGGLGTMGFGLPAALGVKLAFPKKEVVCVTGEGSIQMCIQELSTCLQYGLPIKIININNEALGMVKQWQDMNYGGRHSESTYQNSLPDFVKLTESYGHVGMRVKKYADLRPALNKAFSMKEKLVFIDVLVDPDEHVYPMLVAPNGSMKDMWLSKSDKV

SEQ ID NO: 110894 - protein, 291 aa, Unknown
  Bacterial polypetide isolated from the Sargasso Sea
SDLDKVINLMKRSSKPIFYTGGGVINSGPEASKSLRELVSITGFPITSTLQGLGAYPGDDPLFLGMLGMHGTYEANNSMYSCDLMINIGARFDDRITGKVDEFSPKSKKIHIDIDPSSIGKNIKVDLAVISDVGSFLKALNKRIKEKHKDFLNSNKQNISKWWKDIDKWRQKKSLSFKNSKEVIKPQYAVQRLYELSKNQDTYITTEVGQHQMWAAQHYKFNKPNRWMTSGGLGTMGYGLPAAVGVQIAHPDKLVIDIAGEASVLMTMQEMSTAVQYKLPIKIFILNNQYM

SEQ ID NO: 110895 - protein, 198 aa, Unknown
  Bacterial polypetide isolated from the Sargasso Sea
KYKDRFISTEVGQHQMWAAQYLGFEKPNQWMTSGGLGTMGYGFPASIGVQIAHPDALVINVAGEASWLMNMQEMGTAVQYRLPVKQFILNNERLGMVRQWQELLHGERYSHSWSDALPDFVKLAEAFGAKGILCDDPKNLDDAIMEMVEYEGPVIFDCLVEKHENCFPMIPSGEPHNKMLLGEANTKDAITSSGAVLV

SEQ ID NO: 110896 - protein, 201 aa, Unknown
  Bacterial polypetide isolated from the Sargasso Sea
MGKLFSGAEIVFKVLEHHKVEHIFGYPGGAVLPIYDELKNHKTIKHILARHEQGAGHAAEGYARSSGKPGVMLVTSGPGATNAVTALTDAYMDSVPIVCISGQVPTHLIGTDAFQECDTTGITRPCTKHNWLVKDVNDLARVMDLAFDVATTGRPGPVLVDIPKDIQFKKTEFVLKNKKNKKINGKSNGKINNSDIDKIIQ

SEQ ID NO: 110897 - protein, 290 aa, Unknown
  Bacterial polypetide isolated from the Sargasso Sea
VREFINLVGSPVTMTLMGLGVVASSDKHSLGMLGMHGMYEANMAMHECDVMINIGARFDDRVTGRLDAFSPNSKKIHVDIDASNINKTINVDAPIIGDVKKVVEKMISVWKNKKYNLDQKAIKEWWNKIDKWKEVDCLNYNNENEQIKPQFAVQRLYELTKDKNTFITTEVGQHQMWAAQYYKFDEPNRWLTSGGLGTMGYGFPAAIGAQVGNPDALVIDIAGDASILMNIQEMSTAIQYRLPVKIFILNNEYMGMVRQWQELLHGGRYSESYTDSLPDFVKLAESYQAV

SEQ ID NO: 110898 - protein, 296 aa, Unknown
  Bacterial polypetide isolated from the Sargasso Sea
PLYDSPIRHILARHEQGSGHMAEGYAQATGELGVVIATSGPGATNLITPLTNALMDSTPLLAITGQVASEAIGNDAFQEAYTVGLTMAATKHNYLITSAEEIPQVLLEAKHIATTGRPGPVLVDIPKDILNQKVEWIEPKLIEMPGYKPTLEPNPKMISQAAELIKQSKKPILYVGGGIIHSKANQELFELATKYKIPVVTTLMGRGAFPDGNELCFEMPGMHGNYTATTSIQKSDLLIAIGVRFDDRVTANPKFFAQNAKVIHADIDPAEIGKIREPEVPIVGDAKSVITGLMKN

SEQ ID NO: 110899 - protein, 296 aa, Unknown
  Bacterial polypetide isolated from the Sargasso Sea
TGRPGPVLIDIPKDIQFAKANYTKIKKEKKLNGKLKNKFSDKEIDQFINLLLKAKKPVVYTGGGVINSGPEASESLKEFVRLIGFPITSTLQGLGAFPGDDNQFIGMLGMHGTYEANNAMHDCDLLINIGARFDDRITGKIDEFSPKSKKVHIDIDPSSINKIIKVDLAIVGDVNEVIKSTIKKIKKKQNGLKDSNKQRISKWWEQIQKWRTKDSLGFINSDKEIKPQHAVKRLYELTKNQDTFITTEVGQHQMWAAQHYKFNKPNRWMTSGGLGTMGYGLPAAVGVQIAHPDKLV

SEQ ID NO: 110900 - protein, 324 aa, Unknown
  Bacterial polypetide isolated from the Sargasso Sea
FYIAKSGRPGPVLIDITKDAQFEKFKFSYKKCNGIRSYVPKPQLSEDILTKASKLINKAKKPLIVFGQGVILGEAEKELKEFVEKSGIPSVWTILGLSALPTSHPLNLGMVGMHGNYAPNVLTNQCDVLLAIGMRFDDRVTGDLKTYAKQAKVLHFEIDPSEINKNVKVDIAILGDCKESLSKLTPLINKKEYPEWIKQFKDLEKIEIDKVIKEDLYPKKNGLTMGETISAVNKYTKGDAIIVTDVGQHQMVACRYSKFIKSKSNITSGGLGTMGFALPAAIGAKMGAPEREVIAIIGDGGYQMTIQELGTIFQNKLSVKILVS

SEQ ID NO: 110901 - protein, 181 aa, Unknown
  Bacterial polypetide isolated from the Sargasso Sea
MSKLYSGAEIVFKCLEDHDVNVLFGYPGGAVLPIYDELKNFPSIKHYLVRHEQGAGHAAEGYARSSGKPGVALVTSGPGATNIVTALTDAYMDSIPIVCISGQVPTHLIGTDAFQECDTTGITRPCTKHNWLVKDVKDLAKIIHRAFEVATTGRPGPVLIDIPKDIQFQKTKYNGYKKLKK

SEQ ID NO: 110902 - protein, 84 aa, Unknown
  Bacterial polypetide isolated from the Sargasso Sea
MPNLLSGAEIVFKALEDQKVEYIFGYPGGAVLPIYDELKNHKSIQHILARHEQGAGHSAEGYARSSGKPGVLLVTSGPGATNAV

SEQ ID NO: 110903 - protein, 266 aa, Unknown
  Bacterial polypetide isolated from the Sargasso Sea
MTGESNIARKPSEHLSGAGVIVKALQDQGVEVIFGYPGGAVLPLYDELFKTNNLRHVLVRHEQAAVHAAEGYARSTGKIGVVLVTSGPGATNAVTGLTDALMDSIPIVCLTGQVPTHLIGTDAFQEADTTGITRACTKHNYLVKKSDELSDVMHEAFYVAANGRPGPVVVDLPKDILFADAPYFTPKDVRPCAYQPKTNGDLAKIEQAAELLAKAQRPIIYGGGGLINSGPTACKLLQEFAEITGFPVTLTLMGLGAFPASNPNFL

SEQ ID NO: 110904 - protein, 299 aa, Unknown
  Bacterial polypetide isolated from the Sargasso Sea
MPKLLTGAEIVFKALEDQNVEYIFGYPGGAVLPIYDELKNHKSIKHILARHEQGAGHAAEGYARSSGKPGILLVTSGPGATNAVTALTDAYMDSVPLVCISGQVPTHLIGTDAFQECDTTGITRPCTKHNWLVKDVNDLAKILHLAFEVATTGRPGPVLVDIPKDIQFKKGNYKFFKNQLHNKLNGKSKEKINTKELDKFISMITSSKKPIFYTGGGVINSGPRASELLRELVQLTGFPITSTLQGLGAFPGDDNQFLGMLGMHGTYEANNAMHDCDLMINIGARFDDRITGKVDEFSP

SEQ ID NO: 110905 - protein, 304 aa, Unknown
  Bacterial polypetide isolated from the Sargasso Sea
EVAKLLVNAKKPIIYGGGGIINSGPEASNLLRELVDLVEIPTTLTLMGLGALPHDNKFFLGMLGMHGTYEANLSMYNCDVMLNIGARFDDRITGNLKEFSPNSKKIHIDIDPSSINKSVPVDIPIISDAGSALKELIYELKKLKFKDSKNRIGVWLSQIDEWRSKKCLDFNQTGKIIKPQYAIKRLFEKTKNIETFITTEVGQHQMWAAQYYGFSKPNRWMTSGGLGTMGYGLPSAMGVQIAHPEKLVIDISGEASFLMNMQELSTLKQYKLPVKVFIINNQWMGMVRQWQQLIHGGRYSESYT

SEQ ID NO: 110906 - protein, 248 aa, Unknown
  Bacterial polypetide isolated from the Sargasso Sea
GPGATNLITSLADAMLDSVPVVAITGQVSQAVMGSDAFQEVDVLGLSLAVTKHSFMVRSVDELAATLNEAFTIAQSGRPGPVLVDIPKDVQLADIDAELQAISKSNSNIQTSLANAAAARKLIAAAKKPVAYIGGGVHMAGAMAQLQQFLASNPMPSVTTLKGMGSVAKDNEHYLGMLGMHGTQAANLAVQQCDLLICLGARFDDRVTGNLQKFAPEAKVIHVDIDPAEINKVRFAHVALLGDMKQIL

SEQ ID NO: 110907 - protein, 237 aa, Unknown
  Bacterial polypetide isolated from the Sargasso Sea
YVPVEPGSVIPGGFHQPEPPLEAAVAAALDLIEQAQRPLLYVGGGAISAGAHDSLRMLAERYQLPVTTTLMGKGAFDENDALSVGMLGMHGTAYANFAVTECDLLIAVGARFDDRVTGKLDTFAPRARVVHFEIDPAEIGKNRKADVAVLGDLGLSLARMVEISLQRTAEPRTAAWLERINTWKDRYPLTIPPTEGAIYPQEVLLAVKDLAPDAIVTTDVGQHQMWAAQYLRNGPKG

SEQ ID NO: 110908 - protein, 286 aa, Unknown
  Bacterial polypetide isolated from the Sargasso Sea
SGDDNQFLGMLGMHGTYEANNAMHECDLMINIGARFDDRITGKLDEFSPKSMKVHIDIDPSSINKNVKVDLPIVGDVSEVINSAIKTIKKKKTNFTKSNKQKISKWWEKIEKWRSIRSLDFVNSSETIKPQYAVQRLYELTKNKDTYITTEVGQHQMWAAQHYKFDKPNRWMTSGGLGTMGYGLPSAVGVQVAHPNKLVIDIAGEASVLMTMQEMSTAVQYSLPIKIFILNNEYMGMVRQWQELLHDKNYSESYTAALPDFVKLAEAYGCVGLRASTPEELDDKII

SEQ ID NO: 110909 - protein, 225 aa, Unknown
  Bacterial polypetide isolated from the Sargasso Sea
IFWKDKHGLDHDIYMKHLKTKAILPQAVVQELYHATNGDAYVTSDVGQHQMFVAQYYHFNKPRRWINSGGLGTMGFGLPAALGVKLAFPKKEVVCVTGEGSIQMCIQELSTCLQYGLPIKIININNEALGMVKQWQDMNYGGRHSESTYQNSLPDFVKLTESYGHVGMRVKKYADLRPALNKAFSMKENLVFIDVLVDPEEHVYPMLVAPNGSMKDMWLSKSDKV

SEQ ID NO: 110910 - protein, 174 aa, Unknown
  Bacterial polypetide isolated from the Sargasso Sea
MLGMHGMYEANMAMHECDVMINIGARFDDRVTGRLDAFAPNSKKIHIDIDPSNINKTIKIDVPIVGDIESVMNQIFSSWKNNNYKSQKENLIKWWNKIEEWKKVDCLNYDQGEGSIKPQHAIKRLYELTKDKKTFITTEVGQHQMWAAQYYKFEEPNRWLTSGGLGTMGYGFPA

SEQ ID NO: 110911 - protein, 296 aa, Unknown
  Bacterial polypetide isolated from the Sargasso Sea
HSSIKHILVRHEQGAGHAAEGYARSSGKPGVVLVTSGPGATNVVTALTDAYMDSVPLVCISGQVPTHLIGTDAFQECDTTGITRPCTKHNWLVKDIDDLSDIMHEAFRVATSGRPGPVLVDIPKDIQFAKTKYKKPKRQKKSNGKPVNKFSQKQIDQLVNLFNNAKKPVIYSGGGVINSGPKASDALRELVELTGFPITSTLQGLGAYPGDDNQFLGMLGMHGTYEANNAMHDCDLLINIGARFDDRITGKIDEFSPNSKKVHIDIDPSSINKIIKVDLAIVGDVAKVIAKVIKQY

SEQ ID NO: 110912 - protein, 276 aa, Unknown
  Bacterial polypetide isolated from the Sargasso Sea
DIPKDIQFQKTTYINYKRKMKLNGKSHNQFSKNDVEELVNLLKKASKPIFYTGGGVVNSGPKASELLRELVRATGFPITSTLQGLGCYPADDNQFLGMLGMHGTYEANNAMYECDLMINIGARFDDRITGKIDEFSPNSKKVHIDIDPSSINKNVKVDLAIVGDVKSVIESTIKTLKKTKHDFLKSNKQKTSKWWEKIQKWRARRSLDYIGSEETIKPQYAVERLYELTKDKDTYITTEVGQHQMWAAQHYKFNKPNRWMTSGGLGTMGYGLPAAV

SEQ ID NO: 110913 - protein, 121 aa, Unknown
  Bacterial polypetide isolated from the Sargasso Sea
MTGAEIVFKALEDQGVKHIFGYPGGAVLPIYDELKNHKNIKHILVRHEQGAGHAAEGYARSSGKPGVILVTSGPGATNAVTALTDAYMDSIPLVCITGQVPTHLIGTDAFQECDTTGITRP

SEQ ID NO: 110914 - protein, 260 aa, Unknown
  Bacterial polypetide isolated from the Sargasso Sea
MSKLYSGAEIVFKCLEDQDVEYIFGYPGGAVLPIYDELKNHESIKHILVRHEQGAGHAAEGYARSSGKPGVVLVTSGPGATNAVTALTDAYMDSIPLVCISGQVPTHLIGTDAFQECDTTGITRPCTKHNWLVKDVKDLSKIIHKAFEVATTGRPGPVLVDIPKDIQFQKTKYVGSIKKKKLNGKIHNKFNQSEIDQLVKLMVNSSRPILYTGGGVINSGPKASELLRELVSLTGFPITSTLQGLGSYPGDDNQFLGMLG

SEQ ID NO: 110915 - protein, 267 aa, Unknown
  Bacterial polypetide isolated from the Sargasso Sea
FGYPGGAALHIYDAIFNRKELQHILVRHEQGATHAADGYARATGKPGVVLVTSGPGATNAITGIATAFMDSIPMIVLSGQVASHLIGTDAFQETDMIGISRPIVKHSFSIESAEEIPKVIKEAFYIATSGRPGPVVIDIPKDTTAPDKLFEYNPPESVKIRSYNPPVEPDSKQIARALSEILKANKPVIYAGGGAINSNASKELFELNELLNFPVTNTLMGLGVYPAKHKRFMGMLGMHGTYQSNMAMHNADLIIAIGARFDDRITN

SEQ ID NO: 110916 - protein, 240 aa, Unknown
  Bacterial polypetide isolated from the Sargasso Sea
MTSENIDGGKALIRALEKEGVEVMFGLPGGAILPVYDPIIDSNIRHILVRHEQGAGHMAEGYAQATGKPGVAMVTSGPAATNIVTPLCDAYLDSIPLVVITGQVPLAAIGTDAFQECDTTGITMGVTKHNFLVKDAQDIPRIVKEAFHIATTGRPGPVLIDVPKDIVDPKNPRSKLNWVEDPEMDLPGYDPEKNFDLSGIEKAVELIQNAEKPIFYVGGGILKSRAAEALRELVEITGIH

SEQ ID NO: 110917 - protein, 305 aa, Unknown
  Bacterial polypetide isolated from the Sargasso Sea
GASMEIHQSLTKSKTGVRNVLCRHEQGEVFAAEGYAKCTGKVGVCIATSGPGATNLVTGLADALLDSVPMVAITGQVPRRMIGTDAFQETPTVEITRQITKHNYLVMDVNDIPRIVREAFFLASSGRPGPVLIDIPKDVQQQMSVPYWGPKVSLNGYLSRLPSPPSHPQMERVLDMIKDAKRPVVYAGGGCLDAAPELKEFIESTGIPITNTLMGLGCYPASDELCLDMLGMHGAVYANYAVDSADLLLAFGVRFDDRVTGKLEAFAARASIVHIDIDPAEIGKNKEAHCPVFSNIKPALRTLNS

SEQ ID NO: 110918 - protein, 296 aa, Unknown
  Bacterial polypetide isolated from the Sargasso Sea
ITSTLQGLGAYPGDDPQFLGMLGMHGTYEANNAMHDCDLMINIGARFDDRITGKVDEFSPGSKKIHVDIDPSSIGKNIKVDLAIISDVTTLLKSLIKRFKEKNKNFVNSNKQKTSKWWEQIGKWREKRSLNFINSDKIIKPQHAVQRLYELTKNQDTFITTEVGQHQMWAAQHYKFNKPNRWMTSGGLGTMGYGLPAAIGVQIANPGKLVVDIAGEASVLMTMQEMSTAVQYRLPIKIFILNNEYMGMVRQWQELLHEKNYSESYTAALPDFVKLAESYGCVGIRAKTPNELDEKL

SEQ ID NO: 110919 - protein, 215 aa, Unknown
  Bacterial polypetide isolated from the Sargasso Sea
MPKLFTGAEIVFKCLEDQKVEHIFGYPGGAVLPIYDELKNHPSIKHILVRHEQGAGHAAEGYARSSGKPGVVLVTSGPGATNVVTALTDAYMDSVPLICISGQVPTHLIGTDAFQECDTTGITRPCTKHNWLVKDINDLAKVMHEAFRVATTGRPGPVLVDIPKDVQFAKTKYKKLNKEKKLNGKSHNKFSQDQIDEFVKLLHKAKKPIIYSGGG

SEQ ID NO: 110920 - protein, 174 aa, Unknown
  Bacterial polypetide isolated from the Sargasso Sea
MSKLYSGAEIVFKCLEDQAVSNIFGYPGGAVLPIYDELKNFKSIKHILVRHEQGAGHAAEGYARSTGKAGVLLVTSGPGATNAVTALTDAYMDSVPIVCISGQVPTHLIGTDAFQECDTTGITRPCTKHNWLVKDIKDLANVIHKAFEVATTGRPGPVLVDVPKDIQFQKTVYK

SEQ ID NO: 110921 - protein, 243 aa, Unknown
  Bacterial polypetide isolated from the Sargasso Sea
MNGSQIIVEALRRHGVDYLFGYPGGACMPIFDALVDAPEIKIVLVRHEQGGTHMADGYARATGKPGVVLVTSGPGATNTVTGLLTAQMDSVPMVVLTGQTITPNLGKDAFQEADVFGVTMPVVKHSYLVREVNDLPRVMNEAFHLATSGRPGPVLVDLPKDVVSAECEADFTDEFHLPGYAPPARGLTEDLEKTAELISSSKKPLLYVGAGAVIAQASRQVIGLAEKLQAPVTTTLLGKGAFP

SEQ ID NO: 110922 - protein, 124 aa, Unknown
  Bacterial polypetide isolated from the Sargasso Sea
MKIAGNDILIQSLINEGVEYIFGYPGGAALHIYDSIFNQKEMQHILVRHEQGATHAADGYARATGKPGVVLVTSGPGATNAITGIATAFMDSIPMVIISGQVQSHLIGTDAFQETDMIGVSRPM

SEQ ID NO: 110923 - protein, 100 aa, Unknown
  Bacterial polypetide isolated from the Sargasso Sea
MSKLYSGAEIVFKCLEDQGVEFVFGYPGGAVLPIYDELKNFNFIKHILVRHEQGAGHAAEGYARSSGKPGVLLVTSGPGATNAVTALTDAYMDSVPLVCI

SEQ ID NO: 110924 - protein, 266 aa, Unknown
  Bacterial polypetide isolated from the Sargasso Sea
SSIGKNIKVDHAIVSDVGSFLKALNKRIKEKHKDFLNSNKANISKWWRDIDKWRQKKSLSFRNSKDVIKPQYAVQRLYELSKNKDTYITTEVGQHQMWAAQHYKFNKPNRWMTSGGLGTMGYGLPAAVGVQVAHPDKLVIDIAGEASVLMTMQEMSTAVQYKLPIKIFILNNQYMGMVRQWQELLHEKNYSESYTAALPDFVKLAEAYGCVGIIAEKPNELDEKINEMIEVDKPVIFDCRVDPTENCFPMIPSGKPHNQMILGPRR

SEQ ID NO: 110925 - protein, 119 aa, Unknown
  Bacterial polypetide isolated from the Sargasso Sea
MKITGANIVIKSLKDLGVEHVFGYPGGAILPIYDEIFKQNKIRHILVRHEQGAVHMAEGYARSTGKVGVVLVTSGPGATNAVTGLTDALMDSVPILCLTGQVPTHLIGTDAFQEADTLG

SEQ ID NO: 110926 - protein, 194 aa, Unknown
  Bacterial polypetide isolated from the Sargasso Sea
MSKNYSGAEIVFKCLEDQGVENVFGYPGGAVLPIYDELKNHESVKHILVRHEQGAGHAAEGYARSTGKPGVVLVTSGPGATNVVTALTDAYMDSVPLVCISGQVPTHLIGTDAFQECDTTGITRPCTKHNWLVKDIKDLAKTIHKAFEVATTGRPGPVLVDIPKDIQFQKTKYQKYNKKKKLNGKNTNHYSQKE

SEQ ID NO: 110927 - protein, 234 aa, Unknown
  Bacterial polypetide isolated from the Sargasso Sea
MSKLITGAEIVFKCLEDQGVDFIFGYPGGAVLPIYDELKHHKSIKHILARHEQGAGHAAEGYARSSGKPGVILVTSGPGATNVVTALTDAYMDSVPLVCISGQVPTHLIGTDAFQECDTTGITRPCTKHNWLVKDVKDLAKTIHKAFEVATTGRPGPVLVDIPKDIQFNKFTYSKFKKQKKLNVKLKNPYSQKEIDELIKLIIKSKKPIIYSGGGVINSGIIASQLLRELVDST

SEQ ID NO: 110928 - protein, 101 aa, Unknown
  Bacterial polypetide isolated from the Sargasso Sea
MPKLLTGAEIVFKCLEDQKVEHIFGYPGGAVLPIYDELKNHPSIKHILVRHEQGAGHAAEGYARSSGKPGVVLVTSGPGATNVVTALTDAYMDSVPLVCIS

SEQ ID NO: 110929 - protein, 290 aa, Unknown
  Bacterial polypetide isolated from the Sargasso Sea
MKDQDVDFIFGYPGGAVLPIYDELKHHKSIKHILARHEQGAGHAAEGYARSSGKPGVVLVTSGPGATNVVTALTDAYMDSVPLVCISGQVPTHLIGTDAFQECDTTGITRPCTKHNWLVKDIKDLGKTIHKAFEVATTGRPGPVLVDIPKDIQFNKYSYTKLKKQKKLNGKKHNFYSQKEIEELIELICKSKKPIIYSGGGVINSGIEASQLLRELVDATGFPITSTLQGLGAYPGDDNQFLGMLGMHGTYEANNAMHDCDLMINVGARFDDRITGKIDEFSPKSKKVHI

SEQ ID NO: 110930 - protein, 119 aa, Unknown
  Bacterial polypetide isolated from the Sargasso Sea
MRALHDEGVELIFGYPGGAALHIYDALFRQDKIEHILVRHEQGATHAADGYARATGKPGVVLVTSGPGATNAITGIATAFMDSIPMVVISGQVASHLIGTDAFQETDMIGISRPVVKHS

SEQ ID NO: 110931 - protein, 244 aa, Unknown
  Bacterial polypetide isolated from the Sargasso Sea
RHEQGATHMADGYARATGKPGVVLVTSGPGATNTVTGILTAQMDSIPMIVICGQTISPMLGKDAFQEADVFGITAPTVKHSYLLTQADDIPRVCKESFHIATTGRPGTVVMDIPKDISSGPCEATFESAKMDLPGYKPTKTADLTDLKAMISHLNAAKKPLLLVGHGAIISNASKDVLALAEQLQAPVVTTKLGKGIIPETHPLAMGMLGMHGTAYANRAVEHCDLILSIGSRWDDRITPADIT

SEQ ID NO: 110932 - protein, 312 aa, Unknown
  Bacterial polypetide isolated from the Sargasso Sea
LFLGMLGMHGTYEANNSMYSCDLMINIGARFDDRITGKVDEFSPKSKKIHVDIDPSSIGKNIKVDLAVVSDVGSFLQALNKRIKEKHKDFLNSNKQNISKWWKDIDKWRQKKSLSFKNSKEVIKPQYAVQRLYELSKNQDTYITTEVGQHQMWAAQHYKFNKPNRWMTSGGLGTMGYGLPAAVGVQIAHPDKLVIDIAGEASVLMTMQEMSTAVQYKLPIKIFILNNQYMGMVRQWQELLHEKNYSESYTAALPDFVKLAEAYGCVGIQATKPDELDDKINEMINTKEPVIFDCRVDPAENCFPMIPSENLT

SEQ ID NO: 110933 - protein, 301 aa, Unknown
  Bacterial polypetide isolated from the Sargasso Sea
MQREGYARSSGKPGVVLVTSGPGATNVVTALTDAYMDSVPLVCISGQVPTHLIGTDAFQECDTTGITRPCTKHNWLVKDIKDLSKTLHEAFRVATTGRPGPVLVDIPKDIQFAKINYSKPKIEKKLNGKSINYFSQNNIDELIGLMNKSKKPIIYSGGGVINSGPEASDALRELVQLTGFPITSTLQGLGAYPGDDNQFLGMLGMHGTYEANNAMHDCDLLINIGARFDDRITGKIDEFSPKSKKVHIDIDPSSINKIIKVDLALVGDVKDVLKGINKTLKKKNIDLRKSNKQKTSKWWEQ

SEQ ID NO: 110934 - protein, 158 aa, Unknown
  Bacterial polypetide isolated from the Sargasso Sea
IPIVGDVKEVLKELIEQLQTAEHGPDTEALAQWWKDIEGWRAKDCLKYDRESEIIKPQYVVEKAWELTDGNAFVCSDVGQHQMWAAQFYRFNKPRRWINSGGLGTMGFGLPAAMGVKMAHPDDDVLCITGEGSIQMCIQELSTCLQYDTPVKIISLNN

SEQ ID NO: 110935 - protein, 237 aa, Unknown
  Bacterial polypetide isolated from the Sargasso Sea
DLRELLPAMSVPTHCEDWLKHCVKLKQQHGWRYDHPGERIFAPLMLKQLSERLPDNSVVCCDVGQHQMWVAQHMSFSHPRNHLSSGGLGTMGFGLPAAIGAQLARPKDTVVTVSGDGSFMMNVQELGTIKRFRLPVKIVIVDNQRLGMVKQWQELFFNERYSETDLSDNPDFVSLAAAFAIPGHSISRKDEVLPALEAMFTWPGPYLLHVRIDETDNVWPLVPPGAANQNMLTEKAQ

SEQ ID NO: 110936 - protein, 333 aa, Unknown
  Bacterial polypetide isolated from the Sargasso Sea
HPEYKFEYVYPDKVTMRSYQPSFKGHTGQIRKAARMLLGAKRPVIYAGGGVIQGEASDKLTALARRLNYPVTNTLMGLGAFPGSDQQFLGMLGMHGFYEANMAMHHSDVILAVGARFDDRVTNTVSKFCPGAKIIHIDIDPASIAKIVPVDIPIVGPVSTILDELDKQLTAQIDGNERALPDPDVLAQWWQQIDSWRDAHGLWHGRRYAESSSIMPQDAILALYDATNGEAYVTSDVGQHQMFAAQYYKFDHPRRWINSGGLGTMGFGLPAAMGIKIALPEADVACVTGEGSIQMNIQELSTCSQYGCPVKIINLRNDYLGMVKPVAGHAVRG

SEQ ID NO: 110937 - protein, 143 aa, Unknown
  Bacterial polypetide isolated from the Sargasso Sea
MPKLLTGAEIVFKALIDQKVEYIFGYPGGAVLPIYDELKNHKSIKHILARHEQGAGHAAEGYARSSGKPGIMLVTSGPGATNAVTALTDAYMDSVPLVCISGQVPTHLIGTDAFQECDTTGITRPCTKHNWLVKDVNKLAKQS

SEQ ID NO: 110938 - protein, 299 aa, Unknown
  Bacterial polypetide isolated from the Sargasso Sea
MGKVNKKLNIKDLENLIKMMKESSKPIFYTGGGVINSGPEASKLLRELVSLTGFPITSTLQGLGAFPGDDPQFLGMLGMHGTYEANNAMHDCDLMINIGARFDDRITGKVDEFSPNSKKIHIDIDPSSVGKNIKVDLAVISDVTPLLKNLIKIFKEKNKDFLNSNKQKTSKWWNQIESWRQKKSLNFKNSNTIIKPQYAVQKLYELTKDKDTFITTEVGQHQMWAAQHYKFDKPNRWMTSGGLGTMGYGLPAAVGVQVANPNKLVIDIAGEASVLMTMQEMSTAVQYKLPIKIFILNNQ

SEQ ID NO: 110939 - protein, 107 aa, Unknown
  Bacterial polypetide isolated from the Sargasso Sea
MSKLYTGAEIVFKCLEDQEVEYIFGYPGGAVLPIYDELKNHSSIKHILVRHEQGAGHAAEGYARSSGKPGVVLVTSGPGATNVVTALTDAYMDSIPLVCISGQVPTH

SEQ ID NO: 110940 - protein, 142 aa, Unknown
  Bacterial polypetide isolated from the Sargasso Sea
MANLMTGAQIVFRALEDQGVKHIFGYPGGAVLPIYDELKNHKKIKHILVRHEQGAGHAAEGYARSSGKPGVMLVTSGPGATNAVTALTDAYMDSVPLVCITGQVPTHLIGTDAFQECDTTGITRPCTKHNWLVKDVKKLSSI

SEQ ID NO: 110941 - protein, 291 aa, Unknown
  Bacterial polypetide isolated from the Sargasso Sea
TLHNKFSQDQIDELVKLLSKTKKPVIYSGGGVINSGPKASQALREFVDLTGFPITSTLQGLGAYPGDDNQFLGMLGMHGTYEANNAMHDCDLLINIGARFDDRITGKIDEFSPNSKKVHIDIDPSSINKIIKVDLAIVGDVTSVISKINKTITKSKNGHSKSNKSNIAKWWEQIEKWREKNSLNFVNSDESIKPQHAVQRLYELTKNKDTYVTTEVGQHQMWAAQHYKFNKPNRWMTSGGLGTMGYGLPAAVGVQIAHPEKLVIDIAGEASVLMTMQEMSTAVQYNLPIKI

SEQ ID NO: 110942 - protein, 131 aa, Unknown
  Bacterial polypetide isolated from the Sargasso Sea
MANLMTGAEIVFQALEDQGVKHIFGYPGGAVLPIYDELKNHKKIKHILVRHEQGAGHAAEGYARSSGKPGVLLVTSGPGATNTVTALTDAYMDSVPIVCISGQVPTHLIGTDAFQECDTTGITRPCTKHNW

SEQ ID NO: 110943 - protein, 295 aa, Unknown
  Bacterial polypetide isolated from the Sargasso Sea
MSKLYSGAEIVFKCLEDQDVEFIFGYPGGAVLPIYDELKNFNFLKHILVRHEQGAGHAAEGYARSSGKPGVLLVTSGPGATNAVTALTDAYMDSVPLVCISGQVPTHLIGTDAFQECDTTGITRPCTKHNWLVKDVKDLEKTIHKAFEVATTGRPGPVLVDIPKDVQFQKTNYTKFKRQKKINGKVHNLFSQKDIDELIKLMSKASKPIFYTGGGVINSGPKASELLRELVNKTGFPITSTLQGLGSYPGEDSQFLGMLGMHGSYEANNAMHDCDLMINIGARFDDRITGKIDEF

SEQ ID NO: 110944 - protein, 254 aa, Unknown
  Bacterial polypetide isolated from the Sargasso Sea
VNATGFPITSTLQGLGSYPGEDSQFLGMLGMHGSYEANNAMHDCDLMINIGARFDDRITGKIDEFSPKSKKVHIDIDPSSINKNVKVDLPIVGDVAEVIASTIKTIKKVKPNFAKSNKQKISKWWEQIQKWRSINSFNFVNSTETIKPQYAVQRLYELTKNKDTYITTEVGQHQMWAAQHYKFDKPNRWMTSGGLGTMGYGLPAAVGVQVAHPNKLVIDIAGEASVLMTMQEMSTAVQYSLPIKIFILNNEYMG

SEQ ID NO: 110945 - protein, 298 aa, Unknown
  Bacterial polypetide isolated from the Sargasso Sea
KKTNFVFKSSNKKKVNGKLKVNEKINNDEIDKIINLMKKSSKPIFYTGGGIINSGPEASKLLRELVSLTGFPITSTLQGLGAYPGDDPLFLGMLGMHGTYEANNSMYSCDLMINIGARFDDRITGKVDEFSPKSKKVHVDIDPSSIGKNIKVDLAIVSDVGSFLKALNKRIKEKHKDFLNSNKPNISKWWKDIDKWRQKKSLSFKNSKEVIKPQYAVQRLYELSKNKDTYITTEVGQHQMWAAQHYKFNKPNRWMTSGGLGTMGYGLPAAVGVQIAHPDKLVIDIAGEASVLMTSKKC

SEQ ID NO: 110946 - protein, 232 aa, Unknown
  Bacterial polypetide isolated from the Sargasso Sea
MKKRMNGAQIVVEALKRQGVEFIFGYPGGACMPIFDALVDAPEQKIILVRHEQGATHMADGYAKATGKTGVVLVTSGPGATNTVTGILTAQMDSVPLVILTGQTITPNLGKDAFQEADVFGVTMPIVKHSYLVRDVKDLSRVVNEAFHLASTGRPGPVLVDLPKDVVSNEWDEDFTSGLDLPGYQVHTSGSTDGIEYAAELLSKSKQPLLYVGAGAVISGAGKQVQKLAEKL

SEQ ID NO: 110947 - protein, 253 aa, Unknown
  Bacterial polypetide isolated from the Sargasso Sea
RIKEKHKDFLNSNKQNISKWWKDIDKWRQKKSLSFKNSKEVIKPQYAVQRLYELSKNKDTFITTEVGQHQMWAAQHYKFNKPNRWMTSGGLGTMGYGLPAAVGVQIAHPDKLVIDIAGEASILMTMQEMSTAVQYKLPIKIFILNNQYMGMVRQWQELLHEKNYSESYTAALPDFVKLAEAYGCVGIQATKPDELDEKINEMINVNEPVIFDCRVDPAENCYPMIPSGKPHNQMLLGPEDEKEEVTDEGKTLV

SEQ ID NO: 110948 - protein, 261 aa, Unknown
  Bacterial polypetide isolated from the Sargasso Sea
INKIIKVDLAIVGDVNEVLKTTIKKINKKQNGSKISNKQNISKWWEQIQKWRTKDSLGFINSDKTIKPQYAVQRLYELTKKQDTFITTEVGQHQMWAAQHYKFNKPNRWMTSGGLGTMGYGLPAAVGVQIAHPNKLVVDIAGEASVLMTMQEMSTAVQYNLPIKIFVLNNQYMGMVRQWQELLHEKNYSESYSEALPDFVKLAEAYGCKGIKVDNPEELDSKIKEMVDHNGPVIFDCQVDPNENCFPMIPSGKPHNQMILG

SEQ ID NO: 110949 - protein, 96 aa, Unknown
  Bacterial polypetide isolated from the Sargasso Sea
MPKLLTGAEIVFKCLEDQKVEHIFGYPGGAVLPIYDELKNHPSIKHILVRHEQGAGHAAEGYARSSGKPGVVLVTSGPGATNVVTALTDAYMDSVP

SEQ ID NO: 110950 - protein, 280 aa, Unknown
  Bacterial polypetide isolated from the Sargasso Sea
QGATHAADGYSRATGKPGVALVTSGPGATNAITGLATAYMDSIPLVVISGQVQSHLIGTDSFQETDMIGISRPVVKHSFIVQNTQDIPQIVQEAFHIATTGRPGPVVIDIPKDKTDPSELFEYKRAKEISLRSYQPRVLPHPGQIKKASKKILSAERPVIYAGGGVILGNAHKELILLNKLLKAPVTNTLMGLGAYPAKDKYFMGMLGMHGTYQANMAMHNADVIIAIGARFDDRITNTPAMFAPNAKIVHIDVDPASISKIINADIPIVGQVKESLNAL

SEQ ID NO: 110951 - protein, 271 aa, Unknown
  Bacterial polypetide isolated from the Sargasso Sea
FCFKIIEANIAVFGQVKNSLIELNKQLKDKIDSIDSTLIQPWLDEIEEWTSLHGLNHELYKENSDEKKIMPQSVVQHVYQITDGNAFVTSDVGQHQMFAAQYYHFNEPRKWINSGGLGTMGFGLPAAMGVKLAFPKEEVVCITGEGSIQMCIQELSTCSQYNLPIKIININNEALGMVKQWQDMSYGGRHSESTYQSSLPNFIELVESYGHIGFKIEKNSDLKGILDEAFSIKDKLVFVDVYVDPDEHVYPMLVAPNGSLKDMWIDKDKKV

SEQ ID NO: 110952 - protein, 297 aa, Unknown
  Bacterial polypetide isolated from the Sargasso Sea
MKKKKISGAEAVIHSLLNEGIDLVWGYPGGAIMPVYDEFYKFQDKLKHILARHEQGAIHAAQGYARSSGKVGVAIATSGPGATNLVTGIADAQIDSTPVVCITGQVPSHLLGSDAFQETDIIGISMPVTKWNYQITKASEIPDIFAKAFYIAKSGRPGPVLIDITKDAQFELFDYEYSKCKGIRSYNPLPKINSSSIDDAVRLINNAKKPFIVWGQGVILGNAEDEFKSFVEKSGIPAAWTILGASALPTSHELNVGMVGMHGNYGPNLLTNECDLLVAIGMRFDDRVTGDPKTYAN

SEQ ID NO: 110953 - protein, 297 aa, Unknown
  Bacterial polypetide isolated from the Sargasso Sea
DIPKDIQFQKAKYTNFKKQKKLNGKSNIRFSQKDIDKLIEMMGRAKQPIFYTGGGVINSGPKASEKLRELVSITGFPITSTLQGLGSFPGDDNQFLGMLGMHGTYEANNAMHDCDLMINIGARFDDRITGKIDEFSPKSKKVHIDIDPSSINKNVKVDLPIVGDVSDVISSLIKTIKKNKPNFLKSNKENTSKWWEQIAKWRSVNSLNFINSDKTIKPQFAIQRLYELTKNKDTFITTEVGQHQMWAAQHYKFDKPNRWMTSGGLGTMGYGLPAAVGVQIAHPDKLVVDIAGEASVL

SEQ ID NO: 110954 - protein, 114 aa, Unknown
  Bacterial polypetide isolated from the Sargasso Sea
MPKLLTGAEIVFKCLEDQRVEHIFGYPGGAVLPIYDELKNHPSIKHILVRHEQGAGHAAEGYARSSGKPGVVLVTSGPGATNVVTALTDAYMDSVPLVCISGQVPTHLIGTDAF

SEQ ID NO: 110955 - protein, 274 aa, Unknown
  Bacterial polypetide isolated from the Sargasso Sea
QKKINGKSRNNYNQKDINKLIELMSKSSKPIFYTGGGVINSGPKASNLLRELVSITGFPITSTLQGLGSFPGDDNQFLGMLGMHGSYEANNAMHDCDLMINVGARFDDRITGKIDEFSPNSKKVHIDIDPSSINKNVKVELPIVGDVANVISSTIKTIKKSKPNFTKSNKQKISKWWQRIEKWRSVNSFNFVNSAQTIKPQYAVQRLYELTKNEDTYITTEVGQHQMWAAQHYKFDKPNRWMTSGGLGTMGYGLPAAVGVQVAHPDKLVIDIAG

SEQ ID NO: 110956 - protein, 244 aa, Unknown
  Bacterial polypetide isolated from the Sargasso Sea
MPKLYTGAEIVFKCLEDQKVEHIFGYPGGAVLPIYDELKNHTSIKHILVRHEQGAGHAAEGYARSSGKPGVVLVTSGPGATNVVTALTDAYMDSVPLVCISGQVPTHLIGTDAFQECDTTGITRPCTKHNWLVKDINDLSEIMHEAFKVATTGRPGPVLVDIPKDIQFAKAKYKKPKKEKKLNGKSNNKFSQKQIDQLIDLLKNTKKPVIYSGGGVINSGPKASDALREFVELTGFPITSTLQG

SEQ ID NO: 110957 - protein, 309 aa, Unknown
  Bacterial polypetide isolated from the Sargasso Sea
EIVLKSLAEQGVEVVFGYPGGAVLPIYDTLFKQNSIKHVLVRQEGGAIHAAEGYARSTGKTGVVLVTSGPGATNVVTGLTDAMMDSVPIVCITGQVPQHLIGSDAFQECDTTGITRPCTKHNYLVKDVNKLSSVFHEAFTIAQNGRPGPVLVDIPKDVQFASGAYEEKNKIIIPSHRLFEPSPDFEKSKIEEAVELISKAKKPIFYIGGGCINSGPKASKLVREFINMVGSPVTMTLMGLGVVGSSDKNSLGMLGMHGMYEANMAMHECDVMINIGARFDDRVTGRLDAFSPNSKKFILISMKVILIKL

SEQ ID NO: 110958 - protein, 280 aa, Unknown
  Bacterial polypetide isolated from the Sargasso Sea
DPSSIGKTIKVDLAVVSDVVNFLKSLNKRFKEKNKDFLNSNKSNTSKWWKDIDKWRQKKSLGFKNSDKVIKPQHAVKRLYELSKHKDAYITTEVGQHQMWAAQHYKFNKPNRWMTSGGLGTMGYGLPAAVGVQVANPDKLVIDIAGEASVLMTMQEMSTAVQYNLPIKIFILNNQYMGMVRQWQELLHEKNYSESYTAALPDFVKLAEAYGCVGIQAKKPDELDEKINEMLNVNKPVIFDCLVDPNENCFPMIPSGKPHNQMLLGPEDEEEISSEGKVLV

SEQ ID NO: 110959 - protein, 283 aa, Unknown
  Bacterial polypetide isolated from the Sargasso Sea
MAIEKLSGADALMRSLKEEGVELIFGYPGGASLHIYDALFNQEDIEHILVRHEQGAVHAADGYARACGKPGVVFVTSGPGATNAITGLATAYMDSIPVVVISGQVKSHLIGTDSFQETDMIGVSRPIVKHSFLAQRAEDIPEIVKKAFHIATTGRPGPVVIDIPKDVSEPSYTFDFSYPEEVDIRSYKPVEEGHSGQIRRAAKLILKSEKPVIYTGGGVIQDEASEELTKLAKMLNFPVTNTLMGLGAYPGTDEQFIGMLGMHGTYQANMVMHECDLILAVGA

SEQ ID NO: 110960 - protein, 316 aa, Unknown
  Bacterial polypetide isolated from the Sargasso Sea
FEANNAMHDCDLMINIGARFDDRITGKVDEFSPKSKKIHVDIDPSSIGKNIKVDLAVVSDVSELLKGLIKRFKEKNKNFSNSNKQKTSKWWEQIDKWREKKSLNFINSNKIIKPQHAVQRLYELTKDQDTFITTEVGQHQMWAAQHYKFNKPNRWMTSGGLGTMGYGLPAAIGVQIANPGKLVIDIAGEASVLMTMQEMSTAVQYRLPIKIFILNNEYMGMVRQWQELLHEKNYSESYTAALPDFVKLAESYGCVGIRAKTPDELDEKIKEMINVQKPVIFDCMVDKSENCFPMIPSGKTHNKMILGPEEDDEISD

SEQ ID NO: 110961 - protein, 279 aa, Unknown
  Bacterial polypetide isolated from the Sargasso Sea
IHVDIDPSSIGKNIKVDLAVVSDVENFLKALNKRFKEKNKDFLNSNKSNISTWWKDIDKWRQKKSLSYKNSKEVIKPQYAVQRLYELSKDKDAYITTEVGQHQMWAAQHYKFNKPNRWMTSGGLGTMGYGLPAAVGVQVANPGKLVIDIAGEASVLMTMQEMSTAVQYKLPIKIFILNNQYMGMVRQWQELLHEKNYSESYTAALPDFVKLAEAYGCVGIQAKKPDELDEKINEMINVNKPVIFDCLVDPMENCFPMIPSGKPHNQMLLGPEDEKEEVS

SEQ ID NO: 110962 - protein, 113 aa, Unknown
  Bacterial polypetide isolated from the Sargasso Sea
MSKLYSGAEIVFKCMEDQNVDHIFGYPGGAVLPIYDELQNFKSIKHVLVRHEQGAGHAAEGYARSSGKPGVILVTSGPGATNVVTALTDAYMDSIPLVCISGQVPTHLIGTDA

SEQ ID NO: 110963 - protein, 129 aa, Unknown
  Bacterial polypetide isolated from the Sargasso Sea
MPKLYSGAEIVFKCLEDQGVSHIFGYPGGAVLPIYDELKNFNSIKHILVRHEQGAGHAAEGYARSTGKPGVLLVTSGPGATNAVTALTDAYMDSVPLVCITGQVPTHLIGTDAFQECDTTGITRPCTKH

SEQ ID NO: 110964 - protein, 303 aa, Unknown
  Bacterial polypetide isolated from the Sargasso Sea
AFQECDTTGITRPCTKHNWLVKDVNDLARVLHLAFEVATTGRPGPVLVDIPKDIQFKKGKYKFFKSSLKKRLNGKATHKIDNSELDKFIDLIKKSSKPIFYTGGGVINSGPEASEKLRELVSLTGFPITSTLQGLGAFPGDDPQFLGMLGMHGTYEANNAMHDCDLMINIGARFDDRITGKVDEFSPRSKKIHVDIDPSSIGKNIKVDLAIVSDVSVLLKSLIKRFKEKNKNFLNSNKQKTSKWWEQIDKWREKKSLNFINSDKIIKPQHAVKRLYELTKDRDTFVTTEVGQHQMWAAQHYKF

SEQ ID NO: 110965 - protein, 222 aa, Unknown
  Bacterial polypetide isolated from the Sargasso Sea
MGKLISGAEIVFKVLEHHKVEHIFGYPGGAVLPIYDELKNHKTIKHILARHEQGAGHAAEGYARSSGKPGVLLVTSGPGATNAVTALTDAYMDSVPLVCISGQVPTHLIGTDAFQECDTTGITRPCTKHNWLVKDVNQLAKIMDLAFEVATTGRPGPVLVDIPKDIQFKKTNFVLKSSNKKKLNGKSKPNGKISPSDLDKVINLMKKSSKPIFYTGGGVINS

SEQ ID NO: 110966 - protein, 314 aa, Unknown
  Bacterial polypetide isolated from the Sargasso Sea
IETVQRLEKASKPIIYSGGGVINSGEKAVNLLRKLVSKTNFPITSTLMGLGSYPASGNNWLGMLGMHGTYEANMSMHDCDFMLCVGARFDDRITGRIDAFSPNSFKVHIDIDPSSVNKNVTVDVPLIGDVSIILEELIATWEKRGSKVSSQKLGQWWKEIGEWKNVKSLQYTNSSSVIKPQYALQRLEEHTRGHDRYISTEVGQHQMWAAQFMGFEEPNRWMTSGGLGTMGYGFPASLGIQVAHPKSLVINVAGEASWLMNMQELGTAVQYRLPVKQFILNNERLGMVRQWQELLHGERYSHSWSDALPDLKSC

SEQ ID NO: 110967 - protein, 78 aa, Unknown
  Bacterial polypetide isolated from the Sargasso Sea
MKKRMNGAQIVVEALKRQNVEYIFGYPGGACMPIFDALVDAPEQKIILVRHEQGATHMADGYAKATGKPGVVLVTSGP

SEQ ID NO: 110968 - protein, 204 aa, Unknown
  Bacterial polypetide isolated from the Sargasso Sea
MYELTKDKDTYVTTEVGQHQMWAAQHYKFNKPNRWMTSGGLGTMGYGLPAAVGVQIAHPEKLVVDIAGEASVLMTMQEISTAVQYNLPIKIFILNNQYMGMVRQWQELLHEKNYSESYSEALPDFLKMAEAYGCKGIKAENPSELDGKIQEMIDYKGPVIFDCHVDPNENCFPMIPSGKPHNQMILGPNDQEENKIKGKGKALV

SEQ ID NO: 110969 - protein, 272 aa, Unknown
  Bacterial polypetide isolated from the Sargasso Sea
VDLPIVGDVTEVINLTLKTIKKARPNFVKSNKQNISQWWEKIEKWRSVNSLNYENSTETIKPQYAVQRLYELTKDKDAYITTEVGQHQMWAAQHYKFNKPNRWMTSGGLGTMGYGLPAAVGVQVAHPKKLVIDIAGEASVLMTMQEMSTAVQYSLPIKIFILNNEYMGMVRQWQELLHDKNYSESYTAALPDFVKLAEAYGCVGLRATTPEELDDKIIEMLNIEKPVIFDCRVDKIENCFPMIPSGKPHNEMLLGPNDKKEKKITGKGKTLV

SEQ ID NO: 110970 - protein, 245 aa, Unknown
  Bacterial polypetide isolated from the Sargasso Sea
MTSRFVGPVDTILEELDKQVALQMEDAERALPDPEALAQWWQQVDSWREAHGLWHGRRYGESASIMPQDAICALYEATNGEAYVTSDVGQHQMFAAQYYKFDYPRRWVNSGGLGTMGFGLPAAMGIKIALPDADVACVTGEGSIQMNIQELSTCSQYGCPVKIINLRNDYLGMVKQWQDMQYEGRYSESHYAASLPDFVKLAEAYGHVGYGGQISIRLVACDEGSLCPGRQLVFLDIHIDPDEHV

SEQ ID NO: 110971 - protein, 271 aa, Unknown
  Bacterial polypetide isolated from the Sargasso Sea
MTIPSQKFPYEYPKEIKLRSYNPNAKGHPGQIKKALTTLLAAKKPVLYAGGGVILGQASEELTVLARKLNLPVTNTLMGLGAYPASDPQFIGMLGMHGSYEANQVMHNADVIFAVGARFDDRVTNATKKFCPNATIIHIDIDPASISKTINAHIPIVGLVKPVLQEMLHQLEKNKGELDKEALGQWWQQIKQWREVHGGRYDQSPSHLKPQAVIEAVHRHTKGDAYVTSDVGQHQMFAAQYYKFDKPNRWINSGGLGTMGFGLPAAMGVKL

SEQ ID NO: 110972 - protein, 114 aa, Unknown
  Bacterial polypetide isolated from the Sargasso Sea
MSKLYTGAEIVFKCLEDQEVEYIFGYPGGAVLPIYDELKNHSSIKHILVRHEQGAGHAAEGYARSSGKPGVVLVTSGPGATNVVTALTDAYMDSIPLVCISGQVPTHLIGTDAF

SEQ ID NO: 110973 - protein, 241 aa, Unknown
  Bacterial polypetide isolated from the Sargasso Sea
MSKLYSGAEIVFKCLEDQEVEFIFGYPGGAVLPIYDELKNFNSIKHILVRHEQGAGHAAEGYARSSGKPGVLLVTSGPGATNAVTALTDAYMDSVPLVCISGQVPTHLIGTDAFQECDTTGITRPCTKHNWLVKNVADLEKTIHKAFEVATTGRPGPVLVDIPKDVQFQKTKYTKFKKQKKLNGKVNNQFSQKDIDELIKLMSKASKPIFYTGGGVINSGPKASELLRELVNTTGFPITST

SEQ ID NO: 110974 - protein, 206 aa, Unknown
  Bacterial polypetide isolated from the Sargasso Sea
MSKLYTGAEIVFKCLEDQEVEYIFGYPGGAVLPIYDELKNHSSIKHILVRHEQGAGHAAEGYARSSGKPGVVLVTSGPGATNVVTALTDAYMDSVPLVCISGQVPTHLIGTDAFQECDTTGITRPCTKHNWLVKDIKDLSKVMHEAFKVATTGRPGPVLIDIPKDIQFAKSNYSKLKKEKKLNGKTHNKFSQNEIDLLIELISKAK

SEQ ID NO: 110975 - protein, 326 aa, Unknown
  Bacterial polypetide isolated from the Sargasso Sea
DAFQECDTVGITRPCTKHNWLVKDINDYQRILHEAFYVASNGRPGPVLVDIPKDIQFQTGTYIGPETVKHKSYRPKLKASIDTIDEALQLISSAEKPVFYTGGGVINSGNAAVQLLREFVRLTGFPITSTLQGLGAFPGDDNQFIGMLGMHGTYEANMTMNQCDLMINIGARFDDRITGKVDEFSPNSKKIHIDIDPSSINKTVNVDVPIIGDVAHVLEDAIKLWKTKVYKTNKAEIKNWWSTIDQWRKKDSLKFDQGKKTIKPQYAIQRLYELTKDQDTFVTTEVGQHQMWAAQHYKFSKPNRWITSGGLGTMGFGFPAALGVQV

SEQ ID NO: 110976 - protein, 297 aa, Unknown
  Bacterial polypetide isolated from the Sargasso Sea
NQFLGMLGMHGSYEANNAMHDCDLMINIGARFDDRITGKIDEFSPNSKKVHIDIDPSSINKNVKVDLPIVGDVAEVISSTIKTIKKVKPDFSKSNNQRISKWWEKIQKWRSVNSFNFVNSSETIKPQYAIQRLYELTKNKDTYVTTEVGQHQMWAAQHYKFDKPNRWMTSGGLGTMGYGLPAAVGVQVAHPNKLVIDIAGEASVLMTMQEMSTAVQYSLPIKIFILNNEYMGMVRQWQELLHDKNYSESYTAALPDFVKLAEAYGCVGMRATKPEELDDKIIEMINTDRSVIFDCLV

SEQ ID NO: 110977 - protein, 247 aa, Unknown
  Bacterial polypetide isolated from the Sargasso Sea
IFGKSNKQKISKWWEKIEKWRSVRSLDYINSEETIKPQYAVQRLYELTKDKDTFITTEVGQHQMWAAQHYKFDKPNRWMTSGGLGTMGYGLPAAIGVQVAHPSKLVVDIAGEASVLMTMQEMSTAVQYSLPIKIFILNNEYMGMVRQWQELLHDKNYSESYTAALPDFVKLAEAYGCVGIRASTPEELDDKIIEMLNTERPVIFDCRVDKIENCFPMIPSGKPHNQMLLGPKDQKENKITGKGKTLV

SEQ ID NO: 110978 - protein, 264 aa, Unknown
  Bacterial polypetide isolated from the Sargasso Sea
PGGAVLPIYDALFKQNRLKHILVRQEGGAVHMAEGYARSTGKLGVVLVTSGPGATNAVTGLTDAMMDSVPVLCLTGQVPTHLIGNDAFQEADTTGITRPCTKHNYLVKDVSKLAKIMKEGMYVAQTGRPGPVVIDLPKDVLINETQYEISNKTYLRHKTYRPRKKGDPIKIKEAINLIANAKRPLFYCGGGVINSGLKGSKLLTEFVNTTGFPITLTLMGLGAFPAEDKKFLGMVGMHGTYESNLAMHGCDVMINIGARFDDRV

SEQ ID NO: 110979 - protein, 165 aa, Unknown
  Bacterial polypetide isolated from the Sargasso Sea
MTGAQMVLKALEDQQVDTIFGYPGGAVLPIYDELAKTKDTNHQIRHFLVRHEQGASHAAEGYARSSGKVGVMLVTSGPGVTNAVTGLTDAMMDSIPLVCISGQVPTHLIGTDAFQECDAVGITRPCTKHNWLVKDISDLSRILHEAFYVASSGRPGPVLVDIPKD

SEQ ID NO: 110980 - protein, 89 aa, Unknown
  Bacterial polypetide isolated from the Sargasso Sea
MKIAGNDILIQSLINEGVEYIFGYPGGAALHIYDSIFNQKEMQHILVRHEQGATHAADGYARATGKPGVVLVTSGPGATNAITGIATAF

SEQ ID NO: 110981 - protein, 262 aa, Unknown
  Bacterial polypetide isolated from the Sargasso Sea
ELVNATGFPITSTLQGLGSYPADDDQFLGMLGMHGTYEANNAMYECDLMINIGARFDDRITGKIDEFSPKSKKIHIDIDPSSINKNVKVDLAIVGDVKTVVSSIIKTLKKKNPNFIKSNNQRTSRWWEKIQKWRAKRSLDYIGSEETIKPQYAIERLYELTKDKDAYITTEVGQHQMWAAQHYKFNKPNRWMTSGGLGTMGYGLPAAVGVQVAHPNKLVIDIAGEASVLMTMQEMSTAVQYSLPIKIFILNNEYMGMVRQWQ

SEQ ID NO: 110982 - protein, 287 aa, Unknown
  Bacterial polypetide isolated from the Sargasso Sea
LRDFVELTGFPITSTLQGLGAYPGDDNQFLGMLGMHGTYEANNAMHDCDLLINIGARFDDRITGKIDEFSPNSKKVHIDIDPSSINKIIKVDLAIVGDVSSVISKINKTIAKRKNGHSKSNKSNIAKWWEQIEKWREKDSLNFVNSDESIKPQHAVQRLYELTKNKDTYVTTEVGQHQMWAAQHYKFNKPNRWMTSGGLGTMGYGLPAAVGVQIAHPEKLVIDIAGEASVLMTMQEMSTAVQYNLPIKIFILNNQYMGMVRQWQELLHEKNYSESYSEALPDFMKMA

SEQ ID NO: 110983 - protein, 304 aa, Unknown
  Bacterial polypetide isolated from the Sargasso Sea
KNKIIIPSHRLFEPSPDFEKNKIEEAVELISKAKKPIFYIGGGCINSGPMASKLVREFINMVGSPVTMTLMGLGVVGSSDKNSLGMLGMHGMYEANMAMHECDVMINIGARFDDRVTGRLDAFSPNSKKIHIDIDESNINKTINVDVPIIGDVKQVVEKMITVWKEKKFQIDDKALKLWWDKINKWKDIDCLNYNNEGKQIKPQYAVQRLYELTKNTKTFITTEVGQHQMWAAQFYKFEEPNRWLTSGGLGTMGYGFPAAIGAQVGHPDALVVDIAGDASILMNIQEMSTAVQYRLPVKIFIFK

SEQ ID NO: 110984 - protein, 183 aa, Unknown
  Bacterial polypetide isolated from the Sargasso Sea
MSKLYSGAEIVFKCLEDQNVEFIFGYPGGAVLPIYDELKNFNFLKHILARHEQGAGHAAEGYARSSGKPGVLLVTSGPGATNAVTALTDAYMDSVPLVCISGQVPTHLIGTDAFQECDTTGITRPCTKHNWLVKDIKDLEKTIHKAFEVATTGRPGPVLVDIPKDVQFQKTNYKKFKKQKKLN

SEQ ID NO: 110985 - protein, 207 aa, Unknown
  Bacterial polypetide isolated from the Sargasso Sea
CSRLYELTKNKETFITTEVGQHQMWAAQFYKFEKPNRWLTSGGLGTMGYGFPAAIGAQVGNPDALVIDIAGDASILMNIQEMSTAIQYRLPVKIFILNNEYMGMVRQWQELLHGGRYSESYTDSLPDFVKLAESYKAKGLRAKTTDELDNVINQMIETQDTVIADIWVTKEENCFPMIQSGSAHNEMLLSKDQKQDKKSAEKGKILV

SEQ ID NO: 110986 - protein, 279 aa, Unknown
  Bacterial polypetide isolated from the Sargasso Sea
FSPKSKKVHIDIDPSSINKIIKVDLAIVGDVNEVMKSIIKKMNKKQNGLKDSNKQRISKWWEQISKWRTKDSLGFINSDKEIKPQHAVKRLYELTKNQDTFITTEVGQHQMWAAQHYKFNKPNRWMTSGGLGTMGYGLPAAVGVQIAHPDKLVIDIAGEASVLMTMQEMSTAVQYNLPIKIFILNNQYMGMVRQWQELLHEKNYSESYSEALPDFVKLAEAYGCKGIKADNPNDLDDKIKEMIDFKGPVIFDCHVDPNENCFPMIPSGKPHNQMILGPN

SEQ ID NO: 110987 - protein, 291 aa, Unknown
  Bacterial polypetide isolated from the Sargasso Sea
MTQANKITGAEIVIKALIDQGVDTVFGYPGGAILPIYDELFQQKKIKHILVRHEQAATHAAEGYARSTGKIGVVFVTSGPGATNSVTGLTDALMDSVPIVVISGQVPTFMIGNDAFQEADTVGITRPCTKHNWLVKDTNKLAETIHKAFEVAGSGRPGPVLVDVPKDVQFASGRYTKKNEIKKDFIKKEPPIDLNMLNEAINRLELAERPIIYSGGGVINSGQSAVNSLRNLVAGTNFPITSTLLGLGSYPASGKNWLGMLGMHGTYEANMSMHDCDFMLCIGARFDDRIT

SEQ ID NO: 110988 - protein, 187 aa, Unknown
  Bacterial polypetide isolated from the Sargasso Sea
MATASRTHATDAFVSGADVVVESLIRQGVEVIFAYPGGASMPLHQSLTKFQEKIRTILPRHEQGGGFAAQGYARTTGKPGVCMATSGPGATNLVTAIADAKMDSIPLIALTGQVGTSVIGTDAFQETPIVEVCRGITKHHYLITDAEDIPRVMREAFHIATTGRPGPVLIDLPKNIQLSNIVLDYEA

SEQ ID NO: 110989 - protein, 101 aa, Unknown
  Bacterial polypetide isolated from the Sargasso Sea
MSKLYTGAEIVFKCLEDQEVEYIFGYPGGAVLPIYDELKNHSSIKHILVRHEQGAGHAAEGYARSSGKPGVVLVTSGPGATNVVTALTDAYMDSVPLVCIS

SEQ ID NO: 110990 - protein, 244 aa, Unknown
  Bacterial polypetide isolated from the Sargasso Sea
MSNKQNISKWWEQIQKWRTKNSLGFINSEKTIKPQHAVQRLYELTKNQDTFVTTEVGQHQMWAAQHYKFNKPNRWMTSGGLGTMGYGLPAAVGVQIAHPDKLVIDIAGEASVLMTMQEMSTAVQYNLPIKIFVLNNQYMGMVRQWQELLHEKNYSESYSEALPDFVKLAEAYGCKGIKVDNPDELDSKIKEMIDHDGPVIFDCQVDPNENCFPMIPSGKPHNQMILGPNEKEENKITGKGKALV

SEQ ID NO: 110991 - protein, 256 aa, Unknown
  Bacterial polypetide isolated from the Sargasso Sea
GPVKPVLADMVEMLNQMDVEPEQDALSAWWETINGWREKHGLWTGDRFTRCDKIMPQDVIRTLYEVTNGEAFICSDVGQHQMFAAQYYKYDQPRQWINSGGLGTMGFGLPAAMGVQLAHPDRQVAVVTGEGSIQMCIEELSTCTQYNMPVKIINLNNAALGMVKQWQDMQYGGRYAASTYADSLPDFVKLAEAYGHVGMIVTDPSELKAKMEECFAMKDRVVFMDIYIDPDEHVYPMQIPTGSMKDMILSKTERTK

SEQ ID NO: 110992 - protein, 300 aa, Unknown
  Bacterial polypetide isolated from the Sargasso Sea
KEKKLNGKSHNKFSQNQIDELVKLLSKAKKPIIYSGGGVINSGLKASQALREFVELTGFPITSTLQGLGAYPGDDNQFLGMLGMHGTYEANNAMHDCDLLINIGARFDDRITGKIDEFSPNSKKVHIDIDPSSINKIIKVDLAIVGDVSSVINKINKTITKSNNGNIKSNKSNIAKWWEQIEKWREKNSLNFVNSDESIKPQHAVQRLYELTKSKDTYITTEVGQHQMWAAQHYKFNKPNRWMTSGGLGTMGYGLPAAVGVQIAHPEKLVIDIAGEASVLMTMQEMSTAVQYNLPIKIFI

SEQ ID NO: 110993 - protein, 263 aa, Unknown
  Bacterial polypetide isolated from the Sargasso Sea
VSLTGFPITSTLQGLGAYPGDDPLFLGMLGMHGTYEANNSMYSCDLMINIGARFDDRITGKVDEFSPKSKKIHVDIDPSSIGKNIKVDLAVVSDVGSFLKALNKRIKEKHKDFLNSNKQNISKWWKDIDKWRQKKSLSFKNSKEVIKPQYAVQRLYELSKNQDTYITTEVGQHQMWAAQHYKFNKPNRWMTSGGLGTMGYGLPAAVGVQIAHPDKLVIDIAGEASVLMTMQEMSTAVQYKLPIKIFILNNQYMGMVRQWQELL

SEQ ID NO: 110994 - protein, 208 aa, Unknown
  Bacterial polypetide isolated from the Sargasso Sea
MSKLYSGAEIVFKCLEDQKVDFIFGYPGGAVLPIYDELKNHNSIKHILVRHEQGAGHAAEGYARSSGKPGVVLVTSGPGATNVVTALTDAYMDSVPLVCISGQVPTHLIGTDAFQECDTTGITRPCTKHNWLVKDVKDLSKTIHEAFRVATSGRPGPVLVDIPKDIQFAKIAYSKPKFNKKLNGKTLNHFTKKDIDELIDLMNKSKKP

SEQ ID NO: 110995 - protein, 177 aa, Unknown
  Bacterial polypetide isolated from the Sargasso Sea
DVTELLKSLIKRFKEKNKNFVNSNKQKTSKWWEQISKWREKKSLNFINSDKIIKPQYAVQRLYELTKNQDTFVTTEVGQHQMWAAQHYKFNKPNRWMTSGGLGTMGYGLPAAIGVQIANPGKLVVDIAGEASVLMTMQEMSTAVQYRLPIKIFILNNEYMGMVRQWQELLHEKNYSE

SEQ ID NO: 110996 - protein, 108 aa, Unknown
  Bacterial polypetide isolated from the Sargasso Sea
MSKLYSGAEILFKCLMDQGVTNIFGYPGGAVLPIYDELKNFNLIKHILVRHEQGAGHAAEGYARSSGKPGVLLVTSGPGATNAVTALTDAYMDSVPLVCISGQVPTHL

SEQ ID NO: 110997 - protein, 252 aa, Unknown
  Bacterial polypetide isolated from the Sargasso Sea
GAEVILKVLKDHSVDHIFGYPGGAVLPLYDEIFKSNDSPQHILVRHEQGAAHAAEGYARSTGKPGVLVVTSGPGATNAVTGLTDAMMDSIPLVCISGQVPTHLIGTDAFQEADTVGITRPCTKHNWLVKDPDELCRILHEAFYVATSGRPGPVVVDIPKDIQFADANYFPPNEIKTENYNPQIKPDMRFIDEAIELMANAKKPVFYTGGGVINSGSEASHLLKELVLLTGFPITSTLMGLGAFPSTENNWLG

SEQ ID NO: 110998 - protein, 207 aa, Unknown
  Bacterial polypetide isolated from the Sargasso Sea
MSKLYSGAEIVFKCLEDQDVKFIFGYPGGAVLPIYDELKNFSFIKHILVRHEQGAGHAAEGYARSSGKPGVLLVTSGPGATNAVTALTDAYMDSIPLVCISGQVPTHLIGTDAFQECDTTGITRPCTKHNWLVKDIKDLGKTIHKAFEVATSGRPGPVLVDIPKDVQFQKTSYKKFTKQKKLNGKIHNKFSQKEINELIKLMSNATR

SEQ ID NO: 110999 - protein, 99 aa, Unknown
  Bacterial polypetide isolated from the Sargasso Sea
MLLSGAEIVIKSLKELNVEYIFGYPGGAILPLYDEIFKQNKIRHILVRHEQGAVHMAEGYARSTGKVGVVLVTSGPGATNAVTGLTDALMDSVPILCLT

SEQ ID NO: 111000 - protein, 143 aa, Unknown
  Bacterial polypetide isolated from the Sargasso Sea
MLSGGDMIVRALEDEGVEYIFGYPGGAALHIYDALFKAEKVPHILVRHEQAATHAADGYARATGKPGVVLVTSGPGATNAITGIATAYMDSIPLVVISGQVQSHLIGEDAFQETDMVGISRPIVKHSFLIQKVEDIPLIIKKA

SEQ ID NO: 111001 - protein, 117 aa, Unknown
  Bacterial polypetide isolated from the Sargasso Sea
MSKLYTGAEIVFKCLEDQDVEYIFGYPGGAVLPIYDELKNHSSIKHILVRHEQGAGHAAEGYARSSGKPGVVLVTSGPGATNVVTALTDAYMDSVPLVCICGQVPTHLIGTEHSKSV

SEQ ID NO: 111002 - protein, 192 aa, Unknown
  Bacterial polypetide isolated from the Sargasso Sea
LKVRDFSPEAFITTDVGQHQMWAAQYLRNAPRKWISSAGLGTMGFGLPAAMGVKAALPNEEVICIAGDASVLMNIQELGTLSQYGLNIKLVIINNRWQGMVRQWQESFYEERYSSSDMSCGEPDFVKLAESFGVKGFLISERKQLLNEFKSALDFDGPALINVRVRRGENCYPMVPPGKSNAQMVGYVNSES

SEQ ID NO: 111003 - protein, 295 aa, Unknown
  Bacterial polypetide isolated from the Sargasso Sea
GRPGPVLVDIPKDIQFAKTNYSKPKKIKKVNGKSHNKFTQNEINELINLISKAKKPMIYTGGGVINSGPKASEALREFVRLVGFPITSTLQGLGAFPGDDNQFIGMLGMHGTYEANNAMHDCDLLINIGARFDDRITGKIDEFSPKSKKVHIDIDPSSINKIIKVDLAIVGDVNEVLKSTIKKINQKQNGIKVSNKQKISKWWERIQKWREKDSLGFINSDKSIKPQHAVQRLYELTKSQDTFITTEVGQHQMWAAQHYKFNKPNRWMTSGGLGTMGYGLPAAVGVQIAHPDKLV

SEQ ID NO: 111004 - protein, 134 aa, Unknown
  Bacterial polypetide isolated from the Sargasso Sea
MDKSNKSGAEALIHSLHLEGVELMFGYPGGAALHIYDAIFNQNYVDHILVRHEQGAVHAADGYARATGKPGVALVTSGPGATNAITGLATAYMDSTPIVVISGQVKSGLIGTDSFQETDMIGVSRPIVKHSFLV

SEQ ID NO: 111005 - protein, 259 aa, Unknown
  Bacterial polypetide isolated from the Sargasso Sea
NFLGMLGMHGTYEANLAMYHCDVMINIGARFDDRVTGRLDSFSPNSKKIHVDIDPSSINKVVQVEVPLIGDVKYILKNILIELDKKILEGGTNNNKSWWSQIDQWKSKNSLYFKQSGETIKPQHAVKCLYDKTKKVNPFVTTEVGQHQMWAAQYFGFSKPNHWMTSGGLGTMGYGLPSSIGVQIAHPKSLVIDISGEASFLMNMQELSTIVQYKLPVKVFILNNQWMGMVRQWQELIHGSRYRESYTESLPDFVKLAES

SEQ ID NO: 111006 - protein, 281 aa, Unknown
  Bacterial polypetide isolated from the Sargasso Sea
GAEIVFKVLEHHKVEHIFGYPGGAVLPIYDELKNHEKIKHILARHEQGAGHAAEGYARSSGRPGVLLVTSGPGATNAVTALTDAYMDSIPLVCISGQVPTHLIGTDAFQECDTTGITRPCTKHNWLVKDIKDLARIMNLAFEVATTGRPGPVLVDIPKDIQFQKTEFNLKNNSKKKINGRINGKINLTEIDKVINLIKKSSKPIFYTGGGVINSGPDASKLLRELVSLTGFPITSTLQGLGAYPGEDPQFLGMLGMHGTYEANNAMYNCDLMINIGARFDD

SEQ ID NO: 111007 - protein, 270 aa, Unknown
  Bacterial polypetide isolated from the Sargasso Sea
MTANYINGAEAVIKALEENGVEVIFGYPGGAVLPLYDALFENKKIKHILVRHEQAAVHAAEGYARSTGKVGCVLVTSGPGATNAITGLTDALMDSVPIICLSGQVPTHLIGTDAFQEADTTGISRPCTKHNYLVKDATQLCEIIHKSFVIASSGRPGPVLIDLPKDIQLSKVKYVNKNTKIKKHNNDNSSNIDESLINKVATLLLQAERPIIYGGGGVVNSGPEASKLLTELVNILDCPVTLTLMGLGCVPNTNKNFLGMLGMHGTYEAN

SEQ ID NO: 111008 - protein, 264 aa, Unknown
  Bacterial polypetide isolated from the Sargasso Sea
MPKLYSGAEIVFKCLEDQNVSHIFGYPGGAVLPIYDELKNFNSIKHILVRHEQGAGHAAEGYARSTGKPGVLLVTSGPGATNAVTALTDAYMDSVPLVCITGQVPTHLIGTDAFQECDTTGITRPCTKHNWLVKDVNDLAGIMHKAFEVATTGRPGPVLVDIPKDIQFQKSKYKNYKNNKNLNGKSHDNYSQKNIDELINLISKAKKPIFYTGGGVINSGTKASELLRELVYLTGFPITSTLQGLGCFPADDNQFLGMLGMHGT

SEQ ID NO: 111009 - protein, 281 aa, Unknown
  Bacterial polypetide isolated from the Sargasso Sea
GGGVINSGPKASEALREFVRLIGFPITSTLQGLGAFPGDDNQFIGMLGMHGTYEANNAMHDCDLLINIGARFDDRITGKIDEFSPKSKKVHIDIDPSSINKIIKVDLAIVGDVNEVLRSTIKKINQKQNGIKVSNKQKLSKWWEQIQKWREKDSLGFINSNKTIKPQHAVKRLYELTKSQDTFITTEVGQHQMWAAQHYKFNKPNRWMTSGGLGTMGYGLPAAVGVQIAHPDKLVIDIAGEASVLMTMQEMSTAVQYNLPIKIFVMNNQYMGMVRQWQELL

SEQ ID NO: 111010 - protein, 223 aa, Unknown
  Bacterial polypetide isolated from the Sargasso Sea
LEKINFWKNNHPLFVPPEEGEIYPQEVLLKVRDISPEAFITTDVGQHQMWAAQYLRNAPRKWISSAGLGTMGFGLPAAMGVKAALPNEQVVCIAGDASVLMNIQELGTLSQYGLKIKLVIINNRWQGMVRQWQESFYDERYSSSDMSCGEPDFVKLAESFGVKGFLISERKQLQDEFKSALNYDGPALINVRVRRGENCYPMVPPGKSNAQMVGYVNSESRNC

SEQ ID NO: 111011 - protein, 149 aa, Unknown
  Bacterial polypetide isolated from the Sargasso Sea
MSKLYSGAEIVFKCLEDHGVEVVFGYPGGAVLPIYDELKNFPSVKHFLVRHEQGAGHAAEGYARSSGKPGVALVTSGPGATNIVTALTDAYMDSVPIVCISGQVPTHLIGTDAFQECDTTGITRPCTKHNWLVKDVKDLAKVIHRAFEV

SEQ ID NO: 111012 - protein, 225 aa, Unknown
  Bacterial polypetide isolated from the Sargasso Sea
VNSLNFINSDKTIKPQFAIQRLYELTKNKDTFITTEVGQHQMWAAQHYKFDKPNRWMTSGGLGTMGYGLPAAVGVQIAHPDKLVVDIAGEASVLMTMQEMSTAVQYNLPIKIFILNNEYMGMVRQWQELLHEKNYSESYTAALPDFVKLAEAYGCVGIRAKTPDELDQKIQEMIDVKKPVIFDCLVDKEENCFPMIPSGKPHNQMLLGPNDQKENKITGKGKTLV

SEQ ID NO: 111013 - protein, 282 aa, Unknown
  Bacterial polypetide isolated from the Sargasso Sea
KHNWLVKDINDLSRILHEAFYVASNGRPGPVLVDIPKDIQFQTGTYIGPDTVKHKSYRPKLKANIDMIDDALKLIANAEKPIFYTGGGVINSGNAAVQLLREFVRLTGFPITSTLQGLGAFPGDDNQFVGMLGMHGTYEANMAMNMCDLMINIGARFDDRITGKIDEFSPNSKKIHVDIDPSSINKVISVDVGLAGDVAHVLEDAIKLWKSKVYKVNKLAVKDWWKQIDKWRKTDSLNFKEDKEIIKPQYAIQRLYELTKDTDAFITTEVGQHQMWAAQHYK

SEQ ID NO: 111014 - protein, 232 aa, Unknown
  Bacterial polypetide isolated from the Sargasso Sea
LKNKITCQTKNWLERIDFWKNKHPLYDPPKEGEIYPQEVLLKVREISPESYVTTDVGQHQMWAAQYLRNSPRKWISSAGLGTMGFGLPAAIGVKAALPNSDVICIAGDASVLMNIQELGTLSQYGLKVKLIIINNRWQGMVRQWQESFYDERYSSSDMSCGEPDFVKLAESFGVKGYLISDRKQLQNELKNAIDHDGPALINILVRRGENCYPMVPPGKSNAQMVGYVNCED

SEQ ID NO: 111015 - protein, 271 aa, Unknown
  Bacterial polypetide isolated from the Sargasso Sea
HILVRHEQGAGHAAEGYARSSGKPGVVLVTSGPGATNVVTALTDAYMDSVPLVCISGQVPTHLIGTDAFQECDTTGITRPCTKHNWLVKDIKDLSKILHEAFLVATTGRPGPVLVDIPKDIQFAKNVYSKPKKEKKFNGKSNNKFTQNEIDQLVDLISKAKKPVIYTGGGVINSGPKASESLRELVRLIGFPITSTLQGLGAFPGEDNQFIGMLGMHGTYEANNAMHDCDLLINIGARFDDRITGKIDEFSPKSKKVHIDIDPSSINKIIK

SEQ ID NO: 111016 - protein, 257 aa, Unknown
  Bacterial polypetide isolated from the Sargasso Sea
MTAAAFKPQAETAPQSGARLLVSTLERLGVEVVFGYPGGAIMPVYDALAGSKLKHILVRHEQGAAFSADAYARKSGKVGVCMATSGPGATNLVTGIANAMMDSVPIVCITGNVAQGLMGTDAFQEIDILGVTLPIVKHSILVRSAAEVPAAIEEAFHIARSGRPGPVLVDLPKDVQFETTGEDYGFSIPNQTPRVDHDAIAAAEAAIRAAKKPLVYIGGGGEDRRRDRGPARLRRRDRHSPGLDPERPGHHPDRCAR

SEQ ID NO: 111017 - protein, 281 aa, Unknown
  Bacterial polypetide isolated from the Sargasso Sea
DTIFGYPGGAVLPIYDELKNFSSVKHILVRHEQGAGHAAEGYARSSGKPGVLLVTSGPGATNAVTALTDAYMDSVPLVCISGQVPTHLIGTDAFQEADTTGITRPCTKHNWLVKDIKDLSKIIHKAFEVATTGRPGPVLVDIPKDIQFQKTNYIKYKKQKKLNGKSFNKFNKNDINELIKLMSKATKPIFYTGGGVINSGPKASELLRELVGTTGFPITSTLQGLGAYPGEDSQFLGMLGMHGSYEANNAMYHCDLMINIGARFDDRITGKLDEFSPNSKK

SEQ ID NO: 111018 - protein, 106 aa, Unknown
  Bacterial polypetide isolated from the Sargasso Sea
MQLTGAQIVCESLLQEGVDTIFGIPGGAILPLYQTLPEYPGLKHILVRHEQGAAHAADGYSRATGKPGICWATSGPGATNLVTGITTAAMDSVPMVVITGQVKRSA

SEQ ID NO: 111019 - protein, 326 aa, Unknown
  Bacterial polypetide isolated from the Sargasso Sea
NYKKLNKQKKLNEKAKNLFSNNEINQLIKLMDKSKKPIFYTGGGVINSGPKASELLRELVYATGFPITSTLQGLGSFPGDDNQFLGMLGMHGSFEANNAMHDCDLMINVGARFDDRITGKIDEFSPNSKKVHIDIDPSSINKNVKVDLPIIGDVSKVISEILKTIKKSKPNFASSNKQKISKWWEKIQKWRSVNSFNFENSQETIKPQYAIQRLYELTKNKDSYVTTEVGQHQMWAAQHYKFDKPNRWMTSGGLGTMGYGLPAAVGVQVAHPKKLVIDIAGEASVLMTIQEMSTAVQYSLPIKIFILNNEYMGMVRQWQELLHDKN

SEQ ID NO: 111020 - protein, 217 aa, Unknown
  Bacterial polypetide isolated from the Sargasso Sea
MSKLYSGAEIVFKCLEDQDVEFIFGYPGGAVLPIYDELKNFNFLKHILVRHEQGAGHAAEGYARSSGKPGVLLVTSGPGATNAVTALTDAYMDSVPLVCISGQVPTHLIGTDAFQECDTTGITRPCTKHNWLVKDVKDLEKTIHKAFEVATTGRPGPVLVDIPKDVQFQKTNYTKFKKQKKTNGKVHNHFSQKDIDELIELMSKASKPIFYTGGGVI

SEQ ID NO: 111021 - protein, 228 aa, Unknown
  Bacterial polypetide isolated from the Sargasso Sea
MERKRSLSYSTDEVIIKPQYAIEKLYKVTKSFDPYVTTEVGQHQMWAAQYFGFSKPNHWMTSGGLGTMGYGLPASIGVQIANPGSLVIDIAGEASFLMNMQELSTIVQYSLPIKIFIINNQWMGMVRQWQELIHGSRYSESYTDSLPDFIKLAESFGIKGIRAEKMDELQDVIDEMLEHQGPVLADICVAKEENCFPMIPSGSAHYDMILNKEDKKNQKVSSDGLALV

SEQ ID NO: 111022 - protein, 260 aa, Unknown
  Bacterial polypetide isolated from the Sargasso Sea
LTSTLKTFKKSKNNFTKSNKHQISNWWEQIQKWRSKRSLDYIGSEETIKPQYAIERLYELTKDKDTYITTEVGQHQMWAAQHYKFNKPNRWMTSGGLGTMGYGLPAAVGVQIAHPKKLVIDIAGEASVLMTMQEMSTAVQYNLPIKIFILNNEYMGMVRQWQELLHDKNYSESYTAALPDFVKMAEAYGCVGIRAKTPEELDDKIIEMLNTDRPVIFDCLVDKQENCFPMIPSGKPHNQMLLGPKDQKEKKITGKGRTLV

SEQ ID NO: 111023 - protein, 310 aa, Unknown
  Bacterial polypetide isolated from the Sargasso Sea
YRPKLKANIDNIDDALKLISDAEKPIFYTGGGVINSGNAAVQLLREFVRITGFPITSTLQGLGAFPGDDTQFIGMLGMHGTYEANMAMNKCDLMINIGARFDDRITGKIDEFSPNSKKIHIDIDPSSINKVVDVDVALVGDVAHVLEDAIKLWKSKVYKVSKTQVKEWWKQIDRWKEVDSLGFDKDKKTIKPQHAIQRLYEITKEKDVFVTTEVGQHQMWAAQYYKFNRPNRWITSGGLGTMGFGLPAAIGAQVAHPDKLVIDIAGEASILMCIQEMSTAIQHKLPVKIFIINNQYMGMVRQWQELLHDK

SEQ ID NO: 111024 - protein, 239 aa, Unknown
  Bacterial polypetide isolated from the Sargasso Sea
MSKLYSGAEIVFKCLEDQDVKFIFGYPGGAVLPIYDELKNHSSIKHILVRHEQGAGHAAEGYARSSGKPGVVLVTSGPGATNVVTALTDAYMDSVPLVCISGQVPTHLIGTDAFQECDTTGITRPCTKHNWLVKDIKDLSKILHEAFIVATTGRPGPVLVDIPKDIQFAKANYIKPKKKKKINEKKNNKFSQSEIDELVNLISKAKKPVIYTGGGVINSGPKASDALREFVRLTGFPIT

SEQ ID NO: 111025 - protein, 255 aa, Unknown
  Bacterial polypetide isolated from the Sargasso Sea
MPKLFTGAEIVFKALEDQKVEFIFGYPGGAVLPIYDELKNHKSIKHILARHEQGAGHAAEGYARSSGKPGVLLVTSGPGATNAVTALTDAYMDSIPLVCISGQVPTHLIGTDAFQECDTTGITRPCTKHNWLVKDVNDLARVLHLAFEVATTGRPGPVLIDIPKDIQFKKGNYKYYKNSLAKKLNGKTSFKVTNNELDRFINLMKSSSKPIFYTGGGVINSGPNASKLLRELVSLTGFHITSTLQGLGAYPGDDP

SEQ ID NO: 111026 - protein, 268 aa, Unknown
  Bacterial polypetide isolated from the Sargasso Sea
KQKEMEHILVRHEQGATHAADGYARATGKPGVVLVTSGPGATNAITGIATAFMDSIPMIVISGQVAKHLIGTDAFQETDMIGISRPIVKHSFTVDSAENIPEIVKQAFHIATSGRPGPVVIDVPKDTTAPDKLFEFKYPNDVNIRSYKPPIDPDPNQIERAVDAIIESNKPVIYAGGGAINSNASEELIRLNEILDFPVTNTLMGLGVYPATHKRFLGMLGMHGTYQANMSMHNADLIIAIGARFDDRITNTPKLFAPNAKIIHLDVD

SEQ ID NO: 111027 - protein, 269 aa, Unknown
  Bacterial polypetide isolated from the Sargasso Sea
TSGPGATNVVTALTDAYMDSIPLVCISGQVPTHLIGTDAFQECDTTGITRPCTKHNWLVKDINDLAETIHKAFEVATTGRPGPVLVDIPKDIQFQNTKYKKPKKENKLNGKSHNHFNQNSIDQLIDLMSKSSKPIFYTGGGVINSGPKASELLRELVYATGFPITSTLQGLGSFPGDDNQFLGMLGMHGTYEANNAMHDCDLMINIGARFDDRITGKIDEFSPKSKKVHIDIDPSSINKNVKVDLAIVGDVKSVLSSTLKKFKTKKIEI

SEQ ID NO: 111028 - protein, 247 aa, Unknown
  Bacterial polypetide isolated from the Sargasso Sea
TPRDDPLFLGMLGMHGTYEANNSMYSCDLMINIGARFDDRITGKVDEFSPKSKKIHIDIDPSSIGKNIKVDLPVVSDVGSFLKALNKRIKEKHKDFLNSNKQNISKWWKDIDKWRQKKSLSFKNSKEVIKPQYAVQRLYELSKNQDTYITTEVGQHQMWAAQHYKFNKPNRWMTSGGLGTMGYGLPAAVGVQIAHPDKLVIDIAGEASVLMTMQEMSTAVQYKLPIKIFILNNQYMGMVRQWQELLH

SEQ ID NO: 111029 - protein, 147 aa, Unknown
  Bacterial polypetide isolated from the Sargasso Sea
MGKLISGAEIVFKVLEHHNVEHIFGYPGGAVLPIYDELKNHKTIKHILARHEQGAGHAAEGYARSSGKPGVLLVTSGPGATNAVTALTDAYMDSVPLVCISGQVPTHLIGTDAFQECDTTGITRPCTKHNWLVKDVNDLAKSNEFSI

SEQ ID NO: 111030 - protein, 310 aa, Unknown
  Bacterial polypetide isolated from the Sargasso Sea
IAELPQVMSDAFRIAQSGRPGPVWIDIPKDVQTATIELEALPEPGARTTPPTFDSASVHDAAAMINAAKRPVLYLGGGVINAPEQVRALAEKANLPTTMTLMALGMLPKAHPLSLGMLGMHGARSTNFILQEADLLVVLGARFDDRAIGKTEQFCPNAKIIHVDIDRSELGKIKQPHVAIQGDVADVLAQLTPQVAAQPRDEWRQMVADLQREFPSPIPQESDPLTHYGLINAVAACVNDEAIVTTDVGQHQMWVAQAYPLNRPRQWLTSGGLGTMGFGLPAAVGAALANPQRKVICFSGDGSLMMNIQE

SEQ ID NO: 111031 - protein, 322 aa, Unknown
  Bacterial polypetide isolated from the Sargasso Sea
WNYRPCTKHNWLVKDIKDLAKTIHKAFEVATTGRPGPVLVDIPKDVQFQKTNYSKYKKQKKLNGKKHNNFNQKDIDELVKLMTKASKPIFYTGGGVINSGPKASELLRELVHATGFPITSTLQGLGSFPGDDNLFLGMLGMHGTYEANNAMHDCDLMINIGARFDDRITGKIDEFSPKSKKVHIDIDPSSINKNVKVDLPIVGDVQDVISSTIKTIKKTKPNFAKSNKQKISKWWEKIQKWREKRSLDFINSTETIKPQYAVQRLYELTKNKDTYITTEVGQHQMWAAQHYKFDKPNRWMTSGGLGTMGYGLPAAVGVQVAH

SEQ ID NO: 111032 - protein, 206 aa, Unknown
  Bacterial polypetide isolated from the Sargasso Sea
ERLYELTKDKDSYITTEVGQHQMWAAQHYKFNKPNRWMTSGGLGTMGYGLPAAVGVQVAHPKKLVIDIAGEASVLMTIQEMSTAVQYNLPIKIFILNNQYMGMVRQWQELLHDKNYSESYTAALPDFVKLAEAYNCVGIRAKTPEELDDKIIEMLNTDRPVIFDCMVDKVENCFPMIPSGKPHNQMILGPKDQESKKITGKGKSLV

SEQ ID NO: 111033 - protein, 255 aa, Unknown
  Bacterial polypetide isolated from the Sargasso Sea
TNAITGLATAYMDSIPMIVISGQVESRMIGTDGFQETDMVGISRPIVKHSFMVQKAEDIPLVIKKAFHISTTGRPGPVVIDIPKDATDPKATFAYDYPKEVKMRSYSVPGKGHSGQIKKAIELLLDAKRPMIYTGGGVIQGEGSELLTKLTRRLGFPITNTLMGLGAFPASDKQFLGMLGMHGTYEANMAMHNCDVLLCIGARFDDRVTNSDTSKFCPNAKILHVDIDPAAISKTVTADIPIVGSVNSVLEEMLQ

SEQ ID NO: 111034 - protein, 299 aa, Unknown
  Bacterial polypetide isolated from the Sargasso Sea
NKGKYKFYKNNLSKKSNRKPITKINTKDLDLFIDMIKKSSKPIFYTGGGVINSGPKASESLRELVALTGFPITSTLQGLGAYPGDDPQFLGMLGMHGTYEANNAMHDCDLMINIGARFDDRITGKVDEFSPNSKKIHIDIDPSSIGKNIKVDLAIVSDVNVLLKSLIKRFKEKNKNFLNSNKQKTSKWWSQIEKWREKKSLNFLNSNKTIKPQHAVKRLYELTKNKETFITTEVGQHQMWAAQHYKFNKPNRWMTSGGLGTMGYGLPAAIGVQIANPGKLVIDIAGEASVLMTMQEMST

SEQ ID NO: 111035 - protein, 138 aa, Unknown
  Bacterial polypetide isolated from the Sargasso Sea
MDKSNKSGAEALIHSLHLEGVELMFGYPGGAALHIYDAIFNQNYVDHILVRHEQGAVHAADGYARATGKPGVALVTSGPGATNAITGLATAYMDSTPIVVISGQVKSGLIGTDSFQETDMIGVSRPIVKHSFLVQSAE

SEQ ID NO: 111036 - protein, 254 aa, Unknown
  Bacterial polypetide isolated from the Sargasso Sea
MGKLISGAEIVFKVLEHHKVEHIFGYPGGAVLPIYDELKNHKTIKHILARHEQGAGHAAEGYARSSGKPGVLLVTSGPGATNAVTALTDAYMDSVPLVCISGQVPTHLIGTDAFQECDTTGITRPCTKHNWLVKDVNDLAKVMDLAFEVATTGRPGPVLVDIPKDIQFKKTNFVLKTSNKKKLNGKSKPNGKINSSDLDKVINLMKKSSKPIFYTGGGVINSGPEASKSLRELVSITGFPNNFYLTRSRCLPWR

SEQ ID NO: 111037 - protein, 289 aa, Unknown
  Bacterial polypetide isolated from the Sargasso Sea
CRFDDRVTGKIRRFFPNSKKIHVDIDASNINKTIKVDVPVIGDVKQVVENMISLWKDKKYKIDNESLKTWWAKINKWKEIDCLSYNNESKQIKPQYAVQRLYELTKNKKTFITTEVGQHQMWAAQYYKFEEPNRWLTSGGLGTMGYGFPAAIGAQVGNPDALVVDIAGDASILMNIQEMSTAIQYRLPVKIFILNNEYMGMVRQWQELLHGGRYSESYTDSLPDFVKLAESYKAVGLRAKTSDELDGVITQMIESKNTVIADIWVTKEENCFPMIQSGSAHNEMLLSKD

SEQ ID NO: 111038 - protein, 333 aa, Unknown
  Bacterial polypetide isolated from the Sargasso Sea
THLIGTDAFQECDTTGITRPCTKHNWLVKDVKDLAKTIHKAFEVATTGRPGPVLVDIPKDIQFNKYSYSKLKKQKKLNGKTHNYFNEKEIDELIKLISQAKKPIIYSGGGVINSGNQASQLLRELVKLTGFPITSTLQGLGAYPGDDNQFLGMLGMHGTYEANNAMHDCDLMINIGARFDDRITGKIDEFSPKSKKVHIDIDPSSINKNVKVNLAIVGDVSSVLKNAIKTLKKIKPNFSTSNKSNISKWWEQIQKWRTVNSLGYINSEESIKPQYAVQRLYELTKNKDTFITTEVGQHQMWAAQHYKFNKPNRWMTSGGLGTMGYGLPAAVGV

SEQ ID NO: 111039 - protein, 283 aa, Unknown
  Bacterial polypetide isolated from the Sargasso Sea
GKGAFDERDNLSVGMLGMHGTAYANFAVTECDLLIAIGARFDDRVTGKLDTFAPNAKVIHIDIDPAEVNKNRRVNVAIVSDVSKAVRKINEKCKNKKIVCQTNNWLEKIDFWKNKHPLYVPPKEGEIYPQEVLLKVRELSPEAYVTTDVGQHQMWAAQYLRNSPRKWISSAGLGTMGFGLPAAMGVKAALPNSDVICIAGDASVLMNIQELGTLSQYGLKVKLIIINNRWQGMVRQWQESFYEERYSSSDMSCGEPDFVKLAESFGVRGYLISDRKELANKLQ

SEQ ID NO: 111040 - protein, 272 aa, Unknown
  Bacterial polypetide isolated from the Sargasso Sea
MSKLYSGAEIVFKCLEDQNVSHIFGYPGGAVLPIYDELKNYNSIKHILVRHEQGAGHAAEGYARSTGKPGVLLVTSGPGATNAVTALTDAYMDSVPLVCITGQVPTHLIGTDAFQECDTTGITRPCTKHNWLVKDINDLAEVMHKAFEVATTGRPGPVLVDIPKDIQFQKSKYKNYKKNKKLNGKSHDNYSQKNIDELIYLISKSRKPIFYTGGGVINSGTKASELLRELVYATGFPITSTLQGLGCFPADDNQFLGMLGMHGTYEANNAMY

SEQ ID NO: 111041 - protein, 275 aa, Unknown
  Bacterial polypetide isolated from the Sargasso Sea
PKDLQAEEFEFKYPEEKVTIPGENPIKSDISSVDLDSAVKMIANAKKPVILAGHGVLISGASDEVICLSEKSSIPISWTLLGSGAVPASHPLNMGMMGMHGEFAANNAIHNADLLIACGMRFDDRVTGNTKTYSPNSKKIHIEVDPSEINKNVKVDLALNGDLKFILNNLVPKVSKKENRAWFDQISSWQNESASRDIINMDTEILYGAQVISDLWKETNGDAIIVSDVGQHQMLEAQYYKHDEPNTLLTSGGLGTMGFSLPAAIGASFANRNKE

SEQ ID NO: 111042 - protein, 223 aa, Unknown
  Bacterial polypetide isolated from the Sargasso Sea
MNGSQIIVEALRRHGVDYLFGYPGGACMPIFDALVDAPEIKIVLVRHEQGGTHMADGYARATGKPGVVLVTSGPGATNTVTGLLTAQMDSVPMVVLTGQTITPNLGKDAFQEADVFGVTMPVVKHSYLVREVNDLPRVMNEAFHLATSGRPGPVLVDLPKDVVSAECEADFTDEFHLPGYAPPARGLTEDLEKAAELISSSKKPLLYVGAGAVIAQASRQVIR

SEQ ID NO: 111043 - protein, 258 aa, Unknown
  Bacterial polypetide isolated from the Sargasso Sea
MSKLFSGAEIVFKCLEDQGVEYIFGYPGGAVLPIYDELKNHSSIKHILVRHEQGAGHAAEGYARSSGKPGVVLVTSGPGATNVVTALTDAYMDSVPLVCISGQVPTHLIGTDAFQECDTTGITRPCTKHNWLVKDVKDLSKILHEAFRVATTGRPGPVLVDIPKDIQFAKMNYSKPKIHKKLNGKLLKNFSQKDIDKLIDLMNKSKKPIIYSGGGVINSGPEASEVLRELVQLTGFPITSTLQGIGAYPGDDNQFLGM

SEQ ID NO: 111044 - protein, 290 aa, Unknown
  Bacterial polypetide isolated from the Sargasso Sea
LVREFINMVGSPVTMTLMGLGVVGSSDKNSLGMLGMHGMYEANMAMHECDVMINIGARFDDRVTGRLDAFSPNSKKIHIDIDESNINKTINVDVPIIGDVKQVVEKMISVWKDKKYKIDTDSLKLWWDKINKWKDVDCLSYNNEGKQIKPQYAVQRLYELTKNTKTFITTEVGQHQMWAAQFYKFEEPNRWLTSGGLGTMGYGFPAAIGAQVGHPDALVVDIAGDASILMNIQEMSTAVQYRLPVKIFILNNEYMGMVRQWQELLHGGRYSESYTDSLPDFVKLAESYKA

SEQ ID NO: 111045 - protein, 203 aa, Unknown
  Bacterial polypetide isolated from the Sargasso Sea
NELTKHLNPFITTEVGQHQMWAAQFLSFNKPKHWMTSGGLGTMGYGLPAAMGVQIAHPKDLVIDVAGEASILMNIQEMSTIRQYRLPVKIFILNNHYMGMVRQWQELLHGNRLSESYMDSLPDFVKLAESFGATGLRIEKPADVDDLINEMIKIKGAVICDVVVDPKENCFPMIPSGSTHDQMLLGPNDKLEGEISEEGMVLV

SEQ ID NO: 111046 - protein, 246 aa, Unknown
  Bacterial polypetide isolated from the Sargasso Sea
MSKLYTGAEIVFKCLEDQKVEYIFGYPGGAVLPIYDELKNHSSIKHILVRHEQGAGHAAEGYARSSGKPGVVLVTSGPGATNVVTALTDAYMDSVPLVCISGQVPTHLIGTDAFQECDTTGITRPCTKHNWLVKDIKDLSKIMHEAFKVATTGRPGPVLIDIPKDIQFAKASYTKFKKEKKLNGKAHNKFSQNEIDQLIDLISKAKKPVVYTGGGVINSGPQASETLKECVRLIGFPITSTLQGLG

SEQ ID NO: 111047 - protein, 268 aa, Unknown
  Bacterial polypetide isolated from the Sargasso Sea
IVGDVKSVIASTLKTLKKTKPSFIKSNKQKVSRWWETIQKWRSKKSLDYIGSEETIKPQYAIERLYELTKNKDTYITTEVGQHQMWAAQHYKFNKPNRWMTSGGLGTMGYGLPAAVGVQIAHPNKLVIDIAGEASVLMTMQEMSTAVQYSLPIKIFILNNEYMGMVRQWQELLHDKNYSESYTAALPDFVKLAEAYGCVGIRAKRPEELDDKIIEMLNTDKPVIFDCMVDKQENCFPMIPSGKPHNQMLLGPKDQEDKKITGKGRTLV

SEQ ID NO: 111048 - protein, 164 aa, Unknown
  Bacterial polypetide isolated from the Sargasso Sea
MTKDKDTYITTEVGQHQMWAAQHYKFDKPNRWMTSGGLGTMGYGLPAAIGVQVAHPKKLVIDIAGEASVLMTMQEMSTAVQYNLPIKIFILNNEYMGMVRQWQELLHDKNYSESYTAALPDFVKLAEAYGCVGIRATKPDELDEKIKEMLNINRPVIFDCRVDK

SEQ ID NO: 111049 - protein, 233 aa, Unknown
  Bacterial polypetide isolated from the Sargasso Sea
MHGCDFMLCVGARFDDRITGRIDAFSPASYKVHIDIDPSSINKNITVEAPLIGDVSNILNCLADRWKERGSKVNQKKLRAWWKSINDWKDVKSLSYENSANVIKPQYAVERLEELTKSYNRFVSTEVGQHQMWAAQFMGFEEPNRWMTSGGLGTMGYGFPASIGIQIAHPKSLVINVAGEASWLMNMQELGTAVQYRLPVKQFILNNERLGMVRQWQELLHGERYSHSWSDAL

SEQ ID NO: 111050 - protein, 289 aa, Unknown
  Bacterial polypetide isolated from the Sargasso Sea
MLGMHGMYEANLAMHDCDVMVNIGARFDDRVTGRLDAFSPNSKKIHIDIDPSNINKTIKVDIPIVGDIEAVLHQLIESWKKNKYSLDQKNLDLWWNKINEWKKVDCLSFKQIDKKIKPQYAIKKLYELTKNKETIITTEVGQHQMWAAQYYKFEKPNKWLTSGGLGTMGYGFPAAIGAQVANPEALVIDIAGDASILMNIQEISTAVQHRLPVKIFILNNEYMGMVRQWQELLHGGRYSESYTDSLPDFVKLAESFKAKGLRAKTADELDDVIKEMINTDKTVIADIWV

SEQ ID NO: 111051 - protein, 218 aa, Unknown
  Bacterial polypetide isolated from the Sargasso Sea
MGKLFSGAEIVFKVLEHHKVEHIFGYPGGAVLPIYDELKNHKTIKHILARHEQGAGHAAEGYARSSGKPGVMLVTSGPGATNAVTALTDAYMDSVPIVCISGQVPTHLIGTDAFQECDTTGITRPCTKHNWLVKDVKDLADVMSRAFEVATTGRPGPVLVDIPKDIQFKKTEFKIKNKKKKQFNGKLNGKVSNTEIDKVIKMMKKSSKPIFYTGGGVI

SEQ ID NO: 111052 - protein, 258 aa, Unknown
  Bacterial polypetide isolated from the Sargasso Sea
MTGAEIVFKVLEDRGVRHIFGYPGGAVLPIYDELKNHKKIKHILVRHEQGAGHAAEGYARSSGKPGVLLVTSGPGATNAVTALTDAYMDSVPIVCITGQVPTHLIGTDAFQECDTTGITRPCTKHNWLVKDVNKLSSIMHKAFEVATSGRPGPVLIDIPKDVQFQKGKYIKPKELKNNNKINIQFNGQDKKIDEAVKLIEKSSKPILYTGGGVINSGPRATEILRELVSLTGFPITSTLQGLGAYPENDPQFLGMLGM

SEQ ID NO: 111053 - protein, 245 aa, Unknown
  Bacterial polypetide isolated from the Sargasso Sea
MPKLYSGAEIVFKCLEDQGVEFIFGYPGGAVLPIYDELKNFNFIKHILVRHEQGAGHAAEGYARSSGKPGVLLVTSGPGATNAVTALTDAYMDSVPLVCISGQVPTHLIGTDAFQECDTTGITRPCTKHNWLVKDINDLEKTIHKAFEVATTGRPGPVLVDIPKDVQFQKAKYTKFKRQKKLNGKIHNKFSQKDINELIELMSKASKPIFYTGGGVVNSGPKASELLRELVHSTGFPITTTLQGL

SEQ ID NO: 111054 - protein, 315 aa, Unknown
  Bacterial polypetide isolated from the Sargasso Sea
MVSSTHLIGTDAFQECDTTGITRPCTKHNWLVKDINDLSKVMHEAFRVATTGRPGPVLIDIPKDIQFAKAKYKKPNKEKKLNGKSHNKFSQDQIDELVKLLSKAKKPIIYSGGGVINSGPKASQALREFVELTGFPITSTLQGLGAYPGDDNQFLGMLGMHGTYEANNAMHDCDLLINIGARFDDRITGKIDEFSPNSKKVHIDIDPSSINKIIKVDLAIVGDVTSVISKINKTIAKRKNGHSKSNKSNIAKWWEQIEKWREKDSLNFVNSDESIKPQYAVQRLYELTKDKDTYVTTEVGQHQMWAAQHYKFNKP

SEQ ID NO: 111055 - protein, 170 aa, Unknown
  Bacterial polypetide isolated from the Sargasso Sea
MSKLYTGAEIVFKCLEDQDVEFIFGYPGGAVLPIYDELKNHNTIKHILVRHEQGAGHAAEGYARSSGKPGVVLVTSGPGATNVVTALTDAYMDSVPLVCISGQVPTHLIGTDAFQECDTTGITRPCTKHNWLVKDIKDLSKTLHEAFRVATTGRPGPVLVDIPKDIQFAK

SEQ ID NO: 111056 - protein, 304 aa, Unknown
  Bacterial polypetide isolated from the Sargasso Sea
EANNAMHDCDLMINIGARFDDRITGKVDEFSPGSKKIHVDIDPSSIGKNIKVDLAIVSDVSEFLKSLIKRFKEKNKNFLNSNKQKTSKWWGTIEKWREKKSLNFINSNKIIKPQHAVQRLYELTKDKDTFITTEVGQHQMWAAQHYKFKKPNRWMTSGGLGTMGYGLPAAIGVQIANPGKLVVDIAGEASVLMTMQEMSTAVQYKLPIKIFILNNEYMGMVRQWQELLHEKNYSESYTAALPDFVKLAESYGCVGIRAKTPNELDEKIKEMVEIDRPVIFDCLVDKAENCFPMIPSGKPHNQMI

SEQ ID NO: 111057 - protein, 139 aa, Unknown
  Bacterial polypetide isolated from the Sargasso Sea
MSKLYSGAEIVFKCLEDQDVEFIFGYPGGAVLPIYDELKNHSTIKHILVRHEQGAGHAAEGYARSSGKPGVVLVTSGPGATNVVTALTDAYMDSVPLVCISGQVPTHLIGTDAFQECDTTGITRPCTKHNWLVKDVKIY

SEQ ID NO: 111058 - protein, 433 aa, Unknown
  Bacterial polypetide isolated from the Sargasso Sea
GPVLVDIPKDIQFQKTSYTKYKKQKKLNGKTQNNFKQSDIDELIKLMDKSSKPIFYTGGGVINSGPKASELLRELVSATGFPITSTLQGLGAFPADDNQFIGMLGMHGTYEANNAMHDCDLMINVGARFDDRITGKLDEFSPKSKKIHIDIDPSSINKNVKVDLPIVGDVADIINSILKTIKKTKPSFMKSNKQKISKWWEQISKWRSINSLNFENSTETIKPQYAVQRLYELTKDKDTYITTEVGQHQMWAAQHYKFNKPNRWMTSGGLGTMGYGLPAAVGVQVAHPNKLVIDIAGEASVLMTMQEMSTAVQYSLPIKIFILNNEYMGMVRQWQELLHDKNYSESYTAALPDFVKLAEAYGCVGIRATTPEELDDKIIEMLNTERPVIFDCRVDKIENCFPMIPSGKAHNEMLLGPNDQKEKKITGKGKTLV

SEQ ID NO: 111059 - protein, 359 aa, Unknown
  Bacterial polypetide isolated from the Sargasso Sea
LVELTGFPFTSTLQGLGAYPGDDNQFLGMLGMHGTYEANNAMHDCDLLINIGARFDDRITGKIDEFSPKSKKVHIDIDPSSINKIIKVDLALVGDVKEVLKGITKTLKKKNLDLKKSNKQKIAKWWEQIQKWRTKNSLHFKNSDETIKPQHAVQRLYELTKHKDTYVTTEVGQHQMWAAQHYKFNKPNRWMTSGGLGTMGYGLPAAVGVQIAHPKKLVIDIAGEASVLMTMQEMSTAVQYNLPIKIFILNNQYMGMVRQWQELLHEKNYSESYTEALPDFIKMAEAYGCKGIKAEKPEELDEKIKEMVEFDGPVIFDCRVDPNENCFPMIPSGKPHNQMILGPSEKEENKITGKGKALV

SEQ ID NO: 111060 - protein, 388 aa, Unknown
  Bacterial polypetide isolated from the Sargasso Sea
MPKLFTGAEIVFKALEDQKVEFIFGYPGGAVLPIYDELKNHKSIKHILARHEQGAGHAAEGYARSSGKPGILLVTSGPGATNAVTALTDAYMDSVPLVCISGQVPTHLIGTDAFQECDTTGITRPCTKHNWLVKDVNDLARVLHLAFEVATTGRPGPVLVDIPKDIQFKKGKYIFSKSTLKKKLNGRATHKISNNELDKFIDLLKKSSKPIFYTGGGVINSGPQASEYLRELVSLTGFPITSTLQGLGAYPGDDPQFLGMLGMHGTFEANNAMHDCDLMINIGARFDDRITGKVDEFSPGSKKIHVDIDPSSIGKNIKVDLAIVSDVSEFLKSLIKRFKEKNKNFLNSNKQKTSKWWSTIEKWREKKSLNFINSNKVIKPQHAVQRLY

SEQ ID NO: 111061 - protein, 249 aa, Unknown
  Bacterial polypetide isolated from the Sargasso Sea
MPKLYSGAEIVFKCLLDQGVTNIFGYPGGAVLPIYDELKNFKSIKHILVRHEQGAGHAAEGYARSSGKPGVVLVTSGPGATNAVTALTDAYMDSVPLVCISGQVPTHLIGTDAFQECDTTGITRPCTKHNWLVKDINDLAKTIHKAFEVSTTGRPGPVLVDIPKDIQFQKTTYKNYKKINKSNGKTHNHFSQNDIDQLINLMGKATKPIFYTGGGVINSGPKASELLRELVNATGFPITSTLQGLGSFP

SEQ ID NO: 111062 - protein, 110 aa, Unknown
  Bacterial polypetide isolated from the Sargasso Sea
MEKLSGASMIVRSLIDEGVKHIFGYPGGSVLDIYDALHLIPGIEHILVRHEQAAVHMADGYARATGKVGVVLVTSGPGATNAITGIATAYMDSIPLVVLSGQVPSNLIGN

SEQ ID NO: 111063 - protein, 528 aa, Unknown
  Bacterial polypetide isolated from the Sargasso Sea
SGSEIIIESLKKEGVEYIFGYPGGAVLHIYDALFAAEKIKHVLVRHEQGATHAADGYARACNKPGVVLVTSGPGITNCVTGIATAHMDSIPMIVISGQVSRQYVGSDAFQEADATGITRPICKHNFLINDRESIAETFRKAFIIATTGRPGPVIIDIPKDLTDPKVKINFEYKKNIKIRSYNVKKSESDEKIKEAAKLICSAKKPMIYAGGGVILGKASNDLVKLTKHLNFPITNTLMGLGAYPSSDKQFLGMLGMHGTYEANMAMHDCDVLLAIGARFDDRVTGDTNQFCPKAKIIHIDIDPSSISKIIEVDHSLIGDTKQILKKLLDHTKHFKKDINKDALSKWWRKINSWQKKKCLSYKKSTKVIKPQSVIETLHKITKGKSFVTSDVGQHQMWVAQYYKFDKPNRWINSGGLGTMGFGLPAAIGAQLAYPREQVLCVTGEASILMCIQELSTCLQYGLPIKIITLNNRYMGMVRQWQEFFYEGRYAMSYMDAIPNFAQLAESFGHIGMVIDKPKDLEKDLTHAL

SEQ ID NO: 111064 - protein, 263 aa, Unknown
  Bacterial polypetide isolated from the Sargasso Sea
MKIAGNDILIQSLINEGVEYIFGYPGGAALHIYDSIFNQKEMQHILVRHEQGATHAADGYARATGKPGVVLVTSGPGATNAITGIATAFMDSIPMVVISGQVQSHLIGTDAFQETDMIGVSRPIVKHSFTVDKQENIAQIVKEAFHIATSGRQGPVVIDVPKDITNPDELFDFNYPDKANIRSYNPPIKPENHQVSRAVDAILSAERPVIYAGGGTISSNASNELRELNELIDFPVTNTLMGLGVYPGTGKRFLGMLGMHGTY

SEQ ID NO: 111065 - protein, 581 aa, Unknown
  Bacterial polypetide isolated from the Sargasso Sea
MDKSNKSGAEALIHSLHLEGVDLIFGYPGGAALHIYDAIFNQNYVDHILVRHEQGAVHAADGYARATGKPGVALVTSGPGATNAITGLATAYMDSTPIVVISGQVKSNLIGTDSFQETDMIGVSRPIVKHSFLVQRAEDIPDIVKKAFHIATTGRKGPVVIDIPKDFTDPEYKFEFNYPSEINMRSYNPPEGADTSSIKEAADLIATAKRPVIYSGGGVNQNNASEELTALAKLLNFPVTNTLMGLGAFPGSDPQFMGMLGMHGTYQANMAMHNADLIIAVGARFDDRITNDPNQFALSAKKIHIDVDPASVSKIIHADIPIVGSAKESLTALIEELKSRDLKTNESDISEWNEQIKNWRDAHGLNHSLLEMGAQNGKILPQQVIQSLYKETNGEAFVTSDVGQHQMFAAQYYHFDKPRQWINSGGLGTMGFGLPSAMGVQLAYPESIVSCVTGEGSIQMCIQELSTCLQYGLPIKIINLNNAALGMVKQWQDMQYGGRHSSSTYENSLPDFVALTESYGHVGIKVSKFDELESAMKECISLKDKLVFLDVDVDPNEHVYPMLEAGNAMDHMRLSKDEKTW

SEQ ID NO: 111066 - protein, 619 aa, Unknown
  Bacterial polypetide isolated from the Sargasso Sea
MGAAVTLTTSTPSTTAVGAPQRVSGAYALMDALHRHGVSHIFGYPGGAILPIYDELHQAEARGDLKHFLVRHEQGGAHAADAYARATGKVGVCFGTSGPGATNLVTGIATAQMDSVPMVVITGQVPRPMIGTDAFQETDIFGITLPIVKHSWLVRDPAELASVIAQAFFIASTGRPGPVLVDIPKDVGQELFDYVPVEPGSIIPRGFIHPPEHDKQDIAAALDLIEEAQRPLLYVGGGAVSAGAQEALNAIAQRHRIPVTTTLMGKGVFDENDPLAVGMLGMHGTAYANFAVTDCDLLIAVGARFDDRVTGKLDTFAPRAKVIHFEIDPAEVGKNRKPDVAVLGDVRHSLKELLEQSQQRRIEPHTSAWLARIESWKQNYPLTTPPTDGGIYPQEVLLAVRDLAPKAWITTDVGQHQMWAAQYLRCGPRQWVSSAGLGTMGFGLPAAIGVQVALMDEQVVCIAGDASVLMNIQELGTLAQYGLPVKIVIVNNHWQGMVRQWQESFYDERYSASDMLPGMPDFIALARAFGVGGVHINERAQLKPQLQQALAAPGPMLIDVHVRRGENCYPMVPPGKSNAQMVGLPSHPELALSERRTCSKCGHSNPSEHLFCSNCGHGL

SEQ ID NO: 111067 - protein, 115 aa, Unknown
  Bacterial polypetide isolated from the Sargasso Sea
MSKLYSGAEIVFKCLEDQNVSHIFGYPGGAVLPIYDELKNFNSIKHILVRHEQGAGHAAEGYARSTGKPGVLLVTSGPGATNAVTALTDAYMDSIPLVCITGQVPTHLIGTDAFK

SEQ ID NO: 111068 - protein, 341 aa, Unknown
  Bacterial polypetide isolated from the Sargasso Sea
MLKLYSGAEIVFKCLEDQNVSHIFGYPGGAVLPIYDELKNFNSIKHILVRHEQGAGHAAEGYARSTGKPGVLLVTSGPGATNAVTALTDAYMDSVPLVCITGQVPTHLIGTDAFQECDTTGITRPCTKHNWLVKDVNDLAEIMHKAFDVATTGRPGPVLVDIPKDIQFQKAKYKNYKNKKKLNGKSHDNYSQKNIDELINLISKAKKPIFYTGGGVINSGTKASELLRELVYATGFPITSTLQGLGCFPADDNQFLGMLGMHGTYEANNAMYSCDLMINVGARFDDRITGKIDEFSPKSKKVHIDIDPSSINKNVKVDLAIVGDIKSVLTTTLKTFKRSKK

SEQ ID NO: 111069 - protein, 252 aa, Unknown
  Bacterial polypetide isolated from the Sargasso Sea
MGCSVTRQADVPNPRSPSCVSADSKTYLGLPVVGWHTGVQEVNNVELLSGAEMVVRFLRDEGVKHIYGYPGGALLHIYDALFKEPEVTHILVRHEQAATHMADGYARATGKAGVVLVTSGPGATNAITGIATAYMDSIPMVVISGQVPSAMVGTDAFQETDMVGISRPIVKHSFIIKHPSEIPEVLKKAFYLAESGRPGPVVVDIPKDMGDPTQKFEYVYPKKVKLRSYSPAVRGHSGQNRKAAEMLLAAKR

SEQ ID NO: 111070 - protein, 195 aa, Unknown
  Bacterial polypetide isolated from the Sargasso Sea
QYPKERSFVTSDVGQHQMWVAQYYKFDNPNRWINSGGLGTMGFGLPAAIGAQLAYPKEQVICVTGEASILMCIQELSTCLQYGLPIKIINLNNRYMGMVRQWQEFFYEGRYAMSYMDAIPNFAKLAESFGHIGMVIDKPENLENDLKTALNHKNRLVFVDVITDQTENVYPMIVSGKGHHEMHLAPSANEDIELA

SEQ ID NO: 111071 - protein, 444 aa, Unknown
  Bacterial polypetide isolated from the Sargasso Sea
MDKSNKSGAEALIHSLHLEGVELMFGYPGGAALHIYDAIFNQNYVDHILVRHEQGAVHAADGYARATGKPGVALVTSGPGATNAITGLATAYMDSTPIVVISGQVKSGLIGTDSFQETDMIGVSRPIVKHSFLVQSAEDIPEIVKKAFHIATTGRPGPVVIDIPKDFTDPEYKFEFNYPSEVNMRSYNPPKKGDTSRIKETVDLIEQSKKPVIYSGGGVIQNDASEELTALAKLLNFPVTNTLMGLGAFPGSDPQFMGMLGMHGTYQANMAMHNADLIIAVGARFDDRITNDPKQFALGAKKIHIDVDAASVSKIIHADIPIVGSAKECLAALIKEINSRDLQLNNSAIAEWNQKISDWRDNHGLNHSMLELGPQNGKILPQQVVQSLYKETEGQAFITSDVGQHQMFAAQYYHFDKPRQWINSGGLGTMGFGLPSAMGVQLAY

SEQ ID NO: 111072 - protein, 293 aa, Unknown
  Bacterial polypetide isolated from the Sargasso Sea
MSDRLSGGDMLIRALQEEGVDCIFGYPGGAVLHIYDAIFRQQKIRHVLVRHEQAATHMADGYARATGKAGVVLVTSGPGATNAITGIATAHMDSIPMVVLSGQVPSNLIGSDAFQETDMVGVSRPVVKHSFIVKHCSEIPLIIRKAFHIATTGRPGPVVIDIPKDTTDPEILDTYEFPETVQMRSYNPVVEGNTKQIAKAVKQIFSSKKPIFYVGGGAVQSDASEELKAIMAFLRAPITNTLMGLGAFPGTDRQCLGMLGMHGTYQANMAMHEADLIVAVGARFDDRVTNNPD

SEQ ID NO: 111073 - protein, 145 aa, Unknown
  Bacterial polypetide isolated from the Sargasso Sea
MTGAQMVLKALEDQQVDTIFGYPGGAVLPIYDELAKTKDTNHQIRHFLVRHEQGASHAAEGYARSSGKVGVMLVTSGPGVTNAVTGLTDAMMDSIPLVCISGQVPTHLIGTDAFQECDAVGITRPCNKHNWLVKDINDLSRIYTK

SEQ ID NO: 111074 - protein, 318 aa, Unknown
  Bacterial polypetide isolated from the Sargasso Sea
MHDCDLMINIGARFDDRITGKIDEFSPKSKKVHIDIDPSSINKNVKVDLPIVGDVSEVMLSVIKTLKKKNSNFASSNKEKTSKWWEKISEWRSVNSLNFINSDKTIKPQHAIQRLYELTKDKDTYITTEVGQHQMWAAQHYKFNKPNRWMTSGGLGTMGYGLPAAVGVQIAHPDKLVVDIAGEASVLMTIQEMSTAVQYNLPIKIFILNNEYMGMVRQWQELLHEKNYSESYTAALPDFVKLAEAYGCVGIRAKTPDELDEKIKEMINVNKPVIFDCLVDKEENCFPMIPSGKPHNQMLLGPNDQKENKITGKGKTLV

SEQ ID NO: 111075 - protein, 238 aa, Unknown
  Bacterial polypetide isolated from the Sargasso Sea
MSKLYSGAEIVFKCLEDQGVEVIFGYPGGAVLPIYDELKNFSSVKHFLVRHEQGAGHAAEGYARSTGKAGVALVTSGPGATNIVTALTDAYMDSVPIVCISGQVPTHLIGTDAFQECDTTGITRPCTKHNWLVKDVKDLAKTIHRAFEVATTGRPGPVLVDIPKDIQFQKTNYTKYKRQKKINGKAQKHFNQSEIDTLINLMSKSSKPIFYTGGGVINSGPKASTLLRELVYATGFPI

SEQ ID NO: 111076 - protein, 552 aa, Unknown
  Bacterial polypetide isolated from the Sargasso Sea
MIRGADAVIKVLAAHGVTTVFGYPGGAIMPIYDALYGSPVEHLLSRHEQGAAFAAVGYARASGKTGVCFATSGPGATNLITSLADALLDSVPVVAITGQVSTAVIGTDAFQEIDVLGMSLSCTKHSFMVTDVNDLIPTLYQAFDIAASGRPGPVLVDIPKDIQIAQLEYRTPLLAVTNEPQASASEIEAARALLAEAKQPMLYVGGGVGMAGAVDQLREFIKATGMPSVATLKGLGSIAHGTPGYLGMLGMHGGKAANLAVQDCDLLVVAGARFDDRVTGRLATFANKAKVIHLDIDAAELGKLRQPDVAIAGDLRQIFPALTMALNITPWQAEVEHLARKHQWDYQHPGSLIYAPAMLRRLANKLPEDSVVCCDVGQHQMWVAQHMWFRRPEDHLSSAGLGTMGFGLPAAIGAQVARPDATVVTVSGDGSFMMNVQELTTIKRRKLPVKILLIDNQKLGMVKQWQQLFFEERYSETDLSDNPDFVQLASAFDIPGRTIFSSDEVEEALTEMLAAKGPYLLHVAIDDAFNVWPLVPPGASNSDMMDEMEKQT

SEQ ID NO: 111077 - protein, 138 aa, Unknown
  Bacterial polypetide isolated from the Sargasso Sea
MSKLYTGAEILFKCLEDQGVDFIFGYPGGAVLPIYDELKNHKSIKHILARHEQGAGHAAEGYARSSGKPGIVLVTSGPGATNVVTALTDAYMDSVPLVCISGQVPTHLIGTDAFQECDTTGITRPCTKHNWLVKDVKD

SEQ ID NO: 111078 - protein, 588 aa, Unknown
  Bacterial polypetide isolated from the Sargasso Sea
MPKLYSGAEIVFKCLEDQNVSHIFGYPGGAVLPIYDELKNFNSVKHILVRHEQGAGHAAEGYARSTGKPGVLLVTSGPGATNAVTALTDAYMDSVPLVCITGQVPTHLIGTDAFQECDTTGITRPCTKHNWLVKDVNDLAEVMHKAFEVATTGRPGPVLVDIPKDIQFQKAKYKNFKNKQKLNGKSHNNYSQKNIDELINLISKAKKPIFYTGGGVINSGAKASELLRELVYATGFPITSTLQGLGCFPADDNQFLGMLGMHGTYEANNAMYSCDLMINVGARFDDRITGKIDEFSPKSKKVHIDIDPSSINKNVKVDLAIVGDIKSVLTSTLKTFKKSKNNFSKSNKHQISNWWEQIQKWRSKRSLDYIGSEETIKPQYAIERLYELTKDKDTYITTEVGQHQMWAAQHYKFNKPNRWMTSGGLGTMGYGLPAAVGVQIAHPEKLVIDIAGEASVLMTMQEMSTAVQYNLPIKIFILNNEYMGMVRQWQELLHDKNYSESYTAALPDFVKMAEAYGCVGIRAKTPEELDDKIIEMLNTDRPVIFDCLVDKQENCFPMIPSGKPHNQMLLGPKDQKEKKITGKGRTLV

SEQ ID NO: 111079 - protein, 456 aa, Unknown
  Bacterial polypetide isolated from the Sargasso Sea
VKDINDLASTIHKAFEVATTGRPGPVLVDIPKDIQFQKTKYNRPKKEKKLNGKSHNHFNQNSIDELIELMSKSSKPIFYTGGGVINSGPKASELLRELVYATGFPITSTLQGLGSFPGDDNQFLGMLGMHGTYEANNAMHDCDLMINIGARFDDRITGKIDEFSPKSKKVHIDIDPSSINKNVKVDLAIVGDVKTVLSSTLKSLKQKKSKFLKSNKQKTSKWWEKIQKWRSVRSLDYIGSEETIKPQFAIERLYELTKDKDSYITTEVGQHQMWAAQHYKFNKPNRWMTSGGLGTMGYGLPAAVGVQVAHPKKLVIDIAGEASVLMTIQEMSTAVQYNLPIKIFILNNQYMGMVRQWQELLHDKNYSESYTAALPDFVKLAEAYNCVGIRAKTPEELDDKIIEMLNTDKPVIFDCMVDKVENCFPMIPSGKPHNQMILGPKDQESKKITGKGKSLV

SEQ ID NO: 111080 - protein, 328 aa, Unknown
  Bacterial polypetide isolated from the Sargasso Sea
MLGMHGMYESNMAMHDCDVMINIGARFDDRVTGRLDAFSPNSKKIHVDIDESNINKTINVDVPIIGDVKQVVEKMINIWKTKKYKIEDEALKSWWQKIEKWKEVDCLHYNNDSKQIKPQYAVQRLYELTKNTKTFITTEVGQHQMWAAQYYKFEEPNRWLTSGGLGTMGYGFPAAIGAQVGHPDALVVDIAGDASILMNIQEMSTAIQYRLPVKIFILNNEYMGMVRQWQELLHGGRYSESYTDSLPDFVKLAESYKAVGLRAKTTDDLDKVIQEMIQTDNTVIADIWVTKEENCFPMIQSGSAHNEMLLSKDQKQDKKSAEKGKILV

SEQ ID NO: 111081 - protein, 143 aa, Unknown
  Bacterial polypetide isolated from the Sargasso Sea
MTGAEAVIQALVDNKVEVIFGYPGGAVLPLYDALFENKKIKHILVRHEQAAVHAAEGYARSTGKVGCVLVTSGPGATNAITGLTDALMDSVPVICLSGQVPTHLIGTDAFQEADTTGISRPCTKHNYLVKNADKLCETIHKSF

SEQ ID NO: 111082 - protein, 419 aa, Unknown
  Bacterial polypetide isolated from the Sargasso Sea
MVNMQLTGAQMVLKAFEDQQVDTIFGYPGGAVLPIYDELAKDKDSNKPIRHFLVRHEQGAAHAAEGYARSSGKVGVLLVTSGPGVTNAVTGLTDAMMDSIPLVCISGQVPTHLIGTDAFQECDAVGITRPCTKHNWLVKDINDLSRILHEAFYVASNGRPGPVLVDIPKDIQFQTGTYIGPDTVKHKSYRPKLKANIDKIDEALQLIVNAEKPIFYTGGGVINSGNAAVQLLREFVRLTGFPITSTLQGLGAFPGDDNQFVGMLGMHGTYEANMAMNKCDLMINIGARFDDRITGKIDEFSPNSKKIHVDIDPSSINKVISVDVGLAGDVAHVLEDAIKLWKSKVYKVNKSSVKDWWKQIDKWRKTDSLHFEEDNDTIKPQYAIQRLYELTKDSDAFITTEVGQHQMWAAQHYKFNKPK

SEQ ID NO: 111083 - protein, 172 aa, Unknown
  Bacterial polypetide isolated from the Sargasso Sea
MTGAEIVFQVLEDHGVRHIFGYPGGAVLPIYDELKNHKSIEHILVRHEQGAGHAAEGYARSSGKPGVLLVTSGPGATNAVTALTDAYMDSVPLVCITGQVPTHLIGTDAFQECDTTGITRPCTKHNWLVKDVNKLSTIMHKAFEVATSGRPGPVLVDIPKDIQFAKGKYIEP

SEQ ID NO: 111084 - protein, 277 aa, Unknown
  Bacterial polypetide isolated from the Sargasso Sea
NKNVKVDLPIIGDVSEVISSTIKSIKRTKPNFAKSNKQKISKWWEQIDKWRSIKSFNFVNSTETIKPQYAVQRLYELTKKKDTYITTEVGQHQMWAAQHYKFDKPNRWMTSGGLGTMGYGLPAAVGVQVAHPKKLVIDIAGEASVLMTMQEMSTAVQYSLPIKIFILNNEYMGMVRQWQELLHDKNYSESYTAALPDFVKLAEAYGCVGLRATKPEELDDKIIEMINTDRPVIFDCLVDKEENCFPMIPSGKPHNQMLLGPQDKKANKITGKGKTLV

SEQ ID NO: 111085 - protein, 375 aa, Unknown
  Bacterial polypetide isolated from the Sargasso Sea
SKIDKNKILEAVKLINDAKNPLIVWGQGVILGNAEKELKNFVEKSGIPAAWTILGASALPTSHELNVGMVGMHGNYGPNILTNKCDLLIAIGMRFDDRVTGDTSTYAKQAKIIHLEIDPAEVNKNIKVDVPILGNCKDSLRMLTRDIKEKSYKKWLNTFDELMKKEFKKVIKSDLAPKKKGLTMGESIIAINKFTKGKAIIVTDVGQHQMVACRYANFIDSKSNITSGGLGTMGFALPAAIGAKMGAPEREVVAVIGDGGYQMTIQELGTIFQLQLPVKIVILNNDFLGMVRQWQQLFFDKRYASTEMVNPDFVSIAKAYFLESERVENRSDLEPAVKRMIESKKPFVLEICVEKEDNVFPMIPSGASVSDIRLE

SEQ ID NO: 111086 - protein, 352 aa, Unknown
  Bacterial polypetide isolated from the Sargasso Sea
MKKISGAEAIIRCLISEDVDVLFGYPGGAIMPVYDELYKFQNDINHILVRHEQGATHAAQGYARSSGKVGVAIATSGPGATNLVTGIADAQIDSTPMVCITGQVASYLLGSDAFQETDIIGISTPVTKWNYQITKASEISEIISKAFFIARTGRPGPVLIDITKDAQFDMIENFEYKKCENIRSYSPIPAINKSIISDAGKLINESKKPLIVWGQGVILGNAESEFKDFVEKTGIPAAWTILGVSAISTNHKLNVGMVGMHGNYGPNVLTNDCDLLIAIGMRFDDRVTGDLKSYAKQAQIIHFEIDPAEVDKNVKVDIAVIGDVKQTLKEILPHVNKSSHNSWVRKFRELNK

SEQ ID NO: 111087 - protein, 268 aa, Unknown
  Bacterial polypetide isolated from the Sargasso Sea
MPKLLTGAEIVFRCLEDQKVEHIFGYPGGAVLPIYDELKNHPSIKHILVRHEQGAGHAAEGYARSSGKPGVVLVTSGPGATNVVTALTDAYMDSVPLVCISGQVPTHLIGTDAFQECDTTGITRPCTKHNWLVKDINDLSKVIHEAFKVATTGRPGPVLIDIPKDIQFAKTKYKKQNIEKKLNGKSHNKFSQDQIDELFKLLSKAKKPIIYSGGGVINSGPKASQALREFVELTGFPITSTLQGLGAYPGDDNQFLGMLGMHGTYEAK

SEQ ID NO: 111088 - protein, 450 aa, Unknown
  Bacterial polypetide isolated from the Sargasso Sea
KHNFLVDSRESIADVFKKAFTIATTGRPGPVLIDIPKDLTDPSIKIDFNYPKKVNIRSYKPAPKESEDKIDTAAKLLCSAKKPMIYTGGGIILGNAYKDLSKLVKNLNYPVTNTLMGLGGYPATDKQFLGMLGMHGTYEANMAMHDCDVLLAVGARFDDRVTGDTTKFCPSAKIIHIDIDPSSISKIIEVDLSLVGDTSKILKSLNTAVKPYLKKINKKSLKIWWNKINKWRSKKCLSYKKSNKIIKPQSVIENLYEVTKGNAFVTSDVGQHQMWAAQYYKFDRPNRWINSGGLGTMGFGLPAAMGVQLAYPKSQVVCVTGEASIVMCIQELATCLQYRLPIKIINLNNRYMGMVRQWQEFFYEGRYAMSYMETIPDFSQLASSFGHIGIKIEKPSDLKSKLSEAMKLKDRLVFVDVITDQEENVYPMIKSGKAHNEMHLSPTNEDTELA

SEQ ID NO: 111089 - protein, 481 aa, Unknown
  Bacterial polypetide isolated from the Sargasso Sea
MSKLISGAEIVFKALEDQKVEYIFGYPGGAVLPIYDELKNHKSIKHILARHEQGAGHAAEGYARSSGKPGVLLVTSGPGATNAVTALTDAYMDSVPLVCISGQVPTHLIGTDAFQECDTTGITRPCTKHNWLVKDVNDLSRVLHLAFEVATTGRPGPVLVDIPKDIQFKKGKYKFIKNSLKKKINGKATHKLSNIELDKFIDLIKKSTKPIFYTGGGVINSGPDASKYLRELVSLTGFPITSTLQGLGAYPGDDPQFLGMLGMHGTFEANNAMHDCDLMINIGARFDDRITGKVDEFSPKSKKIHVDIDPSSIGKNIKVDLAVVSDVSELLKSLIKRFKEKNKNFLNSNKQKTSKWWEQIDKWREKKSLNFINSNKIIKPQHAVQRLYELTKDQDTFITTEVGQHQMWAAQHYKFNKPNRWMTSGGLGTMGYGLPAAIGVQIANPGKLVVDIAGEASVLMTMQEMSTAVQYRLPIKIFIFK

SEQ ID NO: 111090 - protein, 315 aa, Unknown
  Bacterial polypetide isolated from the Sargasso Sea
HYCDLMINIGARFDDRITGKVDEFSPGSKKIHVDIDPSSIGKNIKVDLAVVSDVTQLLKSLIKRFKEKNKNFASSNKQKTSKWWEQIEKWREKKSLNFINSSKVIKPQHAVQRLYEMTKNQDTFVTTEVGQHQMWAAQHYKFNKPNRWMTSGGLGTMGYGLPAAIGVQIANPGKLVVDIAGEASVLMTMQEMSTAVQYRLPIKIFILNNEYMGMVRQWQELLHEKNYSESYTAALPDFVKLAESYGCVGIRAKTPNELDEKIKEMINIDKPVIFDCVVDKAENCFPMIPSGKPHNQMILGPEEEEEISDEGKVLV

SEQ ID NO: 111091 - protein, 249 aa, Unknown
  Bacterial polypetide isolated from the Sargasso Sea
MATAETMTDGNGYTGIRDKTKEMNGADILIASVVREGVNVVFGYPGGASMEIHQAITRSKLRNVLCRHEQGEIFAAEGYAKSSGRVGVCVATSGPGATNLVTGLADAKMDSVPLVAITGQVPSGNIGRDAFQETPIIEITRQITKHNYLIERIEDIPRIVKEAFYLASSGRPGPVLIDIPKDLQQACAVPDFPEKIEITSYTPTIQAPRDELQRVADLIRNSTKPIVYSGGGIITGEASGELREFVEKT

SEQ ID NO: 111092 - protein, 456 aa, Unknown
  Bacterial polypetide isolated from the Sargasso Sea
VKDIKDLSKIIHEAFKVATTGRPGPVLVDIPKDIQFAKIGYSKPKPTKKLNGKSLNYFSQKDVDELINLMNKSKKPIIYSGGGVINSGPEASEVLRELVQLTGFPITSTLQGLGAYPGDDNQFLGMLGMHGTYEANNAMHDCDLLINIGARFDDRITGKIDEFSPKSKKVHIDIDPSSINKIIKVDLALVGDVKDVLKGINKTFKKKNSDFKNSNKQKISKWWEQIQKWRTKNSLHFNNSDETIKPQHAVQRLYELTKDKDTFITTEVGQHQMWAAQHYKFNKPNRWMTSGGLGTMGYGLPAAVGVQIAHPKKLVIDIAGEASVLMTMQEMSTAVQYNLPIKIFILNNQYMGMVRQWQELLHEKNYSESYSEALPDFIKLAEAYGCKGIKADNPNELDEKIREMVQFDGPVIFDCRVDPNENCFPMIPSGKPHNQMILGPTDKEENKITEKGKALV

SEQ ID NO: 111093 - protein, 182 aa, Unknown
  Bacterial polypetide isolated from the Sargasso Sea
MPKLYTGAEIVFKCLEDQEVDFIFGYPGGAVLPIYDELKNFETIKHILVRHEQGAGHAAEGYARSSGKPGVVLVTSGPGATNAVTALTDAYMDSIPLVCISGQVPTHLIGTDAFQECDTTGITRPCTKHNWLVKDIKDLQKTIHKAFEVATTGRPGPVLVDIPKDIQFQKIKYLPFKKTKKL

SEQ ID NO: 111094 - protein, 441 aa, Unknown
  Bacterial polypetide isolated from the Sargasso Sea
MPKLLTGAEIVFKCLEDQKVEHIFGYPGGAVLPIYDELKNHPSIKHILVRHEQGAGHAAEGYARSSGKPGVVLVTSGPGATNVVTALTDAYMDSVPLVCISGQVPTHLIGTDAFQECDTTGITRPCTKHNWLVKDINDLSKVMHEAFRVATTGRPGPVLIDIPKDIQFAKAKYKKPNKEKKLNGKSHNKFSQYQIDELVKLLSKAKKPIIYSGGGVINSGPKASQALREFVELTGFPITSTLQGLGAYPGDDNQFLGMLGMHGTYEANNAMHDCDLLINIGARFDDRITGKIDEFSPNSTKVHIDIDPSSINKIIKVDLAIVGDVTSVISKINKTMSKRKNGHSKSNKSNIAKWWEQIGKWREKDSLNFVNSDESIKPQYAVQRLYELTKNKDTYVTTEVGQHQMWAAQHYKFNKPNRWMTSGGLGTMGYGLPAAVGVQIA

SEQ ID NO: 111095 - protein, 274 aa, Unknown
  Bacterial polypetide isolated from the Sargasso Sea
MPKLLSGAEIVFKCLEDQNVEYIFGYPGGAVLPIYDELKNHSSIKHILVRHEQGAGHAAEGYARSSGKPGVVLVTSGPGATNVVTALTDAYMDSVPLVCISGQVPTHLIGTDAFQECDTTGITRPCTKHNWLVKDIKDLSKIIHKAFEVATTGRPGPVLVDIPKDIQFQKTDYPKFKKKNKLNGKVHNHFSQKEIDELVKLMSKSKKPIFYTGGGVINSGPKASELLRELVAATGFPITSTLQGLGCFPGDDNNFLGMLGMHGTYEANNAMHDC

SEQ ID NO: 111096 - protein, 371 aa, Unknown
  Bacterial polypetide isolated from the Sargasso Sea
NSGPKASELLRELVRLTGFPITSTLQGLGAFPGGDNQFIGMLGMHGTYEANNAMHDCDLLINIGARFDDRITGKIDEFSPKSKKVHIDIDPSSINKIVKVDLSIEGDVAEVINLITKTLKNKNLNLEKSNKQKISKWWEQIEKWKTKKSLNYINSDKIIKPQHAVQRLYELTKNKDTYITTEVGQHQMWAAQHYKFDKPNRWMTSGGLGTMGYGLPAAVGVQIAHPEKLVVDIAGEASVLMTIQEMSTAVQYNLPIKIFILNNEYMGMVRQWQELLHEKNYSESYSAALPDFVKLAEAYGCVGIRAKTPDELDQKIEKMININKPVIFDCLVDPHENCFPMIPSGKPHNQMLLGPKDQEENKITGKGKELV

SEQ ID NO: 111097 - protein, 244 aa, Unknown
  Bacterial polypetide isolated from the Sargasso Sea
DINDSDIKKAIKLIEESERPLLYVGGGAISSGAHNEIRTLANNYQIPVTTTLMGKGAFDEKDKLSVGMLGMHGTAYANFAVTECDLLVAIGARFDDRVTGKLDTFAPNAKVIHIDIDPAEVNKNRRVDVAIVSDVSKAVRKINEKSLSNKFAFRTKNWLEKIDFWKNKHPLYQPPEEGEIYPQEVLLKVRELSPEAYVTTDVGQHQMWAAQYLRNSPRKWISSAGLRNYGFWIASSNWSEGSFT

SEQ ID NO: 111098 - protein, 480 aa, Unknown
  Bacterial polypetide isolated from the Sargasso Sea
MNISGSEAVIKFLLKENVDTIFGYPGGAIMPIYDALYNYVNKINHILTRHEQGAIHAAQGYARVSGKTGVCFATSGPGATNLITGLNDALIDSTPIVCITGQVPSNLLGTDAFQESDVIGISMPVTKWNHQITNSSEIVEILSKAFYIARSGRPGPVLIDITKDAQFSKTKFRYKKCEKIRSYHPYPVLKSKEINDAAKIINQAKKPLILVGQGVLLSKAENELIKFSEITGIPLASTLLGLSAISCDHKNYVGYLGMHGNYGPNVKTNEADLIIAIGMRFDDRVTGDTTKYAVNAKIIHIEIDPSEIDKIIKTDVAINADAKEALIDLNKIVQKNSHEKWINEFRKCDKLEFDKIINKEINGPYNKLSMAEIIHKISEFTKGKSIIVTDVGQHQMVASRYYKFKEPNSNITSGGLGTMGFALPAAMGSKIGNPNRDVIAVIGDGGIQMTIQELATISQYNIKVKILILNNNFLGMVRQW

SEQ ID NO: 111099 - protein, 613 aa, Unknown
  Bacterial polypetide isolated from the Sargasso Sea
MTTKSLTKNHPLAGKKMMGADMIVQILADEGVDTIFGYSGGAILPTYDAVFRFNEENKDSDGNQPMPLIVPANEQGAGFMASGYARASGKVGVVMVTSGPGATNTVTPIRDCMADSIPIVVISGQVPTTAIGTDAFQEAPVSAIMGAVSKHIFLVTDPLLLESTIRSAFELAKTGRPGPVVVDIPKDIQNWEGEFLGSGSLPLTGYRNRLETVMNNNLNDELAKNFYKLLSKSKKPLIYAGGGVINADASSQLRQFSETYKIPIVTTLMALGASDTTKSLSLHMLGMHGLASANYAVEDCDFLIAIGARFDDRVAGDPKGFAPNAKKIAHFDIDISEINKVKSVNWYHVGSLKKDLNDLIALGEKIEFVSDFSDWHSHIEKLKEEYKLNYNKNSELIQPYEVIEEINKLSRGEAIISTGVGQHQMWAAQYFDYKEPRLWLTSGSMGTMGFGLPAAIGAQFAKPNTLVIDIDGDASIRMNIGELETATTYDLPIKVLVLNNYGDGMVRQWQKLYYKGRMSASDKSLHRKDFVKTAEADGFEFSERLDNKSEIKNTVKKFIEFDGPAFLEVIIDPDAGVYPMVGPGQTYNKMITGDWIKNRNEIVDEELDKSSMF

SEQ ID NO: 111100 - protein, 423 aa, Unknown
  Bacterial polypetide isolated from the Sargasso Sea
PKDVQFATSEYIEKSKIPVSHYQPKTKGDPRQIASLVDAIENAKKPLFYTGGGVINSGANASKLLRELVDETNFPITSTLMGLGCYPASGKRWLGMLGMHGLYEANLAMHDCDLMINIGARFDDRITGRIDAFSPNSKKAHVDIDPSSINKVINVDIPIIGDVESVLKDMLKLWKSRGQKTNTSAVNGWWKQIEDWKSTNCLAFDQKGKTIKPQFAIARLEELTKKYKDRFISTEVGQHQMWAAQYLGFEKPNQWMTSGGLGTMGYGFPASIGVQIAHPEALVIKIAGEASWLMNMQEMGTAVQYRLPVKQFILNNERLGMVRQWQELLHGERYSHSWSDALPDFVKLAEAFGAKGILCDDPKNLDDAIMEMVEYDGPVIFDCLVEKHENCFPMIPSGEPHNKMLLGEASTKGAITSSGAVLV

SEQ ID NO: 111101 - protein, 553 aa, Unknown
  Bacterial polypetide isolated from the Sargasso Sea
IYDELKNHSTIKHILVRHEQGAGHAAEGYARSSGKPGVVLVTSGPGATNVVTALTDAYMDSVPLVCISGQVPTHLIGTDAFQECDTTGITRPCTKHNWLVKDIKELPKVMHEAFKVATTGRPGPVLIDIPKDIQFAKTNYTKFKKEKKLNGKIHNKFSENEINQLIDLISKAKKPVVYTGGGVINSGPQASETLKEFVRLIGFPITSTLQGLGAFPGDDNQFIGMLGMHGTYEANNAMHDCDLMINIGARFDDRITGKVDEFSPGSKKIHVDIDPSSIGKNIKVDLAIVSDVTTLLKSLIKRFKEKNKNFVNSNKQKISKWWEQIGKWREKKSLNFIGSDKIIKPQHAVQRLYELTKNQDTFITTEVGQHQMWAAQHYKFNKPNRWMTSGGLGTMGYGLPAAIGVQIANPGKLVVDIAGEASVLMTMQEMSTAVQYRLPIKIFILNNEYMGMVRQWQELLHEKNYSESYTAALPDFVKLAESYGCVGIRAKTPNELDEKIKEMISVDRPVIFDCVVDKAENCFPMIPSGKPHNQMILGPEEEEDISDEGKVLV

SEQ ID NO: 111102 - protein, 233 aa, Unknown
  Bacterial polypetide isolated from the Sargasso Sea
MATASRTHATDAFVSGADVVVESLIRQGVEVIFAYPGGASMPLHQSLTKFQEKIRTILPRHEQGGGFAAQGYARTTGKPGVCMATSGPGATNLVTAIADAKMDSIPLIALTGQVGTSVIGTDAFQETPIVEVCRGITKHHYLITDAEDIPRVMREAFHIATTGRPGPVLIDLPKNIQLSNIVPDYEAPMNLPGYRPEVRQPHAEQIAQVAAAIKRSKRPVIYAGGGVINGDAS

SEQ ID NO: 111103 - protein, 407 aa, Unknown
  Bacterial polypetide isolated from the Sargasso Sea
MPKLFSGAEIVFKCLEDQDVSHIFGYPGGAVLPIYDELKNHNSVKHILVRHEQGAGHAAEGYARSTGKPGVVLVTSGPGATNVVTALTDAYMDSVPLVCISGQVPTHLIGTDAFQECDTTGITRPCTKHNWLVKDINDLAEIMHKAFEVATTGRPGPVLVDIPKDIQFQKALYKKFKRKNKLNGASHNNFSQESINELINLMSKATKPIFYTGGGVINSGPKASELLRELVYTTGFPITTTLQGLGSFPGDDNQFLGMLGMHGTYEANNAMYECDLMINIGARFDDRITGKIDEFSPKSKKVHIDIDPSSINKNVKADLAIVGDVKSVITSTLKTLKKSKPNFIKSNKQKTSKWWEKIQKWRSKRSLDYIGSEETIKPQYAIERLYELTKDKDTFITTEVGQHQMWA

SEQ ID NO: 111104 - protein, 351 aa, Unknown
  Bacterial polypetide isolated from the Sargasso Sea
MGGGVINSGPEASKLLRELVSLTGFPITSTLQGLGAYPGDDPMFLGMLGMHGTYEANNAMYNCDLMINIGARFDDRITGKVDEFSPKSKKIHVDIDPSSIGKNIKVDLAVISDVVNFLKSLNKRFKEKNKDFLNSNKSNTSKWWKDIDKWRQKKSLSFKNSNQVIKPQHAVKRLYELSKHKDAYITTEVGQHQMWAAQHYKFNKPNRWMTSGGLGTMGYGLPAAVGVQVANPDKLVIDIAGEASVLMTMQEMSTAVQYNLPIKIFILNNQYMGMVRQWQELLHEKNYSESYTAALPDFVKLAEAYGCVGIQAKKPDELDDKINEMLNVNKPVIFDCLVDPNENCFPMIPSG

SEQ ID NO: 111105 - protein, 218 aa, Unknown
  Bacterial polypetide isolated from the Sargasso Sea
MGKLFSGAEIVFKVLEHHKVEHIFGYPGGAVLPIYDELKNHKTIKHILARHEQGAGHAAEGYARSSGKPGVMLVTSGPGATNAVTALTDAYMDSVPIVCISGQVPTHLIGTDAFQECDTTGITRPCTKHNWLVKDIKDLARVMDLAFDVATTGRPGPVLVDIPKDIQFKKTEFVLKNKKNKKLNGKSNGKIGNSDLDKIIQMMKKSSKPVFYTGWRSN

SEQ ID NO: 111106 - protein, 405 aa, Unknown
  Bacterial polypetide isolated from the Sargasso Sea
VGVLLVTSGPGVTNAVTGLTDALMDSIPLVCISGQVPSHLIGTDAFQECDTVGITRPCTKHNWLVKDINDLSRILHEAFYVASNGRPGPVLVDIPKDIQFQIGTYIGPETVKHKSYRPKLKASIDTIDEALQLISSSEKPVFYTGGGVINSGNAAVQLLREFVRLTGFPITSTLQGLGAFPGDDNQFIGMLGMHGTYEANMTMNQCDLMINIGARFDDRITGKVDEFSPNSKKIHIDIDPSSINKTVNVDVPIIGDVAHVLEDAIKLWKTKVYKTNKVEIKNWWSTIDQWRKKDSLKFEQGKKTIKPQYAIQRLYELTKDQDTFVTTEVGQHQMWAAQHYKFSKPNRWITSGGLGTMGFGFPAALGVQVAYPEKLVIDIAGEASILMCIQEMSTAIQHKLPVKIF

SEQ ID NO: 111107 - protein, 224 aa, Unknown
  Bacterial polypetide isolated from the Sargasso Sea
MPKLYSGAEIVFKCLEDQNVSHIFGYPGGAVLPIYDELKNFNSIKHILVRHEQGAGHAAEGYARSTGKPGVLLVTSGPGATNAVTALTDAYMDSVPLVCITGQVPTHLIGTDAFQECDTTGITRPCTKHNWLVKDINDLAKIMHKAFDVATTGRPGPVLVDIPKDIQFQKSKYKNYKNNKISNGKSHDNYSQKNIDDLINLIRKAKKPIFYTGGGVINSGTKAS

SEQ ID NO: 111108 - protein, 370 aa, Unknown
  Bacterial polypetide isolated from the Sargasso Sea
LGAKASQALRNFVELTGFPITSTLQGLGAYPGDDNQFLGMLGMHGTYEANNAMHDCDLLINIGARFDDRITGKIDEFSPNSKKVHIDIDPSSINKIIKVDLAIVGDVTSVISKINKTIKKSKNGHSKSNKSNIAKWWEQIEKWREKDSLNFVNSNESIKPQYAVQRLYELTKNKDTYVTTEVGQHQMWAAQHYKFNKPNRWMTSGGLGTMGYGLPAAVGVQIAHPEKLVIDIAGEASVLMTMQEMSTAVQYNLPIKIFILNNQYMGMVRQWQELLHEKNYSESYSEALPDFIKMAEAYGCKGIKVDNPADLDDKIQEMIDYNGPVIFDCHVDPNENCFPMIPSGKPHNQMILGPNDQQDNKIKGKGKALV

SEQ ID NO: 111109 - protein, 588 aa, Unknown
  Bacterial polypetide isolated from the Sargasso Sea
MSKLYSGAEIVFKCLEDQDVEFIFGYPGGAVLPIYDELKNFNFLKHILVRHEQGAGHAAEGYARSSGKPGVLLVTSGPGATNAVTALTDAYMDSVPLVCISGQVPTHLIGTDAFQECDTTGITRPCTKHNWLVKDVKDLEKTIHKAFEVATTGRPGPVLVDIPKDVQFQKTNYTKFKKQKKTNGKVHNHFSQKDVDELIELMSKASKPIFYTGGGVINSGPKASELLRELVNKTGFPITSTLQGLGSYPGEDSQFLGMLGMHGSYEANNAMHDCDLMINIGARFDDRITGKIDEFSPKSKKVHIDIDPSSINKNVKVDLPIIGDVAEVITSTIKTIKKTKPNFAKSNKQKISKWWEQIQKWRSVNSFDFVNSDETIKPQYAVQRLYELTKNKDTYITTEVGQHQMWAAQHYKFDKPNRWMTSGGLGTMGYGLPAAVGVQVAHPNKLVIDIAGEASVLMTMQEMSTAVQYSLPIKIFILNNEYMGMVRQWQELLHDKNYSESYTAALPDFVKLAEAYGCVGIRASTPQELDDKIIEMINTDRPVIFDCRVDKQENCFPMIPSGKPHNQMLLGPKDQKENKITGKGKTLV

SEQ ID NO: 111110 - protein, 588 aa, Unknown
  Bacterial polypetide isolated from the Sargasso Sea
MSKLYTGAEIVFKCLEDQKVKHIFGYPGGAVLPIYDELKNHSSIKHILVRHEQGAGHAAEGYARSSGKPGVVLVTSGPGATNVVTALTDAYMDSVPLVCISGQVPTHLIGTDAFQECDTTGITRPCTKHNWLVKDIEDLSNIMHEAFKVATTGRPGPVLVDIPKDIQFAKTKYKKPKKEKKSNGKPVNKFSQKQIDQLVDLFNNAKKPIIYSGGGVINSGPKASDELRELVELTGFPITSTLQGLGAYPGDDNQFLGMLGMHGTYEANNAMHDCDLLINIGARFDDRITGKIDEFSPNSKKVHIDIDPSSINKIIKVALAIVGDVAKVIAKVNKTILKKKNGHSKSNKSNIAKWWEQIQKWRSKGSLNFINSNENIKPQHAVKRLYELTKDKDTYVTTEVGQHQMWAAQHYKFNKPNRWMTSGGLGTMGYGLPAAVGVQIAHPEKLVVDIAGEASVLMTMQEMSTAVQYNLPIKIFILNNQYMGMVRQWQELLHEKNYSESYSEALPDFLKMAEAYGCKGIKAENPSELDDKIQEMIDYNGPVIFDCHVDPNENCFPMIPSGKPHNQMILGPNDQEDNKIKGKGKALV

SEQ ID NO: 111111 - protein, 359 aa, Unknown
  Bacterial polypetide isolated from the Sargasso Sea
MTSQITGAKMVVQALKDQGVDTVFGYPGGAVLPIYDEIFQQNEIRHILVRHEQGAVHAAEGYARSTGKPGVVLVTSGPGATNAVTGLTDALMDSIPLVVLTGQVPTFMIGSDAFQEADTVGITRPCTKHNWLVKDTDQLAPILHEAFHVAKSGRPGPVLVDIPKDVQFASGVYISNKKAPTSQYRPKLKGDIEQITKLVEAIEQSKKPIFYTGGGVINSGTGASQLLRELVKGTNFPITSTLMGLGCYPASGSNWLGMLGMHGLYEANMAMHDCDLMINIGARFDDRITGRIDAFSPSSKKAHIDIDPSSINKVIHVDIPIIGDIAHVLDDVLNMWKARGRKTNSAAIDKWWGQIGEWR

SEQ ID NO: 111112 - protein, 384 aa, Unknown
  Bacterial polypetide isolated from the Sargasso Sea
KEAVDLIETAKRPVIYSGGGVIQNDASDELIELAKLLNFPVTNTLMGLGAFPGSDPQFMGMLGMHGTYQANMAMHNADLIIAIGARFDDRITNDPKQFSLEAKKIHIDVDPASVSKIIHADIPIVGSAKECLSALLLELNSRNLKLNESDIAEWNKQISAWRDAHGLNHSLLELGPQNGKILPQQVVQSLYKETNGEAFITSDVGQHQMFAAQYYHFDKPRQWINSGGLGTMGFGLPSAMGVQLAFPESTVACVTGEGSIQMCIQELSTCLQYGLPIKIINLNNAALGMVRQWQDMQYGGRHSSSTYENSLPDFIALAESYGHVGIKVAKFEDLEAAMKECVSLKDRLVFLDVDVDPNEHVYPMLEAGNAMDHMWLGKEEKTWK

SEQ ID NO: 111113 - protein, 410 aa, Unknown
  Bacterial polypetide isolated from the Sargasso Sea
CLIKEGVEVVFGYPGGAILPTYDALSKYSGSVHHVLTRHEQGATHMADGYARASGKVGVAIATSGPGAANMITGLATAMMDSSPIVCITGQVPRPAIGSDAFQEMDISGAVIPVTKHSYLVMEIKDLAKTIKEAFAIARSGRPGPVLIDIPKDLQAEEFEFIYPEEKVTIPGENPIKSDISSVDLDSAVKMIANAKKPVILAGHGVLISGASDEVISLSEKSSIPISWTLLGSGAVPASHPLNMGMMGMHGEFAANNAIHNADLLIACGMRFDDRVTGNTKTYSPDSRKIHIEVDPSEINKNVKVDLALNGDLKFILDNLVPKVSKKENREWFDQISSWQNESASRDIINMDTEILYGAQVISDLWKETNGDAIIVSDVGQHQMLEAQYYKHDEPNTLLTSGGLGTMGFS

SEQ ID NO: 111114 - protein, 387 aa, Unknown
  Bacterial polypetide isolated from the Sargasso Sea
MSKSKKPIIYSGGGVINSGPKASQALREFVELTGFPITSTLQGLGAYPGDDNQFLGMLGMHGTYEANNAMHDCDLLINIGARFDDRITGKIDEFSPNSKKVHIDIDPSSINKIIKVDLAIVGDVTSVISKINKTFSKRKNGHSKSNKSNIAKWWEQIEKWKEKDSLNFINSDESIKPQHAVQRLYELTKNKDTYVTTEVGQHQMWAAQHYKFNKPNRWMTSGGLGTMGYGLPAAVGVQIAHPEKLVVDIAGEASVLMTMQEMSTAVQYNLPIKIFILNNQYMGMVRQWQELLHEKNYSESYSEALPDFMKMAEAYGCKGIKADNPSDLDDKIQEMIDYDGPVIFDCHVDPNENCFPMIPSGKPHNQMILGPNDKEDNKIKGKGKALV

SEQ ID NO: 111115 - protein, 588 aa, Unknown
  Bacterial polypetide isolated from the Sargasso Sea
MPKLFTGAEIVFKCLEDQKVEHIFGYPGGAVLPIYDELKNHPSIKHILVRHEQGAGHAAEGYARSSGKPGVVLVTSGPGATNVVTALTDAYMDSVPLVCISGQVPTHLIGTDAFQECDTTGITRPCTKHNWLVKDINDLSKVMHEAFRVATTGRPGPVLIDIPKDIQFAKTKYKKPNKEKKLNGKSHNKFSQDQIDELVKLLSKAKKPIIYSGGGVINSGPKASQALREFVELTGFPITSTLQGLGAYPGDDNQFLGMLGMHGTYEANNAMHDCDLLINIGARFDDRITGKIDEFSPNSKKVHIDIDPSSINKIIKVDLAIVGDVTSVISKINKTISKRKNGHSKSNKSNIAKWWEQIEKWREKDSLNFVNSDESIKPQHAVQRLYELTKNKDTYVTTEVGQHQMWAAQHYKFNKPNRWMTSGGLGTMGYGLPAAVGVQIAHPEKLVIDIAGEASVLMTMQEMSTAVQYNLPIKIFILNNQYMGMVRQWQELLHEKNYSESYSEALPDFMKMAEAYGCKGIKADNPSDLDDKIQEMIDYDGPVIFDCHVDPNENCFPMIPSGKPHNQMILGPNDQEDNKIKGKGKALV

SEQ ID NO: 111116 - protein, 403 aa, Unknown
  Bacterial polypetide isolated from the Sargasso Sea
MSKLYSGAEIVFKCLEDQNVKFIFGYPGGAVLPIYDELKNFNFIKHILVRHEQGAGHAAEGYARSTGKPGVLLVTSGPGATNAVTALTDAYMDSIPLVCISGQVPTHLIGTDAFQECDTTGITRPCTKHNWLVKDIKDLQKTIHKAFEVATTGRPGPVLVDIPKDVQFQKVSYSKFKKQKKLNGKIKNQFSQKDINQLIDLMNNASKPIFYTGGGVINSGPKASQLLRELVNTTGFPITTTLQGLGSFPGDDSQFLGMLGMHGSYEANNAMHDCDLMINIGARFDDRITGKIDEFSPKSKKVHIDIDPSSINKNVKVDLPIVGDVAEVITSTIKTIKKVKPNFAKSNKQKISKWWEKIQKWRSVNSFDFVNSNETIKPQYAIQRLYELTKNKDTYITTEVGQH

SEQ ID NO: 111117 - protein, 572 aa, Unknown
  Bacterial polypetide isolated from the Sargasso Sea
MEKLSGASMIVRSLIDEGVKHIFGYPGGSVLDIYDALHLIPGIEHILVRHEQAAVHMADGYARATGKVGVVLVTSGPGATNAITGIATAYMDSIPLVVLSGQVPSNLIGNDAFQECDMIGISRPVVKHSFLVQDPTQIPEIIKKAFYIASTGRPGPVVVDLPKDCLNPALLHDYIYPESIKMRSYNPTTSGHKGQIRRGLQALLAAKKPVLYVGGGAIISSSEKQILTLAEKLNIPVVSTLMGLGAFPGTHKNSLGMLGMHGRYEANMTMHNCDLIFGIGVRFDDRTTNNIEKYCPNATILHIDIDPSSISKTVRVDIPIVGSADIVLDSMLALLEESKESNDSEALNQWWQEITVWRERNCLAYDKESHRIKPQQVIETLYKLTNGEAYVASDVGQHQMFAALYYPFDKPRHWINSGGLGTMGFGLPAAMGVKMAMPDETVVCVTGDGSIQMNIQELSTALQYDTPVKIINLNNRFLGMVKQWQDMIYSGRHSHSYMDSVPNFAKIAEAYGHVGMTISDPAELESKMAEALAMKDRLVFIDIMVDETEHVYPMLIRGGAMNEMWLSKTEKC

SEQ ID NO: 111118 - protein, 270 aa, Unknown
  Bacterial polypetide isolated from the Sargasso Sea
MKIAGNDILIQSLINEGVEYIFGYPGGAALHIYDAIFNQKEMQHILVRHEQGATHAADGYARATGKPGVVLVTSGPGATNAITGIATAFMDSIPMVVISGQVQSHLIGTDAFQETDMIGVSRPIVKHSFTVDKQENIAQIVKEAFHIATSGRQGPVVIDVPKDLTNPDELFDFNYPEKANIRSYNPPVKPENHQVSRAVDAILTAERPVIYAGGGTISSNASDELRELNELIDFPVTNTLMGLGVYPGTGKRFLGMLGMHGTYQANRQCI

SEQ ID NO: 111119 - protein, 428 aa, Unknown
  Bacterial polypetide isolated from the Sargasso Sea
MSKTQTSGGDALIKSLHEEGVELVFGYPGGAALHIYDALFNQSEVEHILVRHEQGAVHAADGYARSTGKPGVALVTSGPGATNAITGLATAFMDSTPVIVISGQVKSELIGTDSFQETDMIGVSRPIVKHSFLVQKAEDIPEIVKKAFHIATTGRPGPVVIDVPKDFTDPNHTFDFVYPSEINMRSYKPAKVGDSKQIKKAVDLMLEAKQPVIYSGGGVIQDNASGELTELAKLLQFPITNTLMGLGAFPGTDPQFLGMLGMHGTYEANMVMHNADLIIAVGARFDDRITNDPKQFALKAKKIHIDVDPASLSKIIHADIPIAGSAKECLLALIAELKEQSIDTNKLEPWHKQINEWRKEHGLNHSMLDVVPENGKILPQQVIQSLYKETGGKAFVTSDVGQHQMFAAQYYFFDKPRQWINSGGLGTM

SEQ ID NO: 111120 - protein, 588 aa, Unknown
  Bacterial polypetide isolated from the Sargasso Sea
MSKLYSGAEIVFKCLEDQGVEFIFGYPGGAVLPIYDELKNYNSVKHILVRHEQGAGHAAEGYARSSGKPGVLLVTSGPGATNAVTALTDAYMDSIPLVCISGQVPTHLIGTDAFQECDTTGITRPCTKHNWLVKDINKLEKTIHKAFEVATTGRPGPVLVDIPKDVQFQKTKYQKYKKPKKLNGKTHRNFSQKDIDELIQLMSKASKPIFYTGGGVVNSGPKASELLRELVNATGFPITSTLQGLGSYPGDDGQFLGMLGMHGSYEANNAMHDCDLMINIGARFDDRITGKLDEFSPKSKKVHIDIDPSSINKNVKVDLPIVGDVTEVINATIKTIKKVKPNFVKSNKQKISKWWEKIQKWRSVNSFDYINSTETIKPQYAVQRLYELTKDKDTYITTEVGQHQMWAAQHYKFNKPNRWMTSGGLGTMGYGLPAAVGVQVAHPNKLVVDIAGEASVLMTMQEMSTAVQYSLPIKIFILNNEYMGMVRQWQELLHDKNYSESYTAALPDFVKLAEAYGCVGLRATTPEELDDKIIEMINTDRPVIFDCLVDKQENCFPMIPSGKAHNQMLLGPKDQKKNKITGKGKTLV

SEQ ID NO: 111121 - protein, 590 aa, Unknown
  Bacterial polypetide isolated from the Sargasso Sea
MGKLFSGAEIVFKVLEHHKVEHIFGYPGGAVLPIYDELKNHKTIKHILARHEQGAGHAAEGYARSSGKPGVLLVTSGPGATNAVTALTDAYMDSVPLVCISGQVPTHLIGTDAFQECDTTGITRPCTKHNWLVKDVNDLAKIMDLAFEVATTGRPGPVLVDIPKDIQFKKTNFVLKSSNKKKLNGKSRSNGKISASVLDNVINLMKKSSKPIFYTGGGVINSGPDASKSLRELVSLTGFPITSTLQGLGAYPGDDPLFLGMLGMHGTYEANNSMYSCDLMINIGARFDDRITGKVDEFSPKSKKIHVDIDPSSIGKNIKVDLAVVSDVAGFLKALNKRIKEKHKDFLNSNKQNISKWWKDIDKWRQKKSLSFKNSKEVIKPQYAVQRLYELSKNQDTYITTEVGQHQMWAAQHYKFNKPNRWMTSGGLGTMGYGLPAAVGVQIAHPDKLVIDIAGEASVLMTMQEMSTAVQYKLPIKIFILNNQYMGMVRQWQELLHEKNYSESYTAALPDFVKLAQAYGCVGIQATKPDELDEKINEMINTKEPVIFDCRVDPAENCFPMIPSGKPHNQMLLGPEDEKEEVSDEGKTLV

SEQ ID NO: 111122 - protein, 389 aa, Unknown
  Bacterial polypetide isolated from the Sargasso Sea
YLITDVKEIPQILLEAKHIATSGRPGPVLVDIPKDILNDKTSWVEPKLEELPGYKPTLEANPRMIQQAVELIKNSKKPILYVGGGIIHSKANQELFELSTKYNIPVVTTLMGRGAFPDGNDLCIGMPGMHGNYTATTSIQNSDLLIALGVRFDDRVTANPKFFAQKAKVIHADIDPAEIGKVREPEVPIVGDAKSVIKGLIETLGDTEVDTKDWLKEIKEMKKSYPLSYNQEEKGPLKVPYVLEELQKMSEEDSIVVSGVGQHQMWISLHWKFTSPNTWLNSGGLGTMGYSLPAAIGAKAAFPDKQVLALDGDGCFQMTCQELITASTENIPLKIVVFNNGNHGMVRQWQKIFYDHRFSASELTHHTPDYVALAEAMGAVGLRMVEKSD

SEQ ID NO: 111123 - protein, 559 aa, Unknown
  Bacterial polypetide isolated from the Sargasso Sea
MIGATALMKALEKEGVKEVFGLPGGANLPMYDELGKSNIRHILVRHEQSAAHMADGFGRVSRKPGVCFATSGPGATNLLTGIATAQADSAPMVAVTGQVPVAMIGKDAFQESDIIGMANPALKYSYQPRTPEEIPTMVKQGFYIAETGRPGPVLLDIPKDVQQNEGNIPFPDEVRVPGYHPWTDPDMQNTGRAVELLLSAKKPIILAGGGVIISSAFAELQSIAELLMIPVVTTFKGKGAFPENHPLSLGPIGMHGHAEANKLMTEADCVLAIGTRFSDRSVGTFEEFEKNLKIIHMDVDPAEIGKNQTTSVAVVGDVRTSLRIFGKLLMDKAVRASDDNPWLKHVKETKQYWRENLKIHPGEMGAAKILRKLRELLPKESIVTTEVGQHQMWASLFFDAIHPGTFFSSTGLGTMGWGFPAAIGAKTARPDVPVVDIAGDGSFNMTEHSLATAVLEDLPVIVFLINNYSLGMVAQWQRTFYDRRMVGVDLKKCPDYVKLAESYGAQGIRAQSMDELEKAIKDGLNSDVATVIDIPIDPEEDVLPFVAPGTGLKDMILPS

SEQ ID NO: 111124 - protein, 480 aa, Unknown
  Bacterial polypetide isolated from the Sargasso Sea
LTDAYMDSVPLVCISGQVPTHLIGTDAFQECDTTGITRPCTKHNWLVKDVKDLSKTIHKAFEVATTGRPGPVLVDIPKDIQFNKSSYSKPKKQKKLNGKNHNFYSQKEIDELIKLIIKSKKPIIYSGGGVVNSGTEASQLLRELVEATGFPITSTLQGLGAYPGEDNQFLGMLGMHGTYEANNAMYGCDLMINVGARFDDRITGKIDEFSPKSKKVHIDIDPSSINKNVKVDLAIVGDVASVLKNTIKTLKKQKPNFSKSNKSNISKWWEQIQKWRSINSLGYIKSEESIKPQYAVQRLYELTKNKDTFITTEVGQHQMWAAQHYKFDKPNRWMTSGGLGTMGYGLPAAIGVQIANPNKLVIDIAGEASVLMTMQEMSTAVQYSLPIKIFILNNEYMGMVRQWQELLHDKNYSESYTAALPDFVKLAEAYGCVGIRAKKPEELDDKIIEMINTDRPVIFDCLVDKVENCFPMIPSGKPHN

SEQ ID NO: 111125 - protein, 578 aa, Unknown
  Bacterial polypetide isolated from the Sargasso Sea
MKIAGNDILIQSLINEGVEYIFGYPGGAALHIYDSIFNQKEMQHILVRHEQGATHAADGYARATGKPGVVLVTSGPGATNAITGIATAFMDSIPMVVISGQVQSHLIGTDAFQETDMIGVSRPIVKHSFTVDKQENIAQIVKEAFHIATSGRQGPVVIDVPKDLTNPDELFDFNYPEKANIRSYNPPVKPENHQVSRAVDAILTAESPVIYAGGGTISSNASNELRELNELIDFPVTNTLMGLGVYPGTGKRFLGMLGMHGTYQANMAMHNADLIIAVGARFDDRITNTPEKFAPKAKVIHFDVDHSSVSKIIEADIAVFGQVKDSLQAINNHLKSRKDEIKKEKLSPWHQQISEWKEKHGLDHELYKNNSDEHPILPQAVVQHIYQESEGKAFVTSDVGQHQMFAAQYYHFDEPRKWINSGGLGTMGFGLPSAMGVKLAYPEEEVICITGEGSIQMCIQELSTCSQYKLPIKIFNINNLALGMVKQWQDMNYEGRHSSISYEDSLPDFVGLAESYGHVGIKITKNSELKEGIAKAFAIKDKLVFVDIYVDPNEHVYPMLVAPNGSLKDMWLGKGKKT

SEQ ID NO: 111126 - protein, 588 aa, Unknown
  Bacterial polypetide isolated from the Sargasso Sea
MPKFYTGAEIVFKCLEDQKVEHIFGYPGGAVLPIYDELKNHSSIKHILVRHEQGAGHAAEGYARSSGKPGVVLVTSGPGATNVVTALTDAYMDSVPLVCISGQVPTHLIGTDAFQECDTTGITRPCTKHNWLVKDVNDLSKIIHEAFKVATTGRPGPVLIDIPKDIQFAKAKYTKPKIEKKLNVKSHNKFSQKDIDELIKLLSKSKKPIIYSGGGVINSGPKASEALREFATLSGFPITSTLQGLGAFPGDDNQFLGMLGMHGTYEANNAMHDCDLLINIGARFDDRITGKIDEFSPNSKKVHIDIDPSSINKIIKVDLAIVGDVSSVINKINKSIIKIKNGNGKSNKSNIAKWWEQIEKWRKKDSLNFINSDKTIKPQYAVQRLYELTKKEDTYVTTEVGQHQMWAAQHYKFDKPNRWMTSGGLGTMGYGLPAAVGVQIAHPNKLVIDIAGEASVLMTMQEMSTAVQYNLPIKIFILNNQYMGMVRQWQELLHEKNYSESYSEALPDFMKMAEAYGCKGIKADNPADLDEKIQEMIDYDGPVIFDCHVDPNENCFPMIPSGKPHNQMILGPNDQEDNKIKGKGKALV

SEQ ID NO: 111127 - protein, 588 aa, Unknown
  Bacterial polypetide isolated from the Sargasso Sea
MKEEITGSDIVLKCLAEQGVEVVFGYPGGAVLPIYDTMFKQNSIRHILVRQEGGAIHAAEGYARSTGKIGVVLVTSGPGATNVVTGLTDAMMDSVPIVCITGQVPQHLIGSDAFQECDTTGITRACTKHNYLVKDVNKLSYVFHEAFEIANNGRPGPVLIDIPKDVQFANGNYESKKSITIPSHRLFEPVLKNNSENIKNAVDLISKAKKPIFYIGGGCINSGKEASIKVTEFVELVGAPATMTLMGLGVIPSSHKQSLGMLGMHGMYEANMAMHECDVMINIGARFDDRVTGRLDAFSPNSKKIHIDIDESNINKTINVDIPLVGDVKLMVKEMLSIWKKNNFSVNKSNLESWWKRVNEWKEVDCLKYNQKTKNIKPQYAIQKLYELTKNRDTFITTEVGQHQMWAAQYYKFEKPNRWLTSGGLGTMGYGFPAAIGAQIANPNALVIDIAGDASILMNIQEMSTAVQYRLPVKIFILNNEYMGMVRQWQELLHGGRYSESYTDSLPDFVKLAESYRALGLRAKNADELDDVIEEMINSDKTVIADIWVDKEENCFPMIQSGSAHNEMLLSKDQEQDKKSAEKGKILV

SEQ ID NO: 111128 - protein, 588 aa, Unknown
  Bacterial polypetide isolated from the Sargasso Sea
MPKLYTGAEIVFKCLEDQGVSNIFGYPGGAVLPIYDELKNFKSIKHYLVRHEQGAGHAAEGYARSTGKPGVLLVTSGPGATNAVTALTDAYMDSVPLVCISGQVPTHLIGTDAFQECDTTGITRPCTKHNWLVKDVKDLAKTIHKAFEVATTGRPGPVLVDIPKDIQFQKTNYINFKRKIKLNGKSHNQFSKNDIEELVNLLKKASKPIFYTGGGVVNSGPKASELLRELVRATGFPITSTLQGLGCYPADDNQFLGMLGMHGTYEANNAMYECDLMINIGARFDDRITGKIDEFSPNSKKVHIDIDPSSINKNVKVDLAIVGDVKSVIESTIKTLKKTKHDFLKSNKQKTSKWWEKIQKWRARRSLDYIGSEETIKPQYAVERLYELTKDKDTYITTEVGQHQMWAAQHYKFNKPNRWMTSGGLGTMGYGLPAAVGVQVAHPNKLVIDIAGEASVLMTMQEMSTAVQYGLPIKIFILNNEYMGMVRQWQELLHDKNYSESYTAALPDFVKLAEAYGCVGLRAKTPEELDDKIIEMLNTDQPVIFDCLVDKQENCFPMIPSGKPHNQMLLGPNDQKSKKITGKGRTLV

SEQ ID NO: 111129 - protein, 559 aa, Unknown
  Bacterial polypetide isolated from the Sargasso Sea
MIGATALMKALEKEGVKEVFGLPGGANLPMYDELGKSNIRHILVRHEQSAAHMADGFGRVSRKPGVCFATSGPGATNLLTGIATAQADSAPMVAVTGQVPVAMIGKDAFQESDIIGMANPALKYSYQPRTPEEIPTMVKQGFYIAETGRPGPVLLDIPKDVQQNEANIPFPDEVRVPGYHPWTDPDMQNTARAVELLLSAHKPIILAGGGVIISSAFAELQSIAELLMIPVVTTFKGKGAFPEDHPLSLGPIGMHGHAEANKLMTEADCVLAIGTRFSDRSVGTFEEFEKNLKIIHMDVDPAEIGKNQTTSVAVVGDVRTSLRIFGKLLMDKAVRPSDDNPWLKHVKETKQYWRENLKLHPGEMGAAKILRKLRELLPKESIVTTEVGQHQMWASLFFDAIHPGTFFSSTGLGTMGWGFPAAIGAKTARPDVPVVDIAGDGSFNMTEHSLATAVLEDLPVIVFLINNYSLGMVAQWQRTFYDRRMVGVDLKKCPDYVKLAESYGAQGIRAQSMDELEKAIKDGLNSDVATVIDIPIDPEEDVLPFVAPGTGLKDMILPS

SEQ ID NO: 111130 - protein, 116 aa, Unknown
  Bacterial polypetide isolated from the Sargasso Sea
MAKLSTGAEIVFKCLEDQNVEFIFGYPGGAVLPIYDELKNHSSIKHILVRHEQGAGHAAEGYARSSGKPGVVLVTSGPGATNVVTALTDAYMDSIPLVCISGQVPTHLIGTDAFQE

SEQ ID NO: 111131 - protein, 571 aa, Unknown
  Bacterial polypetide isolated from the Sargasso Sea
MLIKSLVDEGVEYLFGYPGGAALHIYDAIFNQKELQHILVRHEQGATHAADGYARATGKPGVVLVTSGPGATNAITGIATAFMDSIPMVVLSGQVASHLIGTDAFQETDMIGISRPIVKHSFSIESAEEIPKVIKEAFYIATSGRPGPVVIDIPKDTTAPDKLFEYNPPESVKIRSYNPPVEPDSKQIARAVSEILKAKKPVIYAGGGAINSNASKELFELNELLNFPVTNTLMGLGVYPAKNQRFMGMLGMHGTYQSNMAMHNADLIIAIGARFDDRITNTPDLFAPNAKIIHFDVDQSSVSKIIEANVAVFGQVKNSLIELNKQLKDKIDLIDSALIQPWLDQIDEWTSLHGLNHELYKENSDEKMIMPQSVVQHVYQITDGNAFVTSDVGQHQMFAAQYYHFNEPRKWINSGGLGTMGFGLPAAMGVKLAFPEEEVVCITGEGSIQMCIQELSTCSQYNLPIKIININNEALGMVKQWQDMSYGGRHSESTYQSSLPNFIDLVESYGHIGFKIEKNSDLKGILDQAFSIKDKLVFVDVYVDPDEHVYPMLVAPNGSLKDMWIDKDKKV

SEQ ID NO: 111132 - protein, 353 aa, Unknown
  Bacterial polypetide isolated from the Sargasso Sea
MKLAGNDILIQSLIEEGVEYIFGYPGGAALHIYDSIFKQKEMEHILVRHEQGATHAADGYARATGKPGVVLVTSGPGATNAITGIATAFMDSIPMIVISGQVAKHLIGTDAFQETDMIGISRPIVKHSFTVDSAENIPEIVKQAFHIATSGRPGPVVIDVPKDTTAPDKLFEFKYPNDVDIRSYKPPIDPDPRQIERAVDAIIESNKPVIYAGGGAINSNASEELIRLNEILDFPVTNTLMGLGVYPATHKRFLGMLGMHGTYQANMSMHNADLIIAIGARFDDRITNTPKLFAPKAKIIHLDVDYSSVSKIIEANIAVFGQVKNALLEMIKLLEVKKELIDPKKISLERTNS

SEQ ID NO: 111133 - protein, 585 aa, Unknown
  Bacterial polypetide isolated from the Sargasso Sea
MPSAEFSTSEPLSPPDSDSIGGTVLMKALADENVEFIWGYPGGSVLYIYDELYKQDKIQHVLVRHEQAAVHAADAYARSTGNVGVCLVTSGPGVTNAVTGIATAYMDSIPMVVISGQVPTAAIGQDAFQECDTVGITRPCVKHNFLVKDVRDLAETVKKAFYIARTGRPGPVLIDIPKDISKTPCEYEPVKSVSLRSYNPVTKGHSGQIRKAVSLLLTAKRPYIYTGGGIILADASRELNQFADLLGYPVTNTLMGLGGYRASDKKFLGMLGMHGTYEANMAMQHCDVLIAIGARFDDRVIGDPAHFASRPRKIIHIDIDPSSISKRVKVDIPIVGDVKEVLKELIEQLQTAEHGPDTEALAQWWKDIEGWRAKDCLKYDRESEIIKPQYVVEKAWELTDGNAFVCSDVGQHQMWAAQFYRFNKPRRWINSGGLGTMGFGLPAAMGVKMAHPDDDVLCITGEGSIQMCIQELSTCLQYDTPVKIISLNNRYLGMVRQWQQIEYSKRYSHSYMDALPDFVKLAEAYGHVGMRIEKTSDVEPALKEALRLKDRTVFLDFQTDPTENVWPMVQAGKGITEMLLGSEDL

SEQ ID NO: 111134 - protein, 308 aa, Unknown
  Bacterial polypetide isolated from the Sargasso Sea
MHGTAYANFAVTECDLLIAIGARFDDRVTGKLDTFAPNAKVIHIDIDPAEVNKNRRVDVAIVADVSKAVLKINELSLKNKFTCRTKNWLEKIDFWKHKHPLYDPPKEGEIYPQEVLLKVRELSPEAYITTDVGQHQMWAAQYLRNSPRKWISSAGLGTMGFGLPAAIGVKAALPNSDVICIAGDASVLMNIQELGTLSQYGLKVKLIIINNRWQGMVRQWQESFYDERYSSSDMSCGEPDFVKLAESFGVKGYLISDRKKLQNELKNALDHDGPALINILVRRGENCYPMVPPGKSNAQMVGYVNCED

SEQ ID NO: 111135 - protein, 313 aa, Unknown
  Bacterial polypetide isolated from the Sargasso Sea
MSKLYTGAEIVFKCLEDQEVEYIFGYPGGAVLPIYDELKNHSSIKHILVRHEQGAGHAAEGYARSSGKPGVVLVTSGPGATNVVTALTDAYMDSIPLVCISGQVPTHLIGTDAFQECDTTGITRPCTKHNWLVKDIKELPKVMHEAFKVATTGRPGPVLIDIPKDIQFAKTNYTKLKKEKKLNGKTHNKFSQDEIDQLIELISKAKKPVVYTGGGVINSGPQASETLKEFVRLIGFPITSTLQGLGAFPGDDNQFIGMLGMHGTYEANNAMHDCDLLINIGARFDDRITGKIDEFSPKSKKVHIDIDPSSINK

SEQ ID NO: 111136 - protein, 588 aa, Unknown
  Bacterial polypetide isolated from the Sargasso Sea
MSKNYSGAEIVFKCLEDQGVENVFGYPGGAVLPIYDELKNHESVKHILVRHEQGAGHAAEGYARSTGKPGVVLVTSGPGATNVVTALTDAYMDSIPLVCISGQVPTHLIGTDAFQECDTTGITRPCTKHNWLVKDIKDLAKTIHKAFEVATTGRPGPVLVDIPKDIQFQKTKYHKYNKKKKLNGKNTNHFSQKEIDKLIQMMSKSSKPVFYTGGGVINSGPQASNLLRELVSITGFPITTTLQGLGSYPGDDNQFLGMLGMHGTYEANNAMYECDLMINIGARFDDRITGKIDEFSPNSKKVHIDIDPSSINKNVKVDLPIVGDVSDVIKSTIKTISKKKLNFSKSNKQKISKWWEKIQKWRSIKSLDYIKSEDSIKPQYAIERLYELTKNKETFITTEVGQHQMWAAQHYKFNKPNRWMTSGGLGTMGYGLPAAVGVQVAHPNKLVIDIAGEASVLMTMQEMSTAVQYSLPIKIFILNNEYMGMVRQWQELLHDKNYSESYTAALPDFVKLAEAYGCVGIRAKTPEELDDKIIEMLNTDRPVIFDCLVDKEENCFPMIPSGKPHNQMLLGPKDQKNNKITGKGKTLV

SEQ ID NO: 111137 - protein, 437 aa, Unknown
  Bacterial polypetide isolated from the Sargasso Sea
MSKLYSGAEIVFKCLEDQDVKFIFGYPGGAVLPIYDELKNHTTIKHILVRHEQGAGHAAEGYARSSGKPGVVLVTSGPGATNVVTALTDAYMDSVPLVCISGQVPTHLIGTDAFQECDTTGITRPCTKHNWLVKDIKDLPKIMHEAFRVATTGRPGPVLVDIPKDIQFAKTNYSKPKIEKKINEKLHNKFSQDEINELINLISKAKKPVIYTGGGVINSGPKASDTLREFVRLIGFPITSTLQGLGAFPGDDNQFIGMLGMHGTYEANNAMHDCDLLINIGARFDDRITGKIDEFSPRSKKVHIDIDPSSINKIIKVDLAIVGDVNEVLKTTIKKINKKQNGSKISNKQNISKWWEQIQKWRTKDSLGFINSEKTIKPQHAVQRLYELTKNQDTFITTEVGQHQMWAAQHYKFNKPNRWMTSGGLGTMGYGLPAAVG

SEQ ID NO: 111138 - protein, 570 aa, Unknown
  Bacterial polypetide isolated from the Sargasso Sea
MSEEKLSGAELVVRSLEYMNISTIFGLPGGAILPAYDPLYDSPIRHILARHEQGSGHMAEGYAQATGELGVVIATSGPGATNLITPLTNALMDSTPLLAITGQVASEAIGNDAFQEAYTVGLTMAATKHNYLITSAEEIPQVLLEAKHIATTGRPGPVLVDIPKDILNQKVEWIEPKLIEMPGYKPTLEPNPKMISQAAELIKQSKKPILYVGGGIIHSKANQELFELATKFKIPVVTTLMGRGAFPDGNELCFEMPGMHGNYTATTSIQKSDLLIAIGVRFDDRVTANPKFFAQNAKVIHADIDPAEIGKIREPEVPIVGDAKSVITGLIEKLADTDLNTSDWLDELNQMKKEYPLSYNQEEKGPLKVPFVLEELQKLADDDAIVVSGVGQHQMWISQHWNFTSPNTWLNSGGLGTMGYSLPAAIGAKAAYPDRQILALDGDGCFQMTCQELITASTENIPIKIVVFNNGNHGMVRQWQKIFYKNRFSASELTHHTPDYVALAESMGATGLRMIEKSDVKKVFEKMLEIDDKPVLVECIVDPEDMVFPMVPAGGSNDVVILNEDDLKNL

SEQ ID NO: 111139 - protein, 205 aa, Unknown
  Bacterial polypetide isolated from the Sargasso Sea
MPKLSTGAEIVFKCLEDQKVEYIFGYPGGAVLPIYDELKNHSSLKHILVRHEQGAGHAAEGYARSSGKPGVVLVTSGPGATNVVTALTDAYMDSIPLVCISGQVPTHLIGTDAFQECDTTGITRPCTKHNWLVKDIKDLSKIIHKAFEVATTGRPGPVLVDIPKDIQFQKTTYSKYNKKKKLNGKKSNSFNKSDIDELTKLMSNA

SEQ ID NO: 111140 - protein, 379 aa, Unknown
  Bacterial polypetide isolated from the Sargasso Sea
IYGLYTNDCYIRPSCKTPIGTDAFQETDMIGISRPIVKHSFTVDSAENIPEIVKQAFHIATSGRPGPVVIDVPKDTTAPDKLFEFKYPNDVDIRSYKPPIDPDPNQIERAVDAIIESNKPVIYAGGGAINSNASEELIRLNEILDFPVTNTLMGLGVYPATHKRFLGMLGMHGTYQANMSMHNADLIIAIGARFDDRITNTPKLFAPNAKIIHLDVDYSSVSKIIEANIAVFGQVKNSLLEMIELLEAKKELIDPKKILPWKEQISDWKSQHGLNHEMHLCETDDKPIMPQAVVQHLYNITNGKAFITSDVGQHQMFAAQYYHFDEPRKWINSGGLGTMGFGLPAAMGAKLAYPNDEVICITGEGSIQMCIPGIVYFAL

SEQ ID NO: 111141 - protein, 308 aa, Unknown
  Bacterial polypetide isolated from the Sargasso Sea
NNAMQNCDVLLAVGARFDDRVIGNPKHFAQNDRKIIHVDIDPSSISKRVKVDIPIVGDVKDVLTELISMIRESSTRPDAGALAAWWDTIEGWRKRECLKYSMGSGDVIKPQYVVETLWNMTKDGDTYITSDVGQHQMWAAQYYRFDEPRRWINSGGLGTMGVGIPYAMGIKLAKPQSEVFCITGEGSVQMNIQELSTCLQYNTPIKICSLNNRYLGMVRQWQEIEYSGRYSHSYMDALPNFVKLAEAYGHVGMLIERPQDVEPALREARKLKDRTVFMDFRTDPTENVFPMVQAGKGITEMLLGSEDL

SEQ ID NO: 111142 - protein, 383 aa, Unknown
  Bacterial polypetide isolated from the Sargasso Sea
KSSKPIFYTGGGVINSGPEASKALRELVKLSGFPVTSTLQGLGAIPGDDHQFLGMLGMHGTYEANNAMHDCDLLINIGARFDDRITGRVDAFSPNSKKIHIDIDPSSINKIVKTDLSIVGDSLTVISEMITILKTKYSNFNSSNKEKISAWWSQIETWRKKKSLSYKKDKKLIMPQQAVERLYELTKKQDTFITTEVGQHQMWAAQFYKFKEPNRWMTSGGLGTMGYGLPAAIGVQLAHPKKLVVDIAGEASILMNIQELSTAVQYRLPIKIFILNNQWMGMVRQWQELLHEKNYSESYTEALPDFVKLAEAYGAVGIRATNPNELDGKIEEMMEINKPVIFDCVVKKDENCFPMIPSGKPHNEMILGPDDEEEISEEGKVLV

SEQ ID NO: 111143 - protein, 171 aa, Unknown
  Bacterial polypetide isolated from the Sargasso Sea
MKLPGNDILIQSLINEGVEYIFGYPGGAALHIYDAIFNQNEIEHILVRHEQGATHAADGYARATGKPGVVLVTSGPGATNAITGIATAFMDSIPMVVLSGQVATHLIGTDAFQETDMIGISRPIVKHSFTVESADKISEVIKQAFFIATSGRPGPVVIDIPKDTTAPDKLL

SEQ ID NO: 111144 - protein, 455 aa, Unknown
  Bacterial polypetide isolated from the Sargasso Sea
MGKLISGAEIVFKVLEHHKVEHIFGYPGGAVLPIYDELKNHKTIKHILARHEQGAGHAAEGYARSSGKPGVLLVTSGPGATNAVTALTDAYMDSVPLVCISGQVPTHLIGTDAFQECDTTGITRPCTKHNWLVKDVNDLAKIMDLAFEVATTGRPGPVLVDIPKDIQFKKTNFVLKSSNKKKLNGKSSQNGKVSSSDLDNVINLMKKSSKPIFYTGGGVINSGPDASKSLRELVSLTGFPITSTLQGLGAYPGDDPLFLGMLGMHGTYEANNSMYSCDLMINIGARFDDRITGKVDEFSPKSKKIHIDIDPSSIGKNIKVDLPVVSDVGSFLKALNKRIKEKHKDFLNSNKQNISKWWKDIDKWRQKKSLSFKNSKEVIKPQYAVQRLYELSKNQDTYITTEVGQHQMWAAQHYKFNKPNRWMTSGGLGTMGYGLPAAVGVQIAHPDKLVIDIAG

SEQ ID NO: 111145 - protein, 236 aa, Unknown
  Bacterial polypetide isolated from the Sargasso Sea
SKWWEQIDKWREKKSLNFINSDKIIKPQHAVQRLYELTKEKDTFITTEVGQHQMWAAQHYKFNKPNRWMTSGGLGTMGYGLPAAIGVQIAHPGKLVVDIAGEASVLMTMQEMSTAVQYKLPIKIFILNNEYMGMVRQWQELLHEKNYSESYTAALPDFVKLAESYGCVGIRAKSPDELDEKIKEMIDVQKPVIFDCVVDKSENCFPMIPSGKPHNQMILGPEEEEEEISDEGKILV

SEQ ID NO: 111146 - protein, 220 aa, Unknown
  Bacterial polypetide isolated from the Sargasso Sea
FVNSTETIKPQYAVQRLYELTKNKDTYITTEVGQHQMWAAQHYKFDKPNRWMTSGGLGTMGYGLPAAVGVQVAHPNKLVIDIAGEASVLMTMQEMSTAVQYSLPIKIFILNNEYMGMVRQWQELLHDKNYSESYTAALPDFVKLAEAYGCVGIRAQTPEELDDKIIEMINTDRPVIFDCRVDKQENCFPMIPSGKAHNQMLLGPKDQKENKITGKGKTLV

SEQ ID NO: 111147 - protein, 340 aa, Unknown
  Bacterial polypetide isolated from the Sargasso Sea
PGDDNQFLGMLGMHGTYEANNAMHDCDLMINIGARFDDRITGKIDEFSPKSKKVHIDIDPSSINKNVKVDLPIVGDVQAVMTAAIKTIKKNKSGFIKSNKQNISKWWEQIQKWRSKKSLDFINSRETIKPQYAIQRLYELTKNKDTYITTEVGQHQMWAAQHYKFDKPNRWMTSGGLGTMGYGLPAAVGVQIAHPNKLVVDIAGEASVLMTMQEMSTAVQYSLPIKIFILNNEYMGMVRQWQELLHDKNYSESYTAALPDFVKLAEAYGCIGIRAKTPEELDDKIIEMINTDRPVIFDCLVDKQENCFPMIPSGKPHNQMLLGPKDQEDNKITGKGKTLV

SEQ ID NO: 111148 - protein, 575 aa, Unknown
  Bacterial polypetide isolated from the Sargasso Sea
MKLSGSEIIIQALKKEGVEYIFGYPGGAVLHIYDALFKEKNIKHVLVRHEQGATHAADGYARACGRPGVVLVTSGPGITNCVTGMATAHMDSIPMIVISGQVSRQYVGSDAFQEADATGITRPITKHNFLIDSRESIAEVFKKAFEIATTGRPGPVLIDIPKDLTDPNIKIDFKYPSKVKIRSYKPQKNDKQEKIDQAAKILCSAKKPMIYTGGGIILGNAHKHLYKIVKKLNYPITNTLMGLGGFPATDAQFLGMLGMHGTYEANMAMHDCDVLLAVGARFDDRVTGDTSKFCPNAKIIHIDVDPSSISKIIEVDLSLIGETSLILKSLSKAIELHSKKISKTAIKKWWKQIEKWRDKKCLKYKKSKTIIKPQEVIETLYDITKGNAFVTSDVGQHQMWAAQYYKFDKPNRWINSGGLGTMGFGLPAAMGAKLAFPKSEVVCVTGEASILMCIQELATCLQYMLPIKIVNLNNRYMGMVRQWQEFFYEGRYAMSYMEALPDFCKLSSSFGHVGIQIDKPSELRTKLNEAMKIKNRLVFIDVITDQEENVYPMIKSGKAHNEMHLSPTNEDTELA

SEQ ID NO: 111149 - protein, 287 aa, Unknown
  Bacterial polypetide isolated from the Sargasso Sea
KKIHVDIDPSSIGKNIKVDLAIVSDVSEFLKSLIKRFKEKNKNFLSSNKQKTSKWWSTIEKWREKKSLNFINSNKIIKPQHAVQRLYELTKDKDTFVTTEVGQHQMWAAQHYKFNKPNRWMTSGGLGTMGYGLPAAIGVQIANPGKLVVDIAGEASVLMTMQEMSTAVQYKLPIKIFILNNEYMGMVRQWQELLHEKNYSESYTAALPDFVKLAESYGCVGMRAKTPDELDEKIKEMVNIDRPVIFDCLVDKAENCFPMIPSGKPHNQMILGPEEEEEISDEGKILV

SEQ ID NO: 111150 - protein, 289 aa, Unknown
  Bacterial polypetide isolated from the Sargasso Sea
MMSGAAMVVEALKDVGVTHVFGYPGGAVLDIYDALFAQDDVKHVLVRHEQAAAHMADGYARSTGKTGTVLVTSGPGATNTITGIATAYMDSIPMVILSGQVPSKHIGEDAFQETDMVGCSRPIVKHSFLVKRAVDIPEAIAKAYYIANTGRPGPVVVDLPKDIVNVAEEHPYVFPTDVTMRSYNPTEKGHPKQVKKAVESLLKAERPVLYVGGGAVACDASAKVIELAEKLNAPVTCTLMGLGAMPGTHKQFIGMLGMHGTLEANKTMHNADCIIALGARFDDRVTKHV

SEQ ID NO: 111151 - protein, 252 aa, Unknown
  Bacterial polypetide isolated from the Sargasso Sea
MTTKNKKSTEKKITSKKAPKPAGHPMKGRDILVKALENEGVTVIFGYPGGASMEIHQGLTLSKKIRMVLPRHEQGGSFAASGYARATGDVGVCLATSGPGATNLITGIIDAKMDSIPMVAITGQVPSTVLGSDAFQETDIMGSTFPLVKHSYMVQNIADIPRIINEAFHIAKTGRPGPVLVDIPKDIQQQESVVNFNVKFDCPSYKPNLSPSVFQCKKAAHAIQTAKRPLIYAGGGIIASDASKELTAFVKR

SEQ ID NO: 111152 - protein, 327 aa, Unknown
  Bacterial polypetide isolated from the Sargasso Sea
MTGAEIVLQSLVDQGVEVVFGYPGGAVLPIYDTLFKQNSIKHVLVRQEGGAIHAAEGYARSTGKVGVVLVTSGPGATNVVTGLTDAMMDSIPIVCITGQVPQHLIGSDAFQECDTTGITRPCTKHNYLVKDPNKLSPVFHEAFTIAKDGRPGPVLIDIPKDVQFAKGNYTQKEKIIIPSHRLFEPEIFKNDEKINEVVNLISKAKKPIFYIGGGCINSGPKASELVSQFVETTGAPATMTLMGLGVLGSSHSNSLGMLGMHGMYEANMAMHECDLLINIGARFDDRVTGRLDAFSPNSKKIHIDIDESNINKTIKVDVPVVGDVTSI

SEQ ID NO: 111153 - protein, 588 aa, Unknown
  Bacterial polypetide isolated from the Sargasso Sea
MSKIYSGAEIVFKCLEDQGVENVFGYPGGAVLPIYDELKNHQSVKHILVRHEQGAGHAAEGYARSTGKPGVVLVTSGPGATNVVTALTDAYMDSVPLVCISGQVPTHLIGTDAFQECDTTGITRPCTKHNWLVKDVKDLAKTIHKAFEVATSGRPGPVLVDIPKDIQFQKTKYQKYSKLKKLNGKGKNLFSQKEIDELIKLMSNSSKPVFYTGGGVINSGPQASTLLRELVSITGFPITTTLQGLGSYPGDDNQFLGMLGMHGTYEANNAMYECDLMINIGARFDDRITGKLDEFSPKSKKVHIDIDPSSINKNVKVDLPIIGDVTDVIKATIKTISKRKLNFSKSNKQKISKWWEKIQKWRSIKSLDYINSEESIKPQYAIERLYELTKNKETFITTEVGQHQMWAAQHYKFNKPNRWMTSGGLGTMGYGLPAAVGVQVAHPNKLVIDIAGEASVLMTMQEMSTAVQYSLPIKIFILNNEYMGMVRQWQELLHDKNYSESYTAALPDFVKLAEAYGCVGIRAKTPEELDDKIIEMLNTDRPVIFDCLVDKEENCFPMIPSGKPHNQMLLGPKDQKNNKISGKGKILV

SEQ ID NO: 111154 - protein, 577 aa, Unknown
  Bacterial polypetide isolated from the Sargasso Sea
MKIAENDILIQSLINEGVEYIFGYPGGAALHIYDSIFNQKEMQHILVRHEQGATHAADGYARATGKPGVVLVTSGPGATNAITGIATAFMDSIPMVIISGQVQSHLIGTDAFQETDMIGVSRPIVKHSFTVDKQENIANIVAEAFHIATSGRQGPVLIDVPKDLTNPDELFDFVYPDKVHIRSYNPPTNPENHQVSRAVDAILASERPVIYAGGGTISSNASKELRELNDLIDAPVTNTLMGLGVFPGTHKRFLGMLGMHGTYQANMAMHNADLIIALGARFDDRITNAPDKFAPRAKVIHFDVDHSSVSKIIEADIAVFGQIKDSLQAVNNHLKTKIDEIDNEKLAPWHQQISDWKEKHGLNHDLYKIEDDSGPILPQAAVQHIYQESQGKAFVTSDVGQHQMFAAQYYHFDEPRKWINSGGLGTMGFGLPSAMGVKLAYPDEEVICITGEGSIQMCIQELSTCSQYKLPIKIFNINNLALGMVKQWQDMNYDGRHSSISYEDSLPDFVGLAESYGHVGIKITKNSELKKGIAKALSIKDRLVFVDIYVDPDEHVYPMQVANGSLKDLWLSKGEKT

SEQ ID NO: 111155 - protein, 369 aa, Unknown
  Bacterial polypetide isolated from the Sargasso Sea
MPKLYTGAEIVFKCLEDQKVEHIFGYPGGAVLPIYDELKNHNSIKHILVRHEQGAGHAAEGYARSSGKPGVVLVTSGPGATNVVTALTDAYMDSVPLVCISGQVPTHLIGTDAFQECDTTGITRPCTKHNWLVKDINDLSKIMHEAFKVATTGRPGPVLVDIPKDIQFAKTKYKKPKKEKKLNGKSNNKFSQKQIDQLIDLLKNAKKPVIYSGGGVINSGPKASDALREFVELTGFPITSTLQGLGAYPGDDNQFLGMLGMHGTYEANNAMHDCDLLINIGARFDDRITGKIDEFSPNSKKVHIDIDPSSINKIIKVDLAIVGDVTKVIGKVNKAILKKKNGHSKSNKSNIAKWWEQIQKWRGKDSLNF

SEQ ID NO: 111156 - protein, 370 aa, Unknown
  Bacterial polypetide isolated from the Sargasso Sea
LIKKSKKPILYVGGGIIHSKANNELFELATKFNIPVVTTLMGRGAFPDGHELCLEMPGMHGNYTATTSIQNADLLIAIGVRFDDRVTANPSFFAQNAKVIHADIDPAEIGKVRDAQVPIVGDAKSVIKGLIEALGDEKLDTENWVSELKEMKTEFPLSYKQEDKGPLKVPYVLEELQKLTKEEAIVVAGVGQHQMWVSQHWNFTEPNTWLNSGGLGTMGYALPAAIGAKTAYPDKLVLALDGDGCFQMTCQELITASTENIPIKIVVFNNGNHGMVRQWQKIFYNSKFSASELTHDTPDYLKLAESMGAVGLRMMEKSDIEKVFNKMLEINDRPVLVDCVVDPDDMVFPMVPAGGSNDQIIMNEEDLKNL

SEQ ID NO: 111157 - protein, 303 aa, Unknown
  Bacterial polypetide isolated from the Sargasso Sea
MHNADVIFAVGARFDDRVTNATKKFCPNATIIHIDIDPASISKTINAHIPIVGLVKPVLQEMLHQLEKNKGELDQDALGQWWHQIQQWREVHGGRYDSSASHLKPQAVIEAVHRHTKGDAYVTSDVGQHQMFAAQYYKFDKPNRWINSGGLGTMGFGLPAAMGVKLHYPDAEVVCVTGEGSIQMNIQELSTCKQYGLGVKIINLNNGYLGMVKQWQDMNYDSRYSSSYMDSLPDFVKLAEAYGHVGIRVTKAEELEPALERAFALKDKLVFLDIHVDPTEHVYPMQIPGGAMNEMFLSKTERT

SEQ ID NO: 111158 - protein, 443 aa, Unknown
  Bacterial polypetide isolated from the Sargasso Sea
KHNYLITNASEIPQVLKEAKYIATSGRPGPVLIDIPKDILNQRSDWVEPGPLDLPGYKPTLEPNPKMIQQAANLIKNSNKPILYVGGGIIHSKANQELFDLATKFNIPVVTTLMGRGAFPDGHELCLEMPGMHGNYTATTSIQKSDLLIAIGVRFDDRVTANPSFFAQNAKVIHADIDPAEIGKVREAQVPIVGDAKSVILGLINALGDTKLNTENWINELNSMKNEFPLSYNQNENGPLKVPFVLEELQDLTEEEAIVVSGVGQHQMWISQHWNFTEPNTWLNSGGLGTMGYSLPAAIGAKTAYPEKLVLALDGDGCFQMTCQELITASTENIPVKIVVFNNGNHGMVRQWQKIFYNSKFSASELGHVVPDYVKLAESMGAVGLRMTKKSEVKNVFSEMLKINDKPVLIDCVVDPEDMVFPMVPAGGSNDQIILNEEDLKNL

SEQ ID NO: 111159 - protein, 173 aa, Unknown
  Bacterial polypetide isolated from the Sargasso Sea
MPKLYSGAEIVFKCLEDQGVSHIFGYPGGAVLPIYDELKNFNSIKHILVRHEQGAGHAAEGYARSTGKPGVLLVTSGPGATNAVTALTDAYMDSVPLVCITGQVPTHLIGTDAFQECDTTGITRPCTKHNWLVKDINHLSEIMHKAFEVATTGRPGPVLVDIPKDIQFQKTKY

SEQ ID NO: 111160 - protein, 313 aa, Unknown
  Bacterial polypetide isolated from the Sargasso Sea
MSKLYSGAEIVFKCFEDQGVSHIFGYPGGAVLPIYDELKNFKSVKHILVRHEQGAGHAAEGYARSSGKPGVLLVTSGPGATNAVTALTDAYMDSIPLVCITGQVPTHLIGTDAFQECDTTGITRPCTKHNWLVKDINDLSKIIHKAFEVATTGRPGPVLVDIPKDVQFQKTKYVNYKKQKKVNGNSNNYFSQKNIEELIQLMSKAKKPIFYTGGGVINSGPKASELLRELVYATGFPITSTLQGLGSFPADDNQFLGMLGMHGTYEANNAMYSCDLMINIGARFDDRITGKIDEFSPKSKKVHIDIDPSSINK

SEQ ID NO: 111161 - protein, 581 aa, Unknown
  Bacterial polypetide isolated from the Sargasso Sea
MTKLTGAEVILKVLKDHSVDHIFGYPGGAVLPLYDEIFKSNDSPRHILVRHEQGAAHAAEGYARSTGKPGVLVVTSGPGATNAVTGLTDAMMDSIPLVCISGQVPTHLIGTDAFQEADTVGITRPCTKHNWLVKDPDDLCRILHEAFHVATSGRPGPVVVDIPKDIQFADAKYFPPSEIKSENYNPQIKPDMRFIDEAIELMANAKKPIFYTGGGVINSGSEASHLLKELVLLTGFPITSTLMGLGAFPSNESNWLGMLGMHGTYEANLAMNECDLLINIGARFDDRVTGRLDAFSPNSKKIHIDIDPSSMNKTVPVDVSVVGDCAHAIEGILLKWKSKGLRVNIDSWMEQIEKWRNKKSLDYKNSTDVIKPQYAVERLYELTKDNDSYITTEVGQHQMWAAQYYKFDEPNRWMTSGGLGTMGYGLPAAIGVQVAHPSSLVIDIAGEASILMNIQELSTAVQHKLPIKVFILNNQYMGMVRQWQELLHGGRYSHSYTDSLPDFVKLAEAYGCLGLRAIKPDELDQKIQEMVDYQGPVIFDCVVDQDENCYPMIPSGAAHNEMLLGESDDNPEVSDEGKVLI

SEQ ID NO: 111162 - protein, 485 aa, Unknown
  Bacterial polypetide isolated from the Sargasso Sea
MNNKKIKISGAEAVIRSLIAEGVDLIYGYPGGAIMPVYDELYKFKDKLNHILTRHEQGAVHSAQGFARTSGKVGVAIATSGPGATNLVTGIADAQIDSTPIVCITGQVASHLLGSDAFQETDIIGISTPVTKWNYQITKAIEIPIIISKAFYIAKSGRPGPVLIDITKDAQFESFDFSYKHCLGVRSYKPEPDIDLKIIKDAAKIINSSKKPMIVWGQGVILGEAESIFKNFVELTGIPAVWTILGASAIPTSHPLNKGMVGMHGNYGPNILTNECDLLIAIGMRFDDRVTGDLKTYAKQAKIIHFEIDPAEVNKNVKVDLAILGDCNKTLNAIIPHVKNKDHSKWIKQFDSYMKIEEEKVIQHDLFPKKKGLTMGESINAINKFTNGNAIIVTDVGQHQMVACRYAKFTKSKSNITSGGLGTMGFALPAAIGAKMGDPKREVIAVIGDGGYQMTIQELGTIFQNKVAVKIVVLNNDFLGMGKTM

SEQ ID NO: 111163 - protein, 251 aa, Unknown
  Bacterial polypetide isolated from the Sargasso Sea
MNHNLEELETIENAAVSGVDLFGAEMIVAALRAEAVQYIWGYPGGAVLPIYDALSKQDHVKHILVRHEQGALHAADGFARATGEVGVALVTSGPGVTNAVTGIATAHFDSIPLVIIAANVPTSVIGEDAFQECDAVGITRPVTKHNFTVREVSELPNVLKKAFYLAKSGRPGPVLVDVPKDVLLNRASFVYPQSVKIRSYSLPKHGHDGQVQKAADALARAKRPYIYVGGGVVLADAADSLRELADLLNFQ

SEQ ID NO: 111164 - protein, 238 aa, Unknown
  Bacterial polypetide isolated from the Sargasso Sea
ISNWWEKIQKWRSKRSLDYIGSEETIKPQYAIERLYELTKDKDTYITTEVGQHQMWAAQHYKFNKPNRWMTSGGLGTMGYGLPAAVGVQVAHPKKLVIDIAGEASVLMTMQEMSTAVQYNLPIKIFILNNEYMGMVRQWQELLHDKNYSESYTAALPDFVKMAEAYGCMGIRAKTPEELDDKIVQMLENDGPVIFDCLVDKQENCFPMIPSGKPHNQMLLGPKDQEEKKITGKGRALV

SEQ ID NO: 111165 - protein, 460 aa, Unknown
  Bacterial polypetide isolated from the Sargasso Sea
QWAVTKHNYLVTDPADIPRIVKEAFHIATTGRPGPVLIDVPKDVSNQVMEWHWPEDLSLPGYEPVTDVDPQKIAEAIDLIFAAERPVIYAGGGLLKARAAEVLAEFVDLTDIHVVTTLMARGVFPDRDPRCLGMPGMHGNYAAVMAFQRADLLINLGARFDDRVTGNPEFFAPDAKIIHVDIDPAEHGKVRQADVPVRGDAKLAIEALIQAHKASGAIKTDRTAWKSTISGWQEQYPLQYEQSDSGFPLKPQYVLEQIRDNTPDDTIVVAGVGQHQMWASQFWKFDYPYTWVNSGGLGTMGFAVPAAIGAKAGQPDRMVWAIDGDGCFQMTAQELITAAAEKIPVKIAILNNAYLGMVRQWQELFYDERYSEVYLSPDHPDYVAWAEAMGCAGIRVESAEEVLSAIEKANAINDRPVVVDFRVDAFEKVYPMVPAGGSNDDIILGPEGDADAKAKGTAPS

SEQ ID NO: 111166 - protein, 239 aa, Unknown
  Bacterial polypetide isolated from the Sargasso Sea
KISKWWEKMKKWRSVNSFDFINSDETIKPQYAIQRLYELTKNKDTYITTEVGQHQMWAAQHYKFNKPNRWMTSGGLGTMGYGLPAAVGVQVAHPNKLVIDIAGEASVLMTMQEMSTAVQYSLPIKIFILNNEYMGMVRQWQELLHDKNYSESYTAALPDFVKLAEAYGCVGIRAETPDELDDKIIEMINTDRPVIFDCRVDKQENCFPMIPSGKPHNQMLLGPKDQKENKITGKGKILV

SEQ ID NO: 111167 - protein, 497 aa, Unknown
  Bacterial polypetide isolated from the Sargasso Sea
PMVIICGTVSRQAIGSDAFQEAPVTSVMGSVAKHVFLVTDENKLAATLKAAFEVATSGRPGPVVVDIPKDVQTAEISEEDYEDTNISAYSNRILAIEKSRLNEEKSSEFFTHLSNSKRPLIYFGGGVISASASKELREFVDYFNLPAVSTLMGLGAVDTRHPSSLHMLGMHGTPYANYAVQESDFLIAIGSRFDDRVAGVPEKFAPKAKVIAHFDVDPSEINKVKNAAWSHLGVLSLALKDLIKHAKSNDLEFNFGDWLSHTGELKSKYPLNFNRSSDLIQPEHVIECINKITKGDAIVTTGVGQHQMWAAQYFDFKEPRLWLTSGSMGTMGFGIPAAIGAQIAHPDKTVIDVDGDGSIRMNLGDLETITNYDLPVKVLLLNNSGDGMVKQWQKLYYGGRLSASDKTLHTKDFIMSAKSDGFQFAERLSEQSKVEETIERFINFEKAAFLEVVIDPDAMVFPMIGPGMSYDQMITGPFMDGKDPDPEIDGNDPKSMF

SEQ ID NO: 111168 - protein, 578 aa, Unknown
  Bacterial polypetide isolated from the Sargasso Sea
MKLSGGDLLLRALKEEGVKFIFGYPGGAALHIYDSIFKQKACDHILVRHEQGATHAADGYSRATGKPGVALVTSGPGATNAITGLATAYMDSIPLIVISGQVQSHLIGTDSFQETDMIGISRPIVKHSFIVQNTQDIPRIIQEAFHIATTGRPGPVVIDIPKDKTDPSKLYEYKKPKEVSLRSYQPRVSPHPGQIKKACKNILSAERPVIYAGGGVILGNAHKELMALNKLLKAPVTNTLMGLGVYPAKDRYFMGMLGMHGTYQANMAMHNADVIIAIGARFDDRITNTPSLFAPNARIIHIDVDPASISKIINADIPIVGQVKESLNALIKEIKRSKIKIDTEALESWNQQISKWRKKHGLDHELYLKKNKSQMILPQVVVQELYHATNGNAWVTSDVGQHQMFVAQYYHFNKPRRWVNSGGLGTMGFGLPAAMGVKLAFPKDEVVCVTGEGSIQMCIQELSTCLQYNLPIKIININNEALGMVRQWQDMNYGGRHSASTYSDSLPDFVKLAESYGHIGMKVTKKADLKKTLDKAFSMKDRLVFVDVYVDPNEHVYPMLVAPNGSMRDMWIKKNVKA

SEQ ID NO: 111169 - protein, 531 aa, Unknown
  Bacterial polypetide isolated from the Sargasso Sea
HILARHEQGAGHAAEGYARSSGKPGVLLVTSGPGATNAVTALTDAYMDSVPLVCISGQVPTHLIGTDAFQECDTTGITRPCTKHNWLVKDVNDLARILHLAFEVATTGRPGPVLVDIPKDIQFKKGKYKFTKDTLKKKLNGKVTHKLSNKELDKFIELIKKSSKPIFYTGGGVINSGPEASKHLRELISLTGFPITSTLQGLGAYPGDDPQFLGMLGMHGTYEANNAMHDCDLMINIGARFDDRITGKVDEFSPKSKKIHVDIDPSSIGKNIKVDLAVVSDVSDLLQSLIKRFKEKNKNFLNSNKQKTAKWWEQINKWREKKSLNFVNSNKIIKPQHAVQRLYELTKDKDTFITTEVGQHQMWAAQHYKFNKPNRWMTSGGLGTMGYGLPAAIGVQIANPGKLVVDIAGEASVLMTMQEMSTAVQYKLPIKIFILNNEYMGMVRQWQELLHEKNYSESYTAALPDFVKLAESYGCVGIRAKTPDELDVKIKEMIDVQKPVIFDCVVDKSENCFPMIPSGKPHNQMILGPEE

SEQ ID NO: 111170 - protein, 301 aa, Unknown
  Bacterial polypetide isolated from the Sargasso Sea
NFAVTECDLLVAIGARFDDRVTGKLDTFAPNAKVIHIDIDPAEVNKNRRVEVAIVSDVSKAVGKINENSLNNKFTFKTKNWLEKIDFWKNKHPLYVPPEEGEIYPQEVLLKVRELSPDAYVTTDVGQHQMWAAQYLRNSPRKWISSAGLGTMGFGLPAAIGVKAALPNSDVICIAGDASVLMNIQELGTLSQYGLNVKLIIINNRWQGMVRQWQESFYNERYSSSDMSCGEPDFVKLAESFGVKGYLISDRKQLKNELQHAFDHNGPTLINVLVRRGENCYPMVPPGKSNAQMVGYVNCEE

SEQ ID NO: 111171 - protein, 308 aa, Unknown
  Bacterial polypetide isolated from the Sargasso Sea
MPKLLTGAEIVFKCLEDQKVEHIFGYPGGAVLPIYDELKNHPTIKHILVRHEQGAGHAAEGYARSSGKPGVVLVTSGPGATNVVTALTDAYMDSVPLVCISGQVPTHLIGTDAFQECDTTGITRPCTKHNWLVKDINDLSKVMHEAFRVATTGRPGPVLIDIPKDIQFAKTKYKKPNKEKKLNGKSHNKFSQDQIDELVKLLSKAKKPIIYSGGGVINSGPKASQALREFVDLTGFPITSTLQGLGAYPGDDNQFLGMLGMHGTYEANNAMHDCDLLINIGARFDDRITGKIDEFSPNSKKVHIDIDP

SEQ ID NO: 111172 - protein, 333 aa, Unknown
  Bacterial polypetide isolated from the Sargasso Sea
MNNEITGAEIVLKSLAEQGVEVVFGYPGGAVLPIYDTLFKQNSIKHVLVRQEGGAIHAAEGYARSTGKTGVVLVTSGPGATNVVTGLTDAMMDSVPIVCITGQVPQHLIGSDAFQECDTTGITRPCTKHNYLVKDVNKLSSVFHEAFTIAQNGRPGPVLIDIPKDVQFASGTYEEKNKIIIPSHRLFEPSPDFEKNKIEEAVELISKAKKPIFYIGGGCINSGPKASKLVREFINIVGSPVTMTLMGLGVVGSSDKNSLGMLGMHGMYEANMAMHECDVMINIGARFDDRVTGRLDAFSPNSKKIHIDIDESNINKTINVDVPIIGDVKQVVE

SEQ ID NO: 111173 - protein, 346 aa, Unknown
  Bacterial polypetide isolated from the Sargasso Sea
MTLMGLGVVGSSDKNSLGMLGMHGMYEANMAMHECDVMINIGARFDDRVTGRLDAFSPNSKKIHIDIDESNINKTINVDVPIIGDVKEVVEKMISVWKEKKFQIDDEALKLWWDKINKWKEVDCLNFNNEGKQIKPQFAVQRLYELTKNTKTFITTEVGQHQMWAAQFYKFEEPNRWLTSGGLGTMGYGFPAAIGAQVGHPDALVVDIAGDASILMNIQEMSTAIQYRLPVKIFILNNEYMGMVRQWQELLHGGRYSESYTDSLPDFVKLAESYKAVGLRAKTTDELDDVITQMIKTKNTVIADIWVTKEENCFPMIQSGSAHNEMMLSKDQKQDKKSAEKGKILV

SEQ ID NO: 111174 - protein, 588 aa, Unknown
  Bacterial polypetide isolated from the Sargasso Sea
MPKLYSGAEIVFKCFEDQGVTNIFGYPGGAVLPIYDELKNFKTIKHILVRHEQGAGHAAEGYARSSGKPGVVLVTSGPGATNAVTALTDAYMDSIPLVCISGQVPTHLIGTDAFQECDTTGITRPCTKHNWLVKDIKDLSKTIHKAFEVATTGRPGPVLVDIPKDIQFQKTSYKNYKKVNKSNGKSHNHFSQNDIDQLINLMGKASKPIFYTGGGVINSGPKASEQLRELVRTTGFPITSTLQGLGSYPADDNQFLGMLGMHGTYEANNAMYECDLMINIGARFDDRITGKIDEFSPKSKKVHIDIDPSSINKNVKVDLAIVGDVKSVVSSIIKTLNKKKPNFVKSNKQKTSKWWEKIQKWRSKRSLDYIGSEETIKPQYAIERLYELTKDKDAYITTEVGQHQMWAAQHYKFNKPNRWMTSGGLGTMGYGLPAAVGVQVAHPNKLVIDIAGEASVLMTMQEMSTAVQYSLPIKIFILNNEYMGMVRQWQELLHDKNYSESYTAALPDFVKLAEAYGCVGLRAKTPEELDDKIIEMLNTDRPVIFDCLVDKQENCFPMIPSGKPHNQMLLGPKDQKDKKITGKGRTLV

SEQ ID NO: 111175 - protein, 312 aa, Unknown
  Bacterial polypetide isolated from the Sargasso Sea
LINIGARFDDRITGKIDEFSPNSKKVHIDIDPSSINKIIKVDLAIVGDVTSVISKINKTITKKKNGHSKSNKSNIAKWWEQIEKWREKDSLNFVNSNESIKPQHAVQRLYELTKNKDTYVTTEVGQHQMWAAQHYKFNKPNRWMTSGGLGTMGYGLPAAVGVQIAHPEKLVIDIAGEASVLMTMQEMSTAVQYNLPIKIFILNNQYMGMVRQWQELLHEKNYSESYSEALPDFMKMAEAYGCKGIKADNPSDLDDKIQEMIDYDGPVIFDCHVDPNENCFPMIPSGKPHNQMILGPNDQEDNKIKGKGKALV

SEQ ID NO: 111176 - protein, 451 aa, Unknown
  Bacterial polypetide isolated from the Sargasso Sea
KLSSVFHEAFTIAQNGRPGPVLIDIPKDVQFASGTYEEKNKIIIPSHRLFEPSPDFEKNKIEEAVELISKAKKPIFYIGGGCINSGPKASKLVREFINMVGSPVTMTLMGLGVVGSSDKNSLGMLGMHGMYEANMAMHECDVMINIGARFDDRVTGRLDAFSPNSKKIHIDIDESNINKTINVDVPIIGDVKQVVEKMISVWKDKKYKIDSDSLKLWWDKINKWKEVDCLNYNNEGKQIKPQYAVQRLYELTKNTKTFITTEVGQHQMWAAQFYKFEEPNRWLTSGGLGTMGYGFPAAIGAQVGHPDALVVDIAGDASILMNIQEMSTAIQYRLPVKIFILNNEYMGMVRQWQELLHGGRYSESYTDSLPDFVKLAESYKAVGLRAKTTDDLDNVINQMIETKNTVIADIWVTKEENCFPMIQSGSAHNEMMLSKDQKQDKKSAEKGKILV

SEQ ID NO: 111177 - protein, 366 aa, Unknown
  Bacterial polypetide isolated from the Sargasso Sea
GPKASQLVTNFVEETKAPATMTLMGLGVIGAKNKYSLGMLGMHGMYEANMAMHECDVMINIGARFDDRVTGRLDAFAPNSKKIHIDIDPSNINKTIKIDVPIIGDIESVMNQIFSSWKNNNYRSQKEDLIKWWDKIEEWKKVDCLNYNQGEGSIKPQHAIKRLYELTKDKKTFITTEVGQHQMWAAQYYKFEEPNRWLTSGGLGTMGYGFPAAIGAQIANPDSLVVDIAGDASILMNIQEMSTAVQHRLPVKIFILNNEYMGMVRQWQELLHGGRYSESYTDSLPDFVKLAESFKAKGLRAKNVKELDDVILQMISSKETVIADIWVDKEENCFPMIQSGSAHNEMLLNKYQKQDETSAEKGKVLV

SEQ ID NO: 111178 - protein, 565 aa, Unknown
  Bacterial polypetide isolated from the Sargasso Sea
MKKDLFKGSEIVCKALIKEGVDTVFGIPGGAILPLYGTLNNFPELRHILTRHEQGACHAADGYSRTTGKVGVAFATSGPGATNLITGLATAMMDSVPVVAITGQVGRPAIGTDAFQETDITGATLPVTKHNYLVMKASDIGPIIHEAFYIAKTGRPGPVLIDIPKDVFEELSDYNYKKDSKVNLPGYKPYPEIDESQIEKAIELINESKKPIILAGHGVIISRAQERLLELAERCQIPVVTTLLGISSFPENHILSAGFPGMHGMAYASIALDEADLIIGIGSRFDDRIVGNAKRFGKNSKKIHIDIDPAEINKTVKIDAPVVGDIDQVLNLLNPKLNTQNHTDWLKQVEHIKAEHPSLLIPESDSLLGQQVIKTLSDITKGNAIICTGVGQHQMWAAQHYEFTKPNTWLSSGGLGTMGYEIPSAIGAQVGSPDDTVWSICGDGGFQMTIGELATVAENKLPIKYAILNNNHLGMITQWQDMFYQGKRNAETYTGNPDFVKLAEAYGIKGIRVENQDDLQSAINEANNHDGPVIVDFVIEKVDYVYPMIPAGGSVDQLIEEDKNK

SEQ ID NO: 111179 - protein, 244 aa, Unknown
  Bacterial polypetide isolated from the Sargasso Sea
MPKLITGAEIVFKCLEDQKVNHIFGYPGGAVLPIYDELKNHPSIKHILVRHEQGAGHAAEGYARSTGKPGVVLVTSGPGATNVVTALTDAYMDSVPMVCISGQVPTHLIGTDAFQECDTTGITRPCTKHNWLVKDINELSDVMHEAFKVATTGRPGPVLIDIPKDIQFAKSKYTKPKKEKSLNGKSHNKFSANEIDQLINLINKAKKPIIYSGGGVINSGPKASEALRKFVELTGFPITSSLQG

SEQ ID NO: 111180 - protein, 286 aa, Unknown
  Bacterial polypetide isolated from the Sargasso Sea
FSKSKKIHIDIDLASLSKIIDVDVPIVGSAKTCLSQLIKELERRSSDYDSSKLDPWWKQINEWRDKHGLNHSMLDTPPKNGKILPQQVIQSLYKESKGKAYVTSDVGQHQMFAAQYYHFDSPRQWINSGGLGTMGFGLPAAMGVQLAFPDADVACVTGEGSIQMCIQELSTCLQYGLPIKIINLNNSALGMVKQWQDMQYGGRHSQSTYGESLPDFVKLSESYGHVGIKVEDFNDLEGAMKECLSMKDRLVFLDVVIDEEEHVYPMLEAGMEMSAMWLDKDKKTWE

SEQ ID NO: 111181 - protein, 572 aa, Unknown
  Bacterial polypetide isolated from the Sargasso Sea
MEKLSGASMIVRSLIDEGVKHIFGYPGGSVLDIYDALHLIPGIEHILVRHEQAAVHMADGYARATGKVGVVLVTSGPGATNAITGIATAYMDSIPLVVLSGQVPSNLIGNDAFQECDMIGISRPVVKHSFLVQDPTQIPEIIKKAFYIASTGRPGPVVVDLPKDCLNPALLHDYIYPESIKMRSYNPTTSGHKGQIRRGLQALLAAKKPVLYVGGGAIISSSEKQILTLAEKLNIPVVSTLMGLGAFPGTHKNSLGMLGMHGRYEANMTMHNCDLIFGIGVRFDDRTTNNIEKYCPNATILHIDIDPSSISKTVRVDIPIVGSADIVLDSMLALLEESKESNDSEAINQWWQEITVWRNRNCLAYDKESNRIKPQQVIETLYKLTNGEAYVSSDVGQHQMFAALYYPFDKPRHWINSGGLGTMGFGLPAAMGVKMAMPDETVVCVTGDGSIQMNIQELSTALQYDTPVKIINLNNRFLGMVKQWQDMIYSGRHSHSYMDSVPNFAKIAEAYGHVGMTISDPAELESKMAEALAMKDRLVFIDIMVDETEHVYPMLIRGGAMNEMWLSKTEKC

SEQ ID NO: 111182 - protein, 374 aa, Unknown
  Bacterial polypetide isolated from the Sargasso Sea
MMDSVPVVCITGQVPTHLIGSDAFQECDTTGITRPCTKHNYLVKDVNKLSSVFHEAFTIAQNGRPGPVLIDIPKDVQFAKGTYEEKNKIIIPSHRLFEPSPDYEKSKIEEAVELIAKAKKPIFYIGGGCINSGPKASKLVREFINMVGSPVTMTLMGLGVVGSSDKNSLGMLGMHGMYEANMAMHECDVMINIGARFDDRVTGRLDAFSPNSKKIHIDIDESNINKTINVDVPIIGDVKQVVDKMIFIWKEKNYKIETESLKSWWDKINKWKEIDCLNYNNEGKQIKPQYAVQRLYELTKNTKTFITTEVGQHQMWAAQFYKFEEPNRWLTSGGLGTMGYGFPAAIGAQVGNPDALVIDIAGDASILMNIQEMS

SEQ ID NO: 111183 - protein, 588 aa, Unknown
  Bacterial polypetide isolated from the Sargasso Sea
MPKLYTGAEIVFKCLEDQKVEHIFGYPGGAVLPIYDELKNHTSIKHILVRHEQGAGHAAEGYARSSGKPGVVLVTSGPGATNVVTALTDAYMDSVPLVCISGQVPTHLIGTDAFQECDTTGITRPCTKHNWLVKDINDLSEIMHEAFKVATTGRPGPVLVDIPKDIQFAKAKYKKPKKEKKLNGKSNNKFSQKQIDQLIDLLKNTKKPVIYSGGGVINSGPKASDALREFVELTGFPITSTLQGLGAYPGDDNQFLGMLGMHGTYEANNAMHDCDLLINIGARFDDRITGKIDEFSPNSKKVHIDIDPSSINKIIKVDLAIVGDVTKVIGKVNKTILKKKNGHSKSNKSNIAKWWEQIQKWRGKDSLNFVNSNDSIKPQHAVQRLYELTKDKDTYVTTEVGQHQMWAAQHYKFNKPNRWMTSGGLGTMGYGLPAAVGVQIAHPEKLVVDIAGEASVLMTMQEMSTAVQYNLPIKIFILNNQYMGMVRQWQELLHEKNYSESYSEALPDFLKMAEAYGCKGIKAENPSELDEKIQEMIDYKGPVIFDCHVDPNENCFPMIPSGKPHNQMILGPNDQEENKIKGKGKALV

SEQ ID NO: 111184 - protein, 546 aa, Unknown
  Bacterial polypetide isolated from the Sargasso Sea
YDSIFKQKACDHILVRHEQGATHAADGYSRATGKPGVALVTSGPGATNAITGLATAYMDSIPLIVISGQVQSHLIGTDSFQETDMIGISRPIVKHSFIVQDTQDIPRIIQEAFHIATTGRPGPVVIDIPKDKTDPTKLYEYKKPKEVSLRSYQPRVLPHPGQIKKACKNILSAERPVIYAGGGVILGNAHKELIALNKLLKAPVTNTLMGLGVYPAKDKYFMGMLGMHGTYQANMAMHNADVIIAVGARFDDRITNTPSLFAPNARIVHIDVDPASISKIINADIPIVGQVKDSLSALIKEIKRSKIKIDTDALESWNQQVTKWREMHGLDHELYLKKNKSQMILPQVVVQELYHATNGNAWVTSDVGQHQMFVAQYYHFNKPRRWVNSGGLGTMGFGLPAAMGVKLAFPKDEVVCVTGEGSIQMCIQELSTCLQYNLPIKIININNEALGMVRQWQDMNYGGRHSASTYSDSLPDFVKLAESYGHIGMKITKKADLKKSLEKAFSIKDRLVFVDVYVDPNEHVYPMLVAPNGSMKDMWIKKNVKA

SEQ ID NO: 111185 - protein, 127 aa, Unknown
  Bacterial polypetide isolated from the Sargasso Sea
MSKLYSGAEIVFKCMEDQNVDHIFGYPGGAVLPIYDELQNFKSIKHILVRHEQGAGHAAEGYARSSGKPGVILVTSGPGATNVVTALTDAYMDSIPLVCISGQVPTHLIGTDAFQECDTTGITRPCT

SEQ ID NO: 111186 - protein, 337 aa, Unknown
  Bacterial polypetide isolated from the Sargasso Sea
MDNAKKSGAEALIHSLHLEGVELMFGYPGGAALHIYDAIFNQNYVDHILVRHEQGAVHAADGYARATGKPGVALVTSGPGATNAITGLATAYMDSTPIVVISGQVKSGLIGTDSFQETDMIGVSRPIVKHSFLVQKAEEIPEIIKKAFHIATTGRPGPVVIDIPKDFTDPDYKFDYSYPEEIKMRSYNPPIKGDPKRISDAVDLIENAQRPVIYSGGGVIQNDASAELTEFAKLLNFPVTNTLMGLGAFPGSDPQFMGMLGMHGTYQANMAMHNADLIIAIGARFDDRITNDPKQFALGAKKIHIDVDAASVSKIIYADVPIVGSEKDCISSLIQEL

SEQ ID NO: 111187 - protein, 445 aa, Unknown
  Bacterial polypetide isolated from the Sargasso Sea
DTTGITRPCTKHNYLVKDVNKLSSVFHEAFTIAQNGRPGPVLIDIPKDVQFASGTYEEKNKIIIPSHRLFEPSPDFEKNKIEEAVELISKAKKPIFYIGGGCINSGPKASKLVREFINMVGSPVTMTLMGLGVVGSSDKNSLGMLGMHGMYEANMAMHECDVMINIGARFDDRVTGRLDAFSPNSKKIHIDIDESNINKTINVDVPIIGDVKQVVEQMISIWKDKKYKIDTDSLKLWWDKINKWKEVDCLNYNNEGKQIKPQYAVQRLYELTKNTKTFITTEVGQHQMWAAQFYKFEEPNRWLTSGGLGTMGYGFPAAIGAQVGHPDALVVDIAGDASILMNIQEMSTAVQYRLPVKIFILNNEYMGMVRQWQELLHGGRYSESYTDSLPDFVKLAESYKAVGLRAKTTDELDDVITQMIETKNTVIADIWVTKEENCFPMIQSG

SEQ ID NO: 111188 - protein, 515 aa, Unknown
  Bacterial polypetide isolated from the Sargasso Sea
MPKLLSGAEIVFKALEDQKVEYIFGYPGGAVLPIYDELKNHKSIKHILARHEQGAGHSAEGYARSSGKPGVLLVTSGPGATNAVTALTDAYMDSIPLVCISGQVPTHLIGTDAFQECDTTGITRPCTKHNWLVKDVNDLSRVLHLAFEVATTGRPGPVLVDIPKDIQFKKGKYKFFKNTIKKKLNGKASHKISNSELDKFIDLMKKSSKPIFYTGGGVINSGPDASKHLRELVSLTGFPITSTLQGLGAYPGDDPQFLGMLGMHGTYEANNAMHDCDLMINIGARFDDRITGKVDEFSPGSKKIHVDIDPSSIGKNIKVDLAIVSDVTELLKSLNKRFKEKNKNFVSSNKQKTSKWWEQIGKWREKKSLNFINSNKVIKPQHAVQRLYELTKNQDTFITTEVGQHQMWAAQHYKFNKPNRWMTSGGLGTMGYGLPAAIGVQIANPGKLVVDIAGEASVLMTMQEMSTAVQYRLPIKIFILNNEYMGMVRQWQELLHEKNYSERYTAALPDFVKLA

SEQ ID NO: 111189 - protein, 81 aa, Unknown
  Bacterial polypetide isolated from the Sargasso Sea
MKLAGNDMLIQSLINEGVEYIFGYPGGAALHIYDSIFKQSEMQHILVRHEQGATHAADGYARATGKPGVVMVTSGPGATNA

SEQ ID NO: 111190 - protein, 387 aa, Unknown
  Bacterial polypetide isolated from the Sargasso Sea
LSKTLHEAFRVATTGRPGPVLVDIPKDIQFAKIKYTKPKKEKKSNGKLHNNFSQEEINELVDLIAKAKKPVVYTGGGVINSGPEASESLREFVRMIGFPITSTLQGLGAFPGDDSQFIGMLGMHGTYEANNAMHDCDLLINIGARFDDRITGKIDEFSPKSKKVHIDIDPSSINKIIKVDLAIVGDVNEVLKAAVKTISQKKNGFKNSNKQNVSKWWEKIEKWREKDSLGFINSKESIKPQHAVQRLYELTKNQDTFITTEVGQHQMWAAQHYKFNKPNRWMTSGGLGTMGYGLPAAVGVQIAHPDKLVIDIAGEASVLMTMQEMSTAVQYNLPIKIFVLNNQYMGMVRQWQELLHEKNYSESYSEALPDFVKLAEAYGCKGIKADN

SEQ ID NO: 111191 - protein, 273 aa, Unknown
  Bacterial polypetide isolated from the Sargasso Sea
MSKTKTSGGDALIQSLHKEGVDLVFGYPGGAALHIYDALFNQSDVEHILVRHEQGAVHAADGYARSTGKPGVALVTSGPGATNAITGLATAFMDSTPVVVISGQVKSELIGTDSFQETDMIGVSRPIVKHSFLVQKAEDIPEIVKKAFHIATTGRPGPVVIDVPKDFTDPNHTFDFVYPSEINMRSYKPAKAGDPKQVKEAVNLILEAKKPVIYSGGGVIQDNASAELTELAKLTKFPITNTLMGLGAFPGTDPQFLGMLGMHGTYEAKYGNA

SEQ ID NO: 111192 - protein, 578 aa, Unknown
  Bacterial polypetide isolated from the Sargasso Sea
MKLAGNDILIQSLIEEGVEYIFGYPGGASLHIYDAIFNQKEMQHILVRHEQGATHAADGYARATGKPGVVMLTSGPGATNAITGIATAFMDSIPMIVISGQVQSHLIGTDAFQETDMIGVSRPIVKHSFTVDHQSNIAKIIKEAFYIATSGRQGPVVIDVPKDLTNPVDLFEYKYPSEVNIRSYNPPIEPEQSQIDRAVEAIIKSKQTVIYAGGGTISSNASKELFELNSYINAPITNTLMGLGVYPASDKNFLGMLGMHGTYQANMAMHNADLIIAIGARFDDRITNTPEKFAPNAQIIHFDVDHSSVSKIIEADIAVFGQVKNSLQAMNAKLKSRLSEINDSRLDVWRKQIAEWKEMHGLDHDLYKNNSDDTPILPQAVVQHIYHASNGDAFVTSDVGQHQMFAAQYYHFDEPRKWINSGGLGTMGFGLPAAMGVKLAYPEEEVICITGEGSIQMCIQELSTCTQYKLPIKIFNINNLALGMVKQWQDMNYDGRHSSISYEDSLPDFTKLVESYGHVGIKITKNSQLKAGIEEAISIKDKLVFVDIYVDPSEHVYPMLVAPDGSLKDMWLGKGEKT

SEQ ID NO: 111193 - protein, 478 aa, Unknown
  Bacterial polypetide isolated from the Sargasso Sea
HRCFSECDTTGITRPCTKHNWLVKDINDLSRIMHLAFEVATTGRPGPVLVDIPKDIQFAKAKYIPAKKIKREKILSNNRFNQKDIDKLIQLMNKASKPIFYTGGGVVNSGPEASKLLRELVSLTGFPITSTLQGLGAYPGNDNQFIGMLGMHGTYEANNAMHDCDLLINIGARFDDRITGKIDEFSPKSKKVHIDIDPSSINKIIKVDLSIVGDVKDVIKLTTKTLKQKNINLEKSNKQKISKWWQQIEKWKTKDSLNFINSDKIIKPQYAVQRLYELTKNQDTFITTEVGQHQMWAAQHYKFDKPNRWMTSGGLGTMGYGLPAAVGVQLAHPKKLVIDVAGEASVLMTMQEMSTAVQYNLPIKIFILNNQYMGMVRQWQELLHEKNYSESYTEALPDFVKLAEAYGCVGIRANNPDELDQKIQEMIDIDKPVIFDCRVDQAENCFPMIPSGKPHNQMLLGPKDQEENKITGKGKALV

SEQ ID NO: 111194 - protein, 340 aa, Unknown
  Bacterial polypetide isolated from the Sargasso Sea
PGDDNQFLGMLGMHGTYEANNAMHDCDLLINIGARFDDRITGKIDEFSPNSKKVHIDIDPSSINKIIKVDLAIVGDVTSVIGKINKTISKSKNGHSKSNKSNIAKWWEQIEKWREKNSLNFVNSDESIKPQHAVQRLYELTKSKDTYVTTEVGQHQMWAAQHYKFNKPNRWMTSGGLGTMGYGLPAAVGVQIAHPEKLVIDIAGEASVLMTMQEMSTAVQYNLPIKIFILNNQYMGMVRQWQELLHEKNYSESYSEALPDFMKMAEAYGCKGIKADNPSDLDYKIQEMIDYDGPVIFDCHVDPNENCFPMIPSGKPHNQMILGPNDQEDNKIKGKGKALV

SEQ ID NO: 111195 - protein, 287 aa, Unknown
  Bacterial polypetide isolated from the Sargasso Sea
VHIDIDPSSINKNVKVDLPIVGDVAEVITATIKTIKKVKTNFTKSNKQKISKWWEKIQKWRSINSFDYINSTETIKPQYAIQRLYELTKGKDTYITTEVGQHQMWAAQHYKFDKPNRWMTSGGLGTMGYGLPAAVGVQVAHPNKLVVDIAGEASVLMTMQEMSTAVQYSLPIKIFILNNEYMGMVRQWQELLHDKNYSESYTAALPDFVKLAEAYGCVGIRATTPDELDDKIIEMVNTDRPVIFDCLVDKQENCFPMIPSGKPHNQMLLGPKDQKKNKITGKGKTLV

SEQ ID NO: 111196 - protein, 548 aa, Unknown
  Bacterial polypetide isolated from the Sargasso Sea
HIYDSIFKQKEMEHILVRHEQGATHAADGYARATGKPGVVLVTSGPGATNAITGIATAFMDSIPMIVISGQVAKHLIGTDAFQETDMIGISRPIVKHSFTVDSAENIPEIVKQAFHIATSGRPGPVVIDVPKDTTAPDKLFEFKYPNDVDIRSYKPPIDPDPRQIERAVDAIIESNKPVIYAGGGAINSNASEELIRLNEILDFPVTNTLMGLGVYPATHKRFLGMLGMHGTYQANMSMHNADLIIAIGARFDDRITNTPKLFAPNAKIIHLDVDYSSVSKIIEANIAVFGQVKNSLLEMIKLLEAKKELIDSKKILPWKEQISDWKLQHGLNHEMHLCETDDKPIMPQAVVQHLYNITNGKAFITSDVGQHQMFAAQYYHFDEPRKWINSGGLGTMGFGLPAAMGAKLAYPNDEVICITGEGSIQMCIQELSTCTQYNLPIKIININNEALGMVKQWQDMNYGGRHSASTYQSSLPNFVELAESYGHVGIKIEKNSELKSGLEKALSMKDRLVFVDVYVDPNEHVYPMLVAPNGSLKDMWLDKETKT

SEQ ID NO: 111197 - protein, 454 aa, Unknown
  Bacterial polypetide isolated from the Sargasso Sea
DPNKLSPVFHEAFTIAQDGRPGPVLIDIPKDVQFAKGNYTEKEKIIIPPHRLFEPEIFQNDDKINEVVDLISKAKKPIFYIGGGCINSGPKASELVSQFVEMTGAPATMTLMGLGVIGSSHPNSLGMLGMHGMYEANMAMHECDVMINIGARFDDRVTGRLDAFSPNSKKIHIDIDESNINKTIKVDVPVVGDVTNVLNKIIQTWKDRKLTTNSSDLKIWWDKINNWKKIDCLNFSNDEKEIKPQYAIQRLYDLTKDKNTFITTEVGQHQMWAAQFYKFEKPNRWLTSGGLGTMGYGFPAAIGAQVANPDSLVIDIAGDASILMNIQEMSTAVQYRLPVKIFILNNEYMGMVRQWQELLHGGRYSESYTDSLPDFVKLAESYKAVGLRAKKPEELDDVINEMINTDKTVIADIWVAKEENCFPMIQSGSAHNEMVLSKDQKQDESSAEKGKILV

SEQ ID NO: 111198 - protein, 119 aa, Unknown
  Bacterial polypetide isolated from the Sargasso Sea
MDKSNKSGAEALIHSLHLEGVELMFGYPGGAALHIYDAIFNQNYVDHILVRHEQGAVHAADGYARATGKPGVALVTSGPGATNAITGLATAYMDSTPIVVISGQVKSGLIGTDSFQETD

SEQ ID NO: 111199 - protein, 226 aa, Unknown
  Bacterial polypetide isolated from the Sargasso Sea
MSKLYSGAEIVFKCLEDQGVEFIFGYPGGAVLPIYDELKNHKSIKHILARHEQGAGHAAEGYARSSGKPGIVLVTSGPGATNVVTALTDAYMDSVPLVCISGQVPTHLIGTDAFQECDTTGITRPCTKHNWLVKDVKDLEKTIHKAFEVATTGRPGPVLVDIPKDIQFNKYKYSKLKKQKKLNGKSHNFYSQKDIDELINLITKAKKPIIYSGGGVINSGIEASQL

SEQ ID NO: 111200 - protein, 565 aa, Unknown
  Bacterial polypetide isolated from the Sargasso Sea
MKKNKKISGAEAVIKSLIKENVDLVYGYPGGAIMPVYDEFFKFQHKVHHVLTRHEQGAVHAAQGYARSSGRVGVAIATSGPGATNLVTGIADAQIDSTPIVCITGQVPAHLLGSDAFQETDIIGISMPVTKWSYQITKASEVPDVIAKAFYIAKSGRPGPVLIDITKNAQIEMLDFKYKKCVGIRSYSPVPKIDKNKILEAAELINNAKNPLIVWGQGVILGNAEKEFKNFVEKSGIPAAWTILGASAIPTSHELNVGMVGMHGNYGPNILTNKCDLLIAIGMRFDDRVTGDTSTYAKQAKIIHLEIDPAEVNKNIKVDVPVIGNCKDSLRMLTRNIKAKSYKKWVNKFDELMKKEFKKVIKSDLAPKKKGLTMGESIIAINKFTKGKAIIVTDVGQHQMVACRYANFIDSKSNITSGGLGTMGFALPAAIGAKMGAPKREVVAVIGDGGYQMTIQELGTIFQLQLPVKIVILNNDFLGMVRQWQQLFFDKRYASTEMVNPDFVSIAKAYFLDSERVETRSDLEPAVKRMIESKKPFVLEICVEKEDNVFPMIPSGASVSDIRLE

SEQ ID NO: 111201 - protein, 348 aa, Unknown
  Bacterial polypetide isolated from the Sargasso Sea
GYARSSGKPGVVLVTSGPGATNVVTALTDAYMDSIPLVCISGQVPTHLIGTDAFQECDTTGITRPCTKHNWLVKDIKELPKVMHEAFKVATTGRPGPVLIDIPKDIQFAKTNYTKFKKEKKLNGKIHNKFSENEINQLIDLISKAKKPVVYTGGGVINSGPQASETLKEFVRLIGFPITSTLQGLGAFPGDDNQFIGMLGMHGTYEANNAMHDCDLLINIGARFDDRITGKIDEFSPKSKKVHIDIDPSSINKIIKVDLAIVGDVNEVIKSAIKKINKKQNGLKDSNKQRISKWWEQIQKWRTKDSLGFVNSDKEIKPQHAVKRLYELTKNQDTFITTEVGQHQMWAA

SEQ ID NO: 111202 - protein, 588 aa, Unknown
  Bacterial polypetide isolated from the Sargasso Sea
MPKLYTGAEIVFKCLEDQKVEHIFGYPGGAVLPIYDELKNHTSIKHILVRHEQGAGHAAEGYARSSGKPGVVLVTSGPGATNVVTALTDAYMDSVPLVCISGQVPTHLIGTDAFQECDTTGITRPCTKHNWLVKDINDLSEIMHEAFKVATTGRPGPVLVDIPKDIQFAKAKYKKPKKEKKLNGKSNNKFSQKQIDQLIDLLKNAKKPVIYSGGGVINSGPKASDALREFVELTGFPITSTLQGLGAYPGDDNQFLGMLGMHGTYEANNAMHDCDLLINIGARFDDRITGKIDEFSPNSKKVHIDIDPSSINKIIKVDLAIVGDVTKVIGKLNKAILKKKNGHSKSNKSNIAKWWEQIQKWRGKDSLNFVNSNDSIKPQHAVQRLYELTKDKDTYVTTEVGQHQMWAAQHYKFNKPNRWMTSGGLGTMGYGLPAAVGVQIAHPEKLVVDIAGEASVLMTMQEMSTAVQYNLPIKIFILNNQYMGMVRQWQELLHEKNYSESYSEALPDFLKMAEAYGCKGIKAENPSELDGKIQEMIDYKGPVIFDCHVDPNENCFPMIPSGKPHNQMILGPNDQEENKIKGKGKALV

SEQ ID NO: 111203 - protein, 416 aa, Unknown
  Bacterial polypetide isolated from the Sargasso Sea
MSKLYTGAEIVFKCLEDQGVDFIFGYPGGAVLPIYDELKNHNTIKHILVRHEQGAGHAAEGYARSSGKPGVVLVTSGPGATNVVTALTDAYMDSVPLVCISGQVPTHLIGTDAFQECDTTGITRPCTKHNWLVKDIKDLSKTLHEAFRVATTGRPGPVLVDIPKDIQFAKIGYSKPKVEKKLNGKSLNHFSQKDIDTLISLMNKSKKPIIYSGGGVINSGPEASNVLRELVELTGFPITSTLQGLGAYPGDDNQFLGMLGMHGTYEANNAMHDCDLLINIGARFDDRITGKIDEFSPKSKKVHIDIDPSSINKIIKVDLALVGDVKEVLKGITKTLKKKNLDLKKSNKQQIAKWWEQIQKWRTKNSLHFKNSDETIKPQHAVQRLYELTKHKDTYVTTEVGQHQMWAAQYYKFNKP

SEQ ID NO: 111204 - protein, 391 aa, Unknown
  Bacterial polypetide isolated from the Sargasso Sea
MIDLMSKSKKPIFYTGGGVVNSGPEASNLLRELVSMTGFPITSTLQGLGCFPGDDNQFLGMLGMHGTYEANNAMHDCDLMINIGARFDDRITGKIDEFSPKSKKVHIDIDPSSINKNIKVDLPIVGDVGEVMQSIIKTTKKNKPSFLKSNKQNIAKWWSQIDKWRAKKSLNFINSEKKIMPQHAVQRLYELTKKYDTYVTTEVGQHQMWAAQHYKFNKPNRWMTSGGLGTMGYGVPAAVGVQIAHPKKLVIDIAGEASVLMTMQEMSTAVQYNLPIKIFILNNEYMGMVRQWQELLHEKNYSESYSAALPDFVKLAEAYGCVGIRAKTPDELDEKILEMINVDKPVIFDCVVDQNENCFPMIPSGKPHNQMLLGPQDQKSKKISSKGKTLV

SEQ ID NO: 111205 - protein, 195 aa, Unknown
  Bacterial polypetide isolated from the Sargasso Sea
MPKLYSGAEIVFKCLEDQKVSHLFGYPGGAVLPIYDELKNHPSIKHILVRHEQGAGHAAEGYARSTGKPGVVLVTSGPGATNVVTALTDAYMDSVPIVCISGQVPTHLIGTDAFQECDTTGITRPCTKHNWLVKKIEDLPKIMHDAFTVAMSGRPGPVLVDIPKDIQFAKTVYKNFSNKVLKQNGKIINLFLLMK

SEQ ID NO: 111206 - protein, 366 aa, Unknown
  Bacterial polypetide isolated from the Sargasso Sea
SDAFQECDTTGITRPCTKHNYLVKDVNKLSSVFHEAFSIAANGRPGPVLIDIPKDVQFAKGSYQSSKEVTIESHRLFEPKIRANDQNIEEATKLIANAKKPIFYIGGGCINSGPKASELVTKFVEETKAPATMTLMGLGVIGAKNKYSLGMLGMHGMYEANMAMHECDVMINIGARFDDRVTGRLDAFAPNSKKIHIDIDPSNINKTIKIDVPIIGDIESVMNQIFSSWKNNNYKSQKEDLIKWWDKIEKWKKVDCLNYNQGEGSIKPQHAIKRLYELTKDKKTFITTEVGQHQMWAAQYYKFEEPNRWLTSGGLGTMGYGFPAAIGAQIANPDSLVVDIAGDASILMNIQEMSTAVQHRLPVKIF

SEQ ID NO: 111207 - protein, 572 aa, Unknown
  Bacterial polypetide isolated from the Sargasso Sea
MEKLSGASMIVRSLIDEGVKHIFGYPGGSVLDIYDALHLIPGIEHILVRHEQAAVHMADGYARATGKVGVVLVTSGPGATNAITGIATAYMDSIPLVVLSGQVPSNLIGNDAFQECDMIGISRPVVKHSFLVQDPTQIPEIIKKAFYIASTGRPGPVVVDLPKDCLNPALLHDYIYPESIKMRSYNPTTSGHKGQIRRGLQALLAAKKPVLYVGGGAIISSSEKQILALAEKLNIPVVSTLMGLGAFPGTHKNSLGMLGMHGRYEANMTMHNCDLIFGIGVRFDDRTTNNIEKYCPNATILHIDIDPSSISKTVRVDIPIVGSADIVLDSMLALLEESKESNDSEAINQWWQEITVWRNRNCLAYDKESNRIKPQQVIETLYKLTKGEAYVASDVGQHQMFAALYYPFDKPRHWINSGGLGTMGFGLPAAMGVKMAMPDETVVCVTGDGSIQMNIQELSTALQYDTPVKIINLNNRFLGMVKQWQDMIYSGRHSHSYMDSVPNFAKIAEAYGHVGMTISDPAELESKMAEALAMKDRLVFIDIMVDETEHVYPMLIRGGAMNEMWLSKTEKC

SEQ ID NO: 111208 - protein, 377 aa, Unknown
  Bacterial polypetide isolated from the Sargasso Sea
LCPDSLRMLAERYQLPVTTTLMGKGAFDENDALSVGMLGMHGTAYANFAVTECDLLIAVGARFDDRVTGKLDTFAPRARVVHFEIDPAEIGKNRKADVAVLGDLGLSLARMVEISLQRTAEPRTAAWLERINTWKDRYPLTIPPTEGAIYPQEVLLAVRDLAPDAIVTTDVGQHQMWAAQYLRNGPRGWISSAGLGTMGFGMPAAMGAQVAMPDRQVVCIAGDASILMNIQELGTLAAYGLPVKVVIVNNHWQGMVRQWQESFYDERYSASDMLNGMPDFIALARSFGVDGVKITERESLHRDLAAALQSPTPMMIDVHVRRGENCYPMVPPGKSNAQMVGLPSHPELAMGTTRTCSSCGAITAHEHRFCPQCGASL

SEQ ID NO: 111209 - protein, 283 aa, Unknown
  Bacterial polypetide isolated from the Sargasso Sea
MSKLYSGAEIVFKCFEDQGVSHIFGYPGGAVLPIYDELKNFKSVKHILVRHEQGAGHAAEGYARSSGKPGVLLVTSGPGATNAVTALTDAYMDSVPLVCITGQVPTHLIGTDAFQECDTTGITRPCTKHNWLVKDINDLSKVIHKAFEVATTGRPGPVLVDIPKDIQFQKTKYKNYKKQKKLNGKSHNYFSQKNIDELIKLMKKAKKPIFYTGGGVINSGPKASELLRELVYATGFPITSTLQGLGSFPADDNQFLGMLGMHGTYEANNAMYSCDLMINIGAR

SEQ ID NO: 111210 - protein, 495 aa, Unknown
  Bacterial polypetide isolated from the Sargasso Sea
SVPLVCISGQVPTHLIGTDAFQECDTTGITRPCTKHNWLVKDVKDLEKTIHKAFEVATTGRPGPVLVDIPKDVQFQKTSYTKFKKQKKLNGKINNQFSQKDIDELIKLMSKASKPIFYTGGGVINSGPKASELLRELVNVTGFPITSTLQGLGSYPGEDSQFLGMLGMHGSYEANNAMHDCDLMINIGARFDDRITGKIDEFSPKSKKVHIDIDPSSINKNVKVNLPIVGDVAEVINSTIKTIKKVKPNFAKSNKQKVSKWWEQIQKWRSINSFDFVNSNETIKPQYAVQRLYELTKNKDTYITTEVGQHQMWAAQHYKFDKPNRWMTSGGLGTMGYGLPAAVGVQVAHPNKLVIDIAGEASVLMTMQEMSTAVQYSLPIKIFILNNEYMGMVRQWQELLHDKNYSESYTAALPDFVKLAEAYGCVGIRAQTPEELDDKIIEMINTDRPVIFDCRVDKQENCFPMIPSGKPHNQMLLGPKDQKENKITGKGKTLV

SEQ ID NO: 111211 - protein, 303 aa, Unknown
  Bacterial polypetide isolated from the Sargasso Sea
MPKLFSGAEIVFKCLKDQGVTNIFGYPGGAVLPIYDELKNFNSIKHILVRHEQGAGHAAEGYARSSGKPGVLLVTSGPGATNAVTALTDAYMDSVPLVCISGQVPTHLIGTDAFQECDTTGITRPCTKHNWLVKDIKDLAKTIHKAFEVATSGRPGPVLVDIPKDIQFQKTAYKNYKKINKLNGKSHNRFSQNDIDKIINLMGKATKPIFYTGGGVINSGPKASELLRELVNATGFPITSTLQGLGSYPADDNQFLGMLGMHGTYEANNAMYECDLMINIGARFDDRITGKIDEFSPKSKKIH

SEQ ID NO: 111212 - protein, 163 aa, Unknown
  Bacterial polypetide isolated from the Sargasso Sea
MDKSNKSGAEALIHSLHLEGVDLMFGYPGGAALHIYDAIFNQNYVDHILVRHEQGAVHAADGYARATGKPGVALVTSGPGATNAITGLATAYMDSTPIVVISGQVKSNLIGTDSFQETDMIGVSRPIVKHSFLVQRAEDIPDIVKKAFHIATTGRKGPVVIDI

SEQ ID NO: 111213 - protein, 276 aa, Unknown
  Bacterial polypetide isolated from the Sargasso Sea
NATIIHIDIDPASISKTINAHIPIVGLVKPVLQEMLHQLEKNQGELDQDALGQWWQQIQQWREVHGGRYDSSASHLKPQAVIEAVHRHTKGDAYVTSDVGQHQMFAAQYYKFDKPNRWINSGGLGTMGFGLPAAMGVKLHYPDAEVVCVTGEGSIQMNIQELSTCKQYGLNVKIINLNNGYLGMVKQWQDMNYDSRYSSSYMDSLPDFVKLAEAYGHVGIRVTKAEELEPALERAFALKDKLVFLDIHVDPTEHVYPMQIPGGAMNEMFLSKTERT

SEQ ID NO: 111214 - protein, 590 aa, Unknown
  Bacterial polypetide isolated from the Sargasso Sea
MDNENEFTGADILLKALKDQEVDTIFGYPGGAVLPIYDAIFGQNFLKHVLVRQEAGAVHAAEGYARSSGKVGVLLVTSGPGVTNVVTGLTDALMDSIPIVCISGQVPSHLIGTDAFQECDTTGITRPCTKHNYLVKDVSKLSETIHEAFKIASSGRPGPVLIDIPKDVQFAKSKYIPKKDISFKEHRIKAGSKNVDKNFVQELVNHIKKSERPIFYVGGGCLNSGPQASQELIKLVNKTNIPITTTLHGLGCFPGEDKSSLGMLGMHGNYEANLAMNKCDLMINVGARFDDRVTGRLDAFSPDSVKFHIDIDQSSINKNVKVDFHTNTDITLTLKEINSFIESNNIELEKKDYTNWWSQINDWRKKECLHYEQGEETIKPQHAISRLYDLTSQKDTFITTEVGQHQMWAAQYYKFSKPNRWITSGGLGTMGFGMPAAVGAQMANPDSLVIDIAGEASFLMNVQEIATAVQYKLPIKIFILNNEYMGMVRQWQELLHGSRYSESYVDALPDFKKLAESFNAVGVRAKNISELDDAINEMVSIDRPVIADIWVDKKENCFPMIPSGAAHHEMLLSKYDKENLENQEKGKVLV

SEQ ID NO: 111215 - protein, 375 aa, Unknown
  Bacterial polypetide isolated from the Sargasso Sea
MSGADAILRVLEEQGVEVIFGYPGGAILPIYDSLFKSNSIKHILVRHEQAAVHAAEGYARSTGKVGVVLVTSGPGATNAVTGLTDALMDSVPIVCLSGQVPTHLIGNDAFQEADTTGITRPCTKHNYLVKESEKLCSTLHEAFHVARSGRPGPVVVDLPKDIQLSECEYINRQDRHGRRYKPIINPEKNKIIEVAKLLVNAKKPIIYGGGGIINSGPEASNLLRELVDLVEIPTTLTLMGLGALPHDNKFFLGMLGMHGTYEANLSMYNCDVMLNIGARFDDRITGNLKEFSPNSKKIHIDIDPSSINKSVPVDIPIISDAGSALKELIYELKKLKFKNSENRIGVWLRQINEWRSKEMLRFQSNRKDYKTTIRN

SEQ ID NO: 111216 - protein, 230 aa, Unknown
  Bacterial polypetide isolated from the Sargasso Sea
MNGDPRKCLDFNQTGKIIKPQYAIKRLFEKTKNIETYITTEVGQHQMWAAQYYGFSKPNRWMTSGGLGTMGYGLPSAMGVQIAHPEKLVIDISGEASFLMNMQELSTLKQYKLPVKVFIINNQWMGMVRQWQQLIHGGRYSESYTDSLPDFKSLAESFGLEGLRAENVDQLDDVIDQMMASKSAVLCDIQVAKEENCFPMIPSGAAHYDMLLGPEDKQNKKVSKDGLALV

SEQ ID NO: 111217 - protein, 423 aa, Unknown
  Bacterial polypetide isolated from the Sargasso Sea
MPKLFTGAEIVFKCLEDQKVEHIFGYPGGAVLPIYDELKNHPSIKHILVRHEQGAGHAAEGYARSSGKPGVVLVTSGPGATNVVTALTDAYMDSVPLVCISGQVPTHLIGTDAFQECDTTGITRPCTKHNWLVKDINDLSKVMHEAFKVATTGRPGPVLIDIPKDIQFAKAKYKKPNKEKKLNGKSHNKFSQDQIDELVKLLSKAKKPIIYSGGGVINSGPKASQALREFVELTGFPITSTLQGLGAYPGDDNQFLGMLGMHGTYEANNAMHDCDLLINIGARFDDRITGKIDEFSPNSKKVHIDIDPSSINKIIKVDLAIVGDVTSVISKINKTIAKRKNGHSKSNKSNIAKWWEQIEKWREKDSLNFVNSNESIKPQHAVQRLYELTKDKDTYVTTEVGQHQMWAAQHYKFNKPNRWMTSG

SEQ ID NO: 111218 - protein, 469 aa, Unknown
  Bacterial polypetide isolated from the Sargasso Sea
MTGAQMVLKALEDQQVDTIFGYPGGAVLPIYDELAKTKDTNHQIRHFLVRHEQGASHAAEGYARSSGKVGVMLVTSGPGVTNAVTGLTDAMMDSIPLVCISGQVPTHLIGTDAFQECDAVGITRPCTKHNWLVKDISDLSRILHEAFYVASSGRPGPVLVDIPKDIQFQTGTYIGPDTIKHKSYRPKLKANIDNIDDALKLISEAEKPIIYTGGGVINSGNAAVQLLREFVRLTGFPITSTLQGLGAFPGDDTQFVGMLGMHGTYEANMAMNKCDLMINIGARFDDRITGKIDEFSPKSKKIHIDIDPSSINKVVDVDVALVGDVAHVLEDAIKLWKSKVYKVNKSLIKDWWKQIDKWKEVDSLGFNEDKKTIKPQYAIQRLYELTKEKDVFVTTEVGQHQMWAAQYYKFNRPNRWITSGGLGTMGFGLPAAIGAQVAHPDKLVIDIAGEASILMCIQEMSTAIQHKLP

SEQ ID NO: 111219 - protein, 366 aa, Unknown
  Bacterial polypetide isolated from the Sargasso Sea
MSKSSKPIFYTGGGVINSGPKASELLRELVYATGFPITSTLQGLGSFPGDDNQFLGMLGMHGTYEANNAMHDCDLMINIGARFDDRITGKIDEFSPNSKKVHIDIDPSSINKNVKVDLAIVGDVKTVLSSTLKSLKQKKSKFLKSNKQKTSKWWEKIQKWRLVRSLDYIGSEETIKPQYAIERLYELTKDKDSYITTEVGQHQMWAAQHYKFNKPNRWMTSGGLGTMGYGLPAAVGVQVAHPKKLVIDIAGEASVLMTIQEMSTAVQYNLPIKIFILNNQYMGMVRQWQELLHDKNYSESYTAALPDFVKLAEAYNCVGIRAKTPEELDDKIIEMLNIDRPVIFDCMVDKVENCFPMIPSGKPHNQ

SEQ ID NO: 111220 - protein, 545 aa, Unknown
  Bacterial polypetide isolated from the Sargasso Sea
TNHQIRHFLVRHEQGASHAAEGYARSSGKVGVMLVTSGPGVTNAVTGLTDAMMDSIPLVCISGQVPTHLIGTDAFQECDAVGITRPCTKHNWLVKDINDLSRILHEAFYVASSGRPGPVLVDIPKDIQFQTGTYIGPDTIKHKSYRPKLKANIDNIDDALKLIAEAEKPIFYTGGGVINSGNAAVQLLREFVRLTGYPITSTLQGLGAFPGDDTQFVGMLGMHGTYEANMAMNECDLMINIGARFDDRITGKIDEFSPNSKKIHIDIDPSSINKVVNVDVALVGDVAHVLEDAIKLWKSKVYKVNKSQVKDWWKQIDKWKERDSLGFNEDKKTIKPQHAIQRLYELTKEKDVFVTTEVGQHQMWAAQYYKFNRPNRWITSGGLGTMGFGLPAAIGAQVAHPDKLVIDIAGEASILMCIQEMSTAIQHKLPVKIFIINNQYMGMVRQWQELLHDKRYSHSYTDALPDFVKLAEAYGAKGIRAQSPSELDKAINEMIDHDGPVIFDCVVDENENVFPMIPSGKAHNEMLLGDETEKEEISDEGKVLV

SEQ ID NO: 111221 - protein, 407 aa, Unknown
  Bacterial polypetide isolated from the Sargasso Sea
IPKDVGQEFFNYQRVLPGEIIPKGFKRNGEINDSDIEKAIKLIEDSERPLLYVGGGAISSGAHDEIKTLAKNYQIPVTTTLMGKGAFDEKDNLSVGMLGMHGTAYANFAVTECDLLIAIGARFDDRVTGKLDTFAPNAKVIHIDIDPAEVNKNRRVDVAIVSDVSKAVLKINEQSQKNKFTCKTKNWLEKIDFWKNKHPLYDPPKEGEIYPQEVLLKVRELLPEAYVTTDVGQHQMWAAQYLRNSPRKWISSAGLGTMGFGLPAAIGVKAALPNSDVICIAGDASVLMNIQELGTLSQYGLKVKLIIINNRWQGMVRQWQESFYDERYSSSDMSCGEPDFVKLAESFGVKGYLISDRKQLQNELKNALDHDGPALINILVRRGENCYPMVPPGKSNAQMVGYVNCED

SEQ ID NO: 111222 - protein, 415 aa, Unknown
  Bacterial polypetide isolated from the Sargasso Sea
MHIYDAIFNQKEMQHILVRHEQGATHAADGYARATGKPGVVMLTSGPGATNAITGIATAFMDSIPMIVISGQVQSHLIGTDAFQETDMIGVSRPIVKHSFTVDHQSNIAKIIKEAFYIATSGRQGPVVIDVPKDLTNPVDLFEYKYPSEVNIRSYNPPIEPEQSQIDRAVEAIIKSKQTVIYAGGGTISSNAAKELFELNSYINAPITNTLMGLGVYPASDKNFLGMLGMHGTYQANMAMHNADLIIAIGARFDDRITNTPEKFAPNAQIIHFDVDHSSVSKIIEADIAVFGQVKNSLQAMNAKLKSRLSEINDSRLDAWRNQIAEWKEMHGLDHDLYKNNSDDSPILPQAVVQHIYHASNGDAFVTSDVGQHQMFAAQYYHFDEPRKWINSGGLGTMGFGLPAAMGVKLAYPEE

SEQ ID NO: 111223 - protein, 580 aa, Unknown
  Bacterial polypetide isolated from the Sargasso Sea
MTRQMTGARMVVQALKDQGVDTVFGYPGGAVLPIYDEVFLQNDIRHILVRHEQGAVHAAEGYARSTGKPGVVLVTSGPGATNAVTGLTDALMDSIPLVVLTGQVPTFMIGSDAFQEADTVGITRPCTKHNWLVKDTNELAEVIHEAFHVATSGRPGPVLVDIPKDVQFATSEYIEKSKIPVSHYRPKTKGNPQQIASLVDAIENAKKPLFYTGGGVINSGPNASKLLRELVDGTNFPITSTLMGLGCYPASGKRWLGMLGMHGLYEANLAMHDCDLMINIGARFDDRITGRLDAFSPNSKKAHVDIDPSSINKVIHVDIPIIGDVESVLKDILKLWKSRGQKTNTSAVSGWWKQIEDWKSTNCLAFNQKGKTIKPQFAIARLEELTKKYKDRFISTEVGQHQMWAAQYLGFEKPNQWMTSGGLGTMGYGFPASIGVQIAHPEALVINVAGEASWLMNMQEMGTAVQYRLPVKQFILNNERLGMVRQWQELLHGERYSHSWSDALPDFVKLAEAFGAKGILCDDPKNLDDAIMEMVEYDGPVIFDCLVEKHENCFPMIPSGEPHNKMLLGEASTKDAITSS

SEQ ID NO: 111224 - protein, 185 aa, Unknown
  Bacterial polypetide isolated from the Sargasso Sea
KAYVSSDVGQHQMFAALYYPYDKPRQWINSGGLGTMGFGLPAAMGVQFAHPGSTSVVVTGDGSIQMNIQELSTCLQYNLPIKIISLNNRALGMVRQWQDMIYKGRHSHSYMDSMPDFVKLAEAYGHVGIKVDKLDELDAAMEKCFSYTDRLVFMDIAVDQNEHVYPMQIKFGAMDDMRLSKTERT

SEQ ID NO: 111225 - protein, 588 aa, Unknown
  Bacterial polypetide isolated from the Sargasso Sea
MSKLFTGAEIVFKALEDQKVDYIFGYPGGAVLPIYDELKNHKSIKHILARHEQGAGHAAEGYARSSGKPGILLVTSGPGATNAVTALTDAYMDSVPLVCISGQVPTHLIGTDAFQECDTTGITRPCTKHNWLVKDVNDLARVLHLAFEVATTGRPGPVLVDIPKDIQFKKGKYSFSKSTLKKKLNGRATHKISNNELDKFIDLLKKSSKPIFYTGGGVINSGPQASEYLRELVSLTGFPITSTLQGLGAYPGDDPQFLGMLGMHGTFEANNAMHDCDLMINIGARFDDRITGKVDEFSPGSKKIHVDIDPSSIGKNIKVDLAIVSDVSEFLKSLIKRFKEKNKNFLSSNKQKTSKWWSTIEKWREKKSLNFINSNKIIKPQHAVQRLYELTKDKDTFVTTEVGQHQMWAAQHYKFNKPNRWMTSGGLGTMGYGLPAAIGVQIANPGKLVVDIAGEASVLMTMQEMSTAVQYKLPIKIFILNNEYMGMVRQWQELLHEKNYSESYTAALPDFVKLAESYGCVGMRAKTPDELDEKIKEMVNIDRPVIFDCLVDKAENCFPMIPSGKPHNQMILGPEEEEEISDEGKILV

SEQ ID NO: 111226 - protein, 281 aa, Unknown
  Bacterial polypetide isolated from the Sargasso Sea
PSSINKIIKVDLAIVGDVTSVISKINKTIAKRKNGHSKSNKSNIAKWWEQIEKWREKDSLNFVNSDESIKPQYAVQRLYELTKNKDTYVTTEVGQHQMWAAQHYKFNKPNRWMTSGGLGTMGYGLPAAVGVQIAHPQKLVVDIAGEASVLMTMQEMSTAVQYNLPIKIFILNNQYMGMVRQWQELLHEKNYSESYSEALPDFMKMAEAYGCKGIKADNPDDLDYKIQEMIDYDGPVIFDCHVDPNENCFPMIPSGKPHNQMILGPNDQEENKIKGKGKALV

SEQ ID NO: 111227 - protein, 403 aa, Unknown
  Bacterial polypetide isolated from the Sargasso Sea
MFEARIKANQTQIEEAMKLIVNAKKPIFYIGGGCINSGPKASKLVREFVKETKAPATMTLMGLGTLPSSNEYSLGMLGMHGMYEANLAMHECDVMINIGARFDDRVTGRLDAFSPNSKKIHIDINASNINKNIKVDVPIVGDIENIMNQMLEVWKKNKFSTNKKDISDWWQKIDEWKKIDCLKFEQTGEIIKPQLAIKRLYELTKEKNTIITTEVGQHQMWAAQYYKFEEPNKWLTSGGLGTMGYGFPAAIGAQVANPDALVIDIAGDASILMNIQEMSTAVQHRLPVKIFILNNEYMGMVRQWQELLHGGRYSESYTDSLPDFVMLAESYKAKGLRATKVSELDNVIEEMIKSDKTVIADIWVDKEENCFPMIQSGSAHNEMLLNKGQKQDKESAEKGKTLV

SEQ ID NO: 111228 - protein, 496 aa, Unknown
  Bacterial polypetide isolated from the Sargasso Sea
DSVPLVCISGQVPTHLIGTDAFQECDTTGITRPCTKHNWLVKDIKNLEKTIHKAFEVATTGRPGPVLVDIPKDVQFQKTIYTKYKKQKKLNGKINNQFSQKDIDELIKLMNNASKPIFYTGGGVVNSGPKASELLRELVNTTGFPITSTLQGLGSYPGEDSQFLGMLGMHGSYEANNAMHDCDLMINIGARFDDRITGKIDEFSPKSKKVHIDIDPSSINKNVKVDLPIVGDVTEVITSTIKTIKKTKPSFAKSNKQKISKWWEKIEKWRSVNSFDFINSDETIKPQYAIQRLYELTKNKDTYITTEVGQHQMWAAQHYKFNKPNRWMTSGGLGTMGYGLPAAVGVQVAHPNKLVIDIAGEASVLMTMQEMSTAVQYSLPIKIFILNNEYMGMVRQWQELLHDKNYSESYTAALPDFVKLAEAYGCVGIKAETPGELDDKIIEMINTDRPVIFDCRVDKQENCFPMIPSGKPHNQMLLGPKDQKENKITGKGKTLV

SEQ ID NO: 111229 - protein, 552 aa, Unknown
  Bacterial polypetide isolated from the Sargasso Sea
MIRGADAVIKVLAAHGVTTVFGYPGGAIMPIYDALYGSPVEHLLSRHEQGAAFAAVGYARASGKTGVCFATSGPGATNLITSLADALLDSVPVVAITGQVSTAVIGTDAFQEIDVLGMSLSCTKHSFMVTDVNDLIPTLYQAFEIAASGRPGPVLVDIPKDIQIAHLEYRTPLLAVTNEPQASASEIEAARALLAAAKQPMLYVGGGVGMAGAVDQLRDFIKATGMPSVATLKGLGSIAHGTPGYLGMLGMHGGKAANLAVQDCDLLVVAGARFDDRVTGRLATFANKAKVIHLDIDAAELGKLRQPDVAIAGDLRQIFPALAMSLDITPWQAEVEHLARKHQWDYQHPGSLIYAPAMLRRLANKLPEDSVVCCDVGQHQMWVAQHMWFRRPEDHLSSAGLGTMGFGLPAAIGAQVARPDATVVTVSGDGSFMMNVQELTTIKRRKLPVKILLIDNQKLGMVKQWQQLFFEERYSETDLSDNPDFVLLASAFDIPGRTIFSSDEVEEALTEMLAAKGPYLLHVAIDDAFNVWPLVPPGASNSDMMDEMEKQT

SEQ ID NO: 111230 - protein, 578 aa, Unknown
  Bacterial polypetide isolated from the Sargasso Sea
MKLAGNDILIQSLIEEGVEYIFGYPGGASLHIYDAIFNQKEMQHILVRHEQGATHAADGYARATGKPGVVMLTSGPGATNAITGIATAFMDSIPMIVISGQVQSHLIGTDAFQETDMIGVSRPIVKHSFTVDHQSNIAKIIKEAFYIATSGRQGPVVIDVPKDLTNPVDLFEYKYPSEVNIRSYNPPIEPEDSQIDRAIEAIINSKQPVIYAGGGTISSNASKELFELNSYINAPITNTLMGLGVYPASNKNFLGMLGMHGTYQANMAMHNADLIIAIGARFDDRITNTPEKFAPNAQIIHFDVDHSSVSKIIEADIAVFGQVKNSLQAINSKLKLRSSEINDSNLDAWRKQIEQWKEMHGLDHDLYKNNSDDGPILPQAVVQHIYHASNGDAFVTSDVGQHQMFAAQYYHFDEPRKWINSGGLGTMGFGLPAAMGVKLAYPDEEVICITGEGSIQMCIQELSTCTQYKLPIKIFNINNLALGMVKQWQDMNYDGRHSSISYEDSLPDFSKLVESYGHVGIKITKNSQLKAGIEEAMSIKDKLVFVDIYVDPNEHVYPMLVAPDGSLKDMWLGKGEKT

SEQ ID NO: 111231 - protein, 548 aa, Unknown
  Bacterial polypetide isolated from the Sargasso Sea
MNGAQFLVQALKQQGVTQVFGYPGGAIMPVYDALYDGGLAHQLCRHEQGAAMAAVGYARASGQVGVCIATSGPGATNLVTGLAEALLDSVPLVAISGQVPCAAVGTDAFQEVDVLGMSLSCTKHSFMVTDVADLPQVIAEAFAIASEGRPGPVLIDLPKDVQLAKVPTQSPLFAVAEPEHLSQAELTAARTLLAAAERPVLYVGGGVGMANAERKLREFAAATGMPAVTTLKGIGALDPDSPVYLGMLGMHGTKAANYAVQQCDLLLVVGARFDDRVTGKLEEFAPEAKVIHLDVDAAEFGKRRTAEVGITQDLKQVLPRLAMSLSIDPWREHCANMAREYAFRYDHPGQPIYAPALLKQLSAWLPETSVVACDVGQHQMWVAQHMRFTSPRNHLSSAGLGTMGFGLPAAIGAKMSRPEDEVVLVSGDGSFMMNVQELGTIRRAQLKVKMVLLDNQRLGMVRQWQELFFDGRYSETILSDNPDFIALAAAFGIPGETITCKDQIAGALDRLLASESAYLLHVAISEEENVWPLVPPGVANHQMMEQRP

SEQ ID NO: 111232 - protein, 360 aa, Unknown
  Bacterial polypetide isolated from the Sargasso Sea
DASEELTALAKLLNFPVTNTLMGLGAFPGSDPQFMGMLGMHGTYQANMAMHNADLIIAVGARFDDRITNDPKQFALGAKKIHIDVDAASVSKIIHADIPIVGSAKECLAALIKEINSRDLQLNNSAIAEWNQKISDWRDNHGLNHSMLELGPQNGKILPQQVVQSLYKETEGQAFITSDVGQHQMFAAQYYHFDKPRQWINSGGLGTMGFGLPSAMGVQLAYPDATVACVTGEGSIQMCIQELSTCLQYGLPIKIININNAALGMVRQWQDMQYGGRHSSSTYENSLPDFVALAESYGHVGIKVTKFEELESAMKECISLKDRLVFLDVDVDPNEHVYPMLEAGNAMDHMWLGKEEKTWK

SEQ ID NO: 111233 - protein, 344 aa, Unknown
  Bacterial polypetide isolated from the Sargasso Sea
MKENLIKGSEIVCKALINEGVDTVFGIPGGAILPLYGTLNKFPEIKHILTRHEQGACHAADGYSRTTGRVGVAFATSGPGATNLITGMATAMMDSVPLVAITGQVGRPAIGTDAFQETDITGATLPVTKHNYLVMKASDIGSVIHEAFHIARTGRPGPVLIDIPKDVFDELAEYDFSKDSKINLPGYNPYLKVDQNQIEKSVDLINKAKKPIILAGHGVIISRAQNKLLELAEKAQIPVVTTLLGISAFPEDHILSTGFPGMHGMAYASIALDEADLIIAIGSRFDDRIVGNAKRFGKNSKKIHIDIDPAEINKTVKVDSPIIGDINEVLELLNPKVNSETHTS

SEQ ID NO: 111234 - protein, 420 aa, Unknown
  Bacterial polypetide isolated from the Sargasso Sea
MSEEKLSGAELVVRSLEYMNISTIFGLPGGAILPAYDPLYDSPIRHILARHEQGSGHMAEGYAQATGELGVVIATSGPGATNLITPLTNALMDSTPLLAITGQVASEAIGNDAFQEAYTVGLTMAATKHNYLITNAEEIPQILLEARHIATTGRPGPVLVDIPKDILNQKVEWIEPKLIDLPGYKPTLEPNPKMINQAADLIKKAEKPILYVGGGIIHSKANEELFELATKFQIPVVTTLMGRGAFPDGNELCFEMPGMHGNYTATTSIQKSDLLIAIGVRFDDRVTANPKFFAQNAKVIHADIDPAEIGKIREPEVPIVGDAKSVITGLIERLEGSDLKTTDWINELNQMKKDYPLSYIQEEKGPLKVPFVLEELQKLSDEDAIVVSGVGQHQMWISQHWNFTQPNTWLNSGGLGTMGY

SEQ ID NO: 111235 - protein, 335 aa, Unknown
  Bacterial polypetide isolated from the Sargasso Sea
ISWTLLGSGAVPASHPLNMGMMGMHGEFAANNAIHNADLLIACGMRFDDRVTGNTKTYSPNSKKIHIEVDPSEINKNVKVDLALNGDLKFILNNLVPKVSKKENTAWFDQISSWQNESASRDIINMDTEVLYGAQVISDLWKETNGDAIIVSDVGQHQMLEAQYYKHDEPNTLLTSGGLGTMGFSLPAAIGASFANRNKEIWVIVGDGSIQMTITELATAVQENTNIKVAIINNGYLGMVRQWQQLFYDSRYSETPISSPDYVKLSEAYGLKGIRVCSRKEIPDAIKKVKEINGPSMIEFVVEQHDMVYPMVPAGANLDEMISRPVHEQFEDAEM

SEQ ID NO: 111236 - protein, 565 aa, Unknown
  Bacterial polypetide isolated from the Sargasso Sea
MLIQSLINEGVEYIFGYPGGAALHIYDSIFKQSEMQHILVRHEQGATHAADGYARATGKPGVVMVTSGPGATNAITGIATAFMDSIPMVVISGQVQSHLIGTDAFQETDMIGISRPIVKHSFTVDHQSNIPQIVKEAFHIATSGRQGPVVIDIPKDLTNPDDLFDYEYPEEVNIRSYNPPVKPEATQIERVVDAIFNSKKPVIYAGGGTISSNASKELIELNSYINVPVTNTLMGLGVYPATDDKFMGMLGMHGTYQANMAMHNADLILAIGARFDDRITNTPEKFAPKAQIVHFDVDHSSVSKIIEADIAVFGQVKDSLQAINELIKDRLSELDITKFDEWHAQISKWRSEHGLNHNLYKDNSDENPILPQAAVQHIYQESKGKAFVTSDVGQHQMFAAQYYHFDEPRKWINSGGLGTMGFGLPSAMGVKLAYPDEEVICITGEGSIQMCIQELSTCSQYKLPIKIFNINNLALGMVKQWQDMNYDGRHSSISYEDSLPDFKELVESYGHVGIKITKNSDLKKGIEEAFSIKDKLVFVDIYVDPNEHVYPMLVAPNGKLKRYVV

SEQ ID NO: 111237 - protein, 100 aa, Unknown
  Bacterial polypetide isolated from the Sargasso Sea
MEKSMTKLTGAEVILKVLKDHSVDHIFGYPGGAVLPLYDEIFKSNDSPRHILVRHEQGAAHAAEGYARSTGKPGVLVVTSGPGATNAVTGLTDCMMDSFL

SEQ ID NO: 111238 - protein, 321 aa, Unknown
  Bacterial polypetide isolated from the Sargasso Sea
NNAMHDCDLLINIGARFDDRITGKIDEFSPKSKKVHIDIDPSSINKIIKVDLPIIGDVADVIELTTKTLKKKNLNLEKSNKQKISKWWQTIEKWKTKDSLNFINSDKIIKPQHAVKRLYELTKNQDTFITTEVGQHQMWAAQHYKFDKPNRWMTSGGLGTMGYGLPAAVGVQLAHPKKLVVDIAGEASVLMTMQEMSTAVQYNLPIKIFILNNQYMGMVRQWQELLHEKNYSESYTEALPDFVKLAEAYGCVGIRAQNPDELDEKIKEMINIDKPVIFDCLVDQAENCFPMIPSGKPHNQMLLGPKDQKENKITGKGKALV

SEQ ID NO: 111239 - protein, 420 aa, Unknown
  Bacterial polypetide isolated from the Sargasso Sea
SKTKYNRPKKEKKLNGKSHNHFNQNSIDELIELMSKSSKPIFYTGGGVINSGPKASELLRELVYATGFPITSTLQGLGSFPGDDNQFLGMLGMHGTYEANNAMHDCDLMINIGARFDDRITGKIEEFSPKSKKVHIDIDPSSINKNVKVDLAIVGDVKTVLSSTLKSLKQKKSKFLKSNKQKTSKWWEKIQKWRSVRSLDYIGSEETIKPQYAIERLYELTKDNDSYITTEVGQHQMWAAQHYKFNKPNRWMTSGGLGTMGYGLPAAVGVQVAHPKKLVIDIAGEASVLMTIQEMSTAVQYNLPIKIFILNNQYMGMVRQWQELLHDKNYSESYTAALPDFVKLAEAYNCVGIRAKTPEELDDKIIEMLNTDRPVIFDCMVDKVENCFPMIPSGKPHNQMILGPKDQDSKKITGKGKSLV

SEQ ID NO: 111240 - protein, 481 aa, Unknown
  Bacterial polypetide isolated from the Sargasso Sea
FNGTDAFQECDTPGITRPCTKHNWLVKDVNDLAKIMHKAFEVAPTGRPGPVLVDIPKDIQFQKAQYKNYRKLKKLNGKSHNKYSQKNIDELISLISKAKKPIFYTGGGVINSGTKASELLREIVYATGFPITSTLQGLGCFPADDNQFLGMLGMHGTYEANNAMYSCDLMINVGARFDDRITGKIDEFSPKSKKVHIDIDPSSINKNVKVDLAIVGDIKSVLTSTLKTLKKSKNNFSKSNKHQISNWWEQIQKWRSKKSLDYIGSEETIKPQYAIERLYELTKDKDTYITTEVGQHQMWAAQHYKFNKPNRWMTSGGLGTMGYGLPAAVGVQIAHPKKLVIDIAGEASVLMTMQEMSTAVQYNLPIKIFILNNEYMGMVRQWQELLHDKNYSESYTAALPDFVKMAEAYGCVGIRAKTPEELDDKIIEMLNTDRPVIFDCLVDKQENCFPMIPSGKPHNQMLLGPKDQKEKKITGKGRTLV

SEQ ID NO: 111241 - protein, 268 aa, Unknown
  Bacterial polypetide isolated from the Sargasso Sea
MSKLYTGAEIVFRCLEDQGVDFIFGYPGGAVLPIYDELKNHNTIKHILVRHEQGAGHAAEGYARSSGKPGVVLVTSGPGATNVVTALTDAYMDSVPLVCISGQVPTHLIGTDAFQECDTTGITRPCTKHNWLVKDIKDLSKTLHEAFRVATTGRPGPVLVDIPKDIQFAKIGYSKPKAEKKLNGKSLNHFLQKDIDTLIGLMNKSKKPVIYSGGGVINSGPEASNVLRELVELTGFPITSTLQGLGAYPGDDNQFLGMLGMHGTYEAN

SEQ ID NO: 111242 - protein, 81 aa, Unknown
  Bacterial polypetide isolated from the Sargasso Sea
MSKIYSGAEIVFKCLEDQGVENVFGYPGGAVLPIYDELKNHQSVKHILVRHEQGAGHAAEGYARSTGKPGVVLVTSGPGAT

SEQ ID NO: 111243 - protein, 522 aa, Unknown
  Bacterial polypetide isolated from the Sargasso Sea
MSTNPKSTEDSNHEITGAEIFVKSLAAEGVDTIFGYPGGAVLHIYDELYKQTDVNHILVRHEQGAVHAAEGYAKSSDKPGVVIVTSGPGATNAITGIADAYMDSVPIVVFTGQVRTALIGNDAFQEVDTVGITRPCVKHNFMITDVKKMAETIKKAFYIASSGRPGPVVVDIPKDITEQKCKFEYPNEVNIRSYQPYADIEDNKIKEIIDAIKDSKKPIIYSGGGVITSNASNELTEFTKLLGYPITNTLMGLGAYPGNDKQFIQMLGMHGSYEANMAMHDCDLMIAIGARFDDRITGRLDMFSPNSKKIHIDIDPSSISKNIRVDVSVIGDVKKVLSLLIKSIKENKLEHPNIELWWKEIETWRKKNSFSYKQDDKIIKPQFVVDKLYEVTSGEAFITSDVGQHQMWAAQLYKYKYPKRWINSGGLGAMGFGLPSAMGVQIANPDSLVCCVTGEASIQMCIQELSTCLQYGLPIKIINLNNRYMGMVRQWQEFFTRVDMQCPIWMHYLILLNLPKVMVILA

SEQ ID NO: 111244 - protein, 392 aa, Unknown
  Bacterial polypetide isolated from the Sargasso Sea
MLTGAELIIRTLEHLKISTVFGLPGGAILPAYDPLYDSPIRHILARHEQGAGHMAEGYAQATGELGVVIATSGPGATNLITSLNNALMDSTPLLAITGQVATEAIGNDAFQEAYTVGLTISATKHNYLITDVKEIPQIILEAKHIATSGRPGPVLVDIPKDILNDKASWVEPKLEELPGYKPTLEANPRMIQQAVELIKNSKKPILYVGGGIIHSKANQELFELSTKYNIPVVTTLMGRGAFPDGNDLCIGMPGMHGNYTATTSIQNSDLLIALGVRFDDRVTANPKFFAQKAKVIHADIDPAEIGKVREPEVPIVGDAKSVIKGLIETLGDTEVDTKDWLKEIKEMKKNYPLSYNQEEKGPLKVPYVLEELQKMSEEDSIVVSGVGQHQMW

SEQ ID NO: 111245 - protein, 571 aa, Unknown
  Bacterial polypetide isolated from the Sargasso Sea
MLIQSLINEGVEYIFGYPGGAALHIYDAIFKQKEMQHILVRHEQGATHAADGYARATGKPGVVMVTSGPGATNAITGIATAFMDSIPMIVISGQVQSHLIGTDAFQETDMIGISRPIVKHSFTVDHQENIPTIVKEAFHIATSGRQGPVVIDIPKDLTNPDELFDYEYPKKVSIRSYNPPVEPEQNQVDRVISALKESKRPVIYAGGGTIASNASDELRELNSYIKVPVTNTLMGLGVYPGTDKYFLGMLGMHGTYQANMAMHNADLILAIGARFDDRITNTPSKFAPKAKIVHFDVDHSSVSKIIEADIAVFGQVKNSLQAINEKLKLESEEFDEGRFTDWHNQIADWRKSHGLNHELYLEVDDSKPVLPQAAVQHIYQASEGKAFVTSDVGQHQMFAAQYYHFDEPRKWINSGGLGTMGFGLPSAMGVKLAYPDEEVICITGEGSIQMCIQELSTCSQYKLPIKIFNINNLALGMVKQWQDMNYDGRHSSISYEDSLPDFSKLVESFGHVGIKITKNSELKEGIEKALSMKDKLVFVDIYVDPDEHVYPMLVAPNGSLKDMWLGKGNKT

SEQ ID NO: 111246 - protein, 294 aa, Unknown
  Bacterial polypetide isolated from the Sargasso Sea
MSKLITGAEIVFKALEDQKVEYIFGYPGGAVLPIYDELKNHKSIKHILARHEQGAGHAAEGYARSSGKPGVLLVTSGPGATNAVTALTDAYMDSIPLVCISGQVPTHLIGTDAFQECDTTGITRPCTKHNWLVKDVNDLSRILHLAFEVATTGRPGPVLVDIPKDIQFKKGKYKFTKNTLRKKLNGKASYKLSNKELDKFIELIKKSSKPIFYTGGGVINSGPEASKYLRELVSLTGFPITSTLQGLGAYPGDDPQFLGMLGMHGTFEANNAMHDCDLMINIGARFDDRITGEG

SEQ ID NO: 111247 - protein, 337 aa, Unknown
  Bacterial polypetide isolated from the Sargasso Sea
DNQFLGMLGMHGTYEANNAMYECDLMINIGARFDDRITGKIDEFSPKSKKVHIDIDPSSINKNVKVDLAIIGDVKSVITSTLKTLKKSKANFIKSNKQKTSKWWEKIQKWRSKRSLDYIGSEETIKPQYAIERLYELTKDKDTFITTEVGQHQMWAAQHYKFNKPNRWMTSGGLGTMGYGLPAAVGVQIAHPQKLVIDIAGEASVLMTMQEMSTAVQYSLPIKIFILNNEYMGMVRQWQELLHDKNYSESYTAALPDFVQMAEAYGCVGIRAKTPEELDDKIIEMLNTDRPVIFDCLVDKQENCFPMIPSGKPHNQMILGPKDKKENKITGKGRTLV

SEQ ID NO: 111248 - protein, 413 aa, Unknown
  Bacterial polypetide isolated from the Sargasso Sea
ARSTGKVGTVLVTSGPGATNCITGIATAYMDSIPLVILSGQVPTSMIGEDAFQETDMIGISRPVVKHSFLCKKASDIPDAIKKAYYIAASGRPGPVVVDLPKDVQNPKEKFPYQYPETVSLRSYNPTKSGHKGQIKRAAKLLVEAERPVMFVGGGAINANADHLVTKLAELLNLPVTTTLMGLGAFSGTHPQFIGMLGMHGTFEANKTMHNADLIFAVGARFDDRVTNNVAKFCPNATIVHIDIDPTSISKTVQAHVPIVGSVETVLEQMLEVIRECGFDNDKQVLADWWSQIGQWRSRNCLAYETHPTLIKPQQVIETLYKVTKGEAFVASDVGQHQMFAALYYPFAKPRQWINSGGLGTMGFGIPAAMGAQFANPDAVVCCVTGDGSVQMNIQELSTCMQYGVPIKIISIN

SEQ ID NO: 111249 - protein, 375 aa, Unknown
  Bacterial polypetide isolated from the Sargasso Sea
SEEEINEAVQLINDAKKPVIIAGHGALISHAHNEVIELAEKCQIPVITTLLGISTLPTDHFLNLGMPGMHGMAYASIAIEESDTLIALGMRFDDRVTGKLEAFAPNARVLHVDIDPSELGKNIKPHVGIQGDLKTVLNQLIPAVDNNINVDWMNRIEQLRSEHPSLNIRETSELLPQYVLKELAKETNQEAIIVTGVGQHQMWAAQFCEFSYPNSWVTSGGLGTMGFEVPAALGAKVGQPDKAVWSIAGDGGFQMTFPELATAVENNIDVKFAILNNNNLGMVKQLQDLSYDSEYTATQYAGNPDFVKIAEAYGITGIRVTDKAEVSSAIQTAINTPGPVIVEFIVRQEENVYPFIPSGQTVNDMIEEPQPEIKV

SEQ ID NO: 111250 - protein, 288 aa, Unknown
  Bacterial polypetide isolated from the Sargasso Sea
AFSPNSKKIHIDIDPSSMNKTVPVDVSIVGDCAHAIEGILLKWKSKGIRVNIDNWMEQIEKWRSKKSLNYKKASDVIKPQYAVERLYELTKEKDTYITTEVGQHQMWAAQYYKFDEPNRWMTSGGLGTMGYGLPAAIGVQVAHPSSLVIDIAGEASILMNIQELSTAVQHKLPVKIFILNNQYMGMVRQWQELLHGGRYSHSYTDSLPDFVKLAEAYGCLGVRALKPDELDHKIIEMIDYNGPVIFDCVVDQDENCYPMIPSGAAHNEMLLGESDDNPEVSDEGKVLI

SEQ ID NO: 111251 - protein, 391 aa, Unknown
  Bacterial polypetide isolated from the Sargasso Sea
MIKLMSKANKPIFYTGGGVINSGPKASMLLRELVQATGFPITSTLQGLGSFPGDDNSFLGMLGMHGTYEANNAMHDCDLMINIGARFDDRITGKIDEFSPKSKKVHIDIDPSSINKNVKVDLPIVGDVQDVISSTIKTIKKTKPNFANSNKQKISKWWETIQKWREKKSLDYVNSTETIKPQYAVQRLYELTKNKDTYITTEVGQHQMWAAQHYKFDKPNRWMTSGGLGTMGYGLPAAVGVQIAHPKKLVIDIAGEASVLMTMQEMSTAVQYNLPIKIFILNNEYMGMVRQWQELLHDKNYSESYTAALPDFVKLAEAYGCVGIRATNPSELDDKIIEMLNTDRPVIFDCLVDKQENCFPMIPSGKPHNQMLLGPKDQEQNKITGKGKTLV

SEQ ID NO: 111252 - protein, 511 aa, Unknown
  Bacterial polypetide isolated from the Sargasso Sea
PGATNAVTALTDAYMDSVPLVCISGQVPTHLIGTDAFQECDTTGITRPCTKHNWLVKDVKDLEKTIHKAFEVATTGRPGPVLVDIPKDVQFQKTNYTKFKKQKTLNGKVNSQFTQKDIDELIKLMSKASKPIFYTGGGVINSGPKASELLRELVNTTGFPITSTLQGLGSYPGEDSQFLGMLGMHGSYEANNAMHDCDLMINIGARFDDRITGKIDEFSPKSKKVHIDIDPSSINKNVKVDLPIVGDVTEVITSTIKTIKKVKPNFAKSNKQQISKWWQQIQKWRSINSFDFVNSTESIKPQYAVQRLYELTKNKDTYITTEVGQHQMWAAQHYKFDKPNRWMTSGGLGTMGYGLPAAVGVQVAHPNKLVIDIAGEASVLMTMQEMSTAVQYSLPIKIFILNNEYMGMVRQWQELLHDKNYSESYTAALPDFVKLAEAYGCVGIRAETPAELDDKIIEMINTDRPVIFDCRVDKQENCFPMIPSGKPHNQMLLGPKDQKENKITGKGKTLV

SEQ ID NO: 111253 - protein, 218 aa, Unknown
  Bacterial polypetide isolated from the Sargasso Sea
GARFDDRITGKIDEFSPNSKKVHIDIDPSSINKIIKVDLAIVGDVTKVIDKVNKTIAKKKNGNGKSNKSNIAKWWEQIQKWRSKDSLNFINSEDSIKPQHAVQRLYELTKNKDTYVTTEVGQHQMWAAQHYKFNKPNRWMTSGGLGTMGYGLPAAVGVQVAHPEKLVIDIAGEASVLMTMQEMSTAVQYNLPIKIFILNNQYMGMVRQWQELLMKRII

SEQ ID NO: 111254 - protein, 373 aa, Unknown
  Bacterial polypetide isolated from the Sargasso Sea
MKLAGNDILIQSLINEGVEYIFGYPGGAALHIYDSIFKQKEMQHILVRHEQGATHAADGYARATGKPGVVMVTSGPGATNAITGIATAFMDSIPMIVISGQVQSHLIGTDAFQETDMIGISRPIVKHSFTVDHQSNIAQIVKEAFHIATSGRQGPVVIDIPKDLTNPDDLFDYEYPKEVNIRSYNPPLDPELSQIERVVEAILNANQPVIYAGGGTISSNASKELIELNSYINFPVTNTLMGLGVYPATDDKFLGMLGMHGTFQANMAMHNADLILAIGARFDDRITNTPDKFAPNAQIVHFDVDHSSVSKIIEADIAVFGQVKNSLQAINSLIKERLNDIDNSKIQKWHSQIAEWKIIMALIMIFIKINQIA

SEQ ID NO: 111255 - protein, 204 aa, Unknown
  Bacterial polypetide isolated from the Sargasso Sea
LKVPFVLEELQKLADDDAIVVSGVGQHQMWISQHWNFTSPNTWLNSGGLGTMGYSLPAAIGAKAAYPDRQILALDGDGCFQMTCQELITASTENIPIKIVVFNNGNHGMVRQWQKIFYKNRFSASELTHHTPDYVALAESMGATGLRMIEKSDVKKVFEKMLEIDDKPVLVECIVDPEDMVFPMVPAGGSNDVVILNEDDLKKL

SEQ ID NO: 111256 - protein, 583 aa, Unknown
  Bacterial polypetide isolated from the Sargasso Sea
AEEGVETIFGYSGGAILPTYDEVFKYNEANPKNPMPLIVPSNEQGAGFMASGYARSTGKPGVVMVTSGPGATNTVTPVRDAMADSIPMVIICGQVSRAAIGSDAFQEAPISSVMGSVAKHVFLITNENKLAATLKAAFEVARSGRPGPVVVDIPKDIQTAEISDEDHEEANIAAYANRISAIEESRLSEEKSSEFFDHLSNSKKPLIYFGGGVISANASEELREFVDHFNLPAVSTLMGLGAVDTQHRSSLHMLGMHGTPYANYAVQESDFLIAIGSRFDDRVAGVPDKFAPKAKVIAHFDVDASEINKVKNATWSHLGFLSLALKDLIKHAKNNNLEFNFDDWVDHTQKLKSKYPLNFNRSSELIQPEHVIECINKITRGNAIVTTGVGQHQMWAAQYFDFKEPRLWLTSGSMGTMGFGIPAAIGAQFAHPEKTVIDIDGDGSIRMNLGDLETITNYDLPVKVLLLNNSGDGMVKQWQKLYYGGRLSASDKTLHTKDFIMSAKSDGFQFAEKLTDQSKVEETIERFINFEKAAFLEVVIDPDAMVFPMIGPGMSYDQMITGPFMEGKDPDPEIDGNDPKSMF

SEQ ID NO: 111257 - protein, 438 aa, Unknown
  Bacterial polypetide isolated from the Sargasso Sea
SSGRPGPVLIDIPKDVQFAKSKYISKKDISFREHRIKAGSKNVDKNFVKELLNHIKKSERPIFYVGGGCLNSGHQASQELIKLVNKTNIPITTTLHGLGCFPGEDKSSLGMLGMHGNYEANLAMNKCDLMINVGARFDDRVTGRLDAFSPDSIKFHIDIDQSSINKNVKVNFHTNTDIALTLKEINAFIDSNNIDFGDKDYDNWWGQINEWRKKECLHYEQGDEVIKPQHAISRLYELTKQKDTFVTTEVGQHQMWAAQYYKFSKPNRWITSGGLGTMGFGMPAAVGAQMANPDSLVIDIAGEASFLMNIQEIATAVQYKLPIKIFILNNEYMGMVRQWQELLHGSRYSESYVDALPDFKKLAESFNAVGVRAKNISELDDTINEMISIDRPVIADIWVDKKENCFPMIPSGAAHHEMLLSKYDKENPENQEKGKVLV

SEQ ID NO: 111258 - protein, 110 aa, Unknown
  Bacterial polypetide isolated from the Sargasso Sea
MAKSVTVRAPCSTANLGPGFDVFGMALDALYDNVILTKKGKGVVIVSSDNIPLSPSKNTAGLVVSAMKKKFKIKDGIEIKIKKNVPAGFGMGSSAASAAACAVGLNKLYN

SEQ ID NO: 111259 - protein, 75 aa, Unknown
  Bacterial polypetide isolated from the Sargasso Sea
MGNYQYLNKVNFPSDIKNLSIEKLKVLSKEIREEMIDAVSFTGGHLGAGLGVVELTVALHHVFDTPNDKLIWDVG

SEQ ID NO: 111260 - protein, 66 aa, Unknown
  Bacterial polypetide isolated from the Sargasso Sea
MDYDLLDKINFPSDLREFKKKDLKQISEELRAKTIETVSKTGGHLGAGLGVVELTVANHYVFNTPP

SEQ ID NO: 111261 - protein, 69 aa, Unknown
  Bacterial polypetide isolated from the Sargasso Sea
MENLLSHINNPNDLKKLSANQLPQLAKELRDFIIDVVSQREGHLGASLGVVELTIALHYVFNTPKDLLV

SEQ ID NO: 111262 - protein, 76 aa, Unknown
  Bacterial polypetide isolated from the Sargasso Sea
MQNYKYLNNINFPSDIKKLNNEELKVLSEEVRSEMIDAVSKTGGHLGAGLGVVELTVALHHVFDTPKDKLIWDVGH

SEQ ID NO: 111263 - protein, 64 aa, Unknown
  Bacterial polypetide isolated from the Sargasso Sea
MSNNYKFLNNINFPDDVRKLSQSDIKILADEVRQELIDVVSETGGHLGAGLGVVELTVVLHLYI

SEQ ID NO: 111264 - protein, 81 aa, Unknown
  Bacterial polypetide isolated from the Sargasso Sea
MANNKLLNNVNFPSDIKKLSTQELKTLSEELRQEMIEAVSQTGGHLGAGLGVVELTVALHHTFNTPNDKIILGCWSSILSS

SEQ ID NO: 111265 - protein, 86 aa, Unknown
  Bacterial polypetide isolated from the Sargasso Sea
PLDRDAVLHVADEHELLVTLEENVIAGGAGSAVNELLNAEGVQVEVLNLGLPDAFVEHGTPAELLRDCGLDAAGIEAAIRSRLPSP

SEQ ID NO: 111266 - protein, 69 aa, Unknown
  Bacterial polypetide isolated from the Sargasso Sea
MKKKYKYLDTINFPSDIKKLSQSELKLLADEVREEIIDAVSETGGHLGAGLGVVELTVALHYIFNTPND

SEQ ID NO: 111267 - protein, 170 aa, Unknown
  Bacterial polypetide isolated from the Sargasso Sea
GHFAFDILGGKGVQKEWKTVMKSIPVGKGRKLTDGKDLAILSIGHPGNFAQEAIQQMNSEDISIAHYDMRFVKPLDGIMLHEIFSKYDKIITIEDGCLMGGFGSAIIEFMSDNNYSASIHRLGIPDKYINHGTQKELWEECGFDTNSISKKINEVLHLSERKNKVNKKIG

SEQ ID NO: 111268 - protein, 176 aa, Unknown
  Bacterial polypetide isolated from the Sargasso Sea
MTPSDENLTWKMLNTGFDYKGPVSIRYPRGSGPGSKVEKDNSTLELGKSTLIKDPQDSRIAIMNFGSTLELARSLSKKYDACLVDMNFVKPLDHIRIKELAKKYQLLITIEENAVKGGAGSAVAEFLVDSNLKTSLLNFGISDEFVEHGSPEHQKVSSGLGKEEITEKINRRLEEL

SEQ ID NO: 111269 - protein, 215 aa, Unknown
  Bacterial polypetide isolated from the Sargasso Sea
GPTHAGSFDITYLSTLPNFVVMAASDEAELVKMINTSININDRPSAFRYPRGNGVGINLPSINETLEIGKGRVIQEGKKVALLNFGTRMAQCKEASENLLKKGITCTIVDARFAKPLDEKLIMEVASNHEALITIEEGSIGGFGSHVMQFLSDRGVFDKGLKFRSMILPDIFIDQDTPEKMYETAGLDSKSIASKVEEILNSNIILAKSKNKNIN

SEQ ID NO: 111270 - protein, 64 aa, Unknown
  Bacterial polypetide isolated from the Sargasso Sea
MGKGSKTPLLDTVKLPADLRDLEENQLGQLADELRAETIDVVSTTGGHLGAGLGVVELTVALHY

SEQ ID NO: 111271 - protein, 170 aa, Unknown
  Bacterial polypetide isolated from the Sargasso Sea
EEAWQMFNTGYDYKGPVAIRYPRGSGIGIDFKKSEEKLEIGKSHTVLDSDKKEVAIFSFGTLLDSAVKASKKFDAKVVDMRFIKPLDHKIIEEVSKDYKLVVTIEDNVIAGGAGSAVNEYLLGLNTNVKVLNLGLPDEFIEHGDQEQQKVLNGLDKSGIEKSIEEKLKLI

SEQ ID NO: 111272 - protein, 191 aa, Unknown
  Bacterial polypetide isolated from the Sargasso Sea
SSEIELIKMIKTSALIDDFPSAFRYPRGAVNKIEVKDQNEIEIGKGCIIAEGENVAILNLGSKLETCLEASRVLSENNVKLTIADARFAKPLDTELIDMLVENHKYLITIEEGSIGGFASHVLNYIYNVRAKRTTTVVKNIFFPDKFVDHMTSQEQYNEIKMDVNSIVNKIKYLNNDKVIEMKNFNLNKNN

SEQ ID NO: 111273 - protein, 201 aa, Unknown
  Bacterial polypetide isolated from the Sargasso Sea
MSTILPTIESPHDLQGLSPDELENLAAEMRQALCQVAASRTAHFASNLGVVELCLALHRVFDFSKDRLIWDTGHQIYPHKLITGRYNRFDTIRTRGGLMGFPNPSESPYDLFMTGHAGCSVSAALGLASGDSLQGHDDRHSVAVIGDGALPSGIVFEALNNAGFLKKRLIIILNDNRMSICPRVGALAEYLDVVRTNPWYR

SEQ ID NO: 111274 - protein, 75 aa, Unknown
  Bacterial polypetide isolated from the Sargasso Sea
MSSNYKFLNNVNFPSDIRKLSQSEIKVLADEVRQELIDVVSETGGHLGAGLGVVELTVVLHYIFNTPHDKLNLGC

SEQ ID NO: 111275 - protein, 77 aa, Unknown
  Bacterial polypetide isolated from the Sargasso Sea
MFLNNINFPKDIKKLSQKELKILAQEVREEMISAVSETGGHLGAGLGVVELSVVLHYVFNTPNDKLIWDVGHQSYPH

SEQ ID NO: 111276 - protein, 81 aa, Unknown
  Bacterial polypetide isolated from the Sargasso Sea
MIKKYEFLNDINFPSDLKKIPEAKLQKVADELREEMIDAVSVTGGHLGASLGVVELSVALHYIFNTPNDKLIWDVGHQSYP

SEQ ID NO: 111277 - protein, 79 aa, Unknown
  Bacterial polypetide isolated from the Sargasso Sea
MAKSVTVRAPCSTANLGPGFDVFGMALDALYDNVILTKKGKGVVIVSSDNIPLSPSKNTAGLVVSAMKKKFKIKDGIEI

SEQ ID NO: 111278 - protein, 217 aa, Unknown
  Bacterial polypetide isolated from the Sargasso Sea
RAGLVCADGPTHAGSFDITYLSTLPNFVVMAPSDESELVKMVNTSVDINDKPSAFRYPRGTGIGIKLPEIHEKIEIGKGRVIKEGKEIALINFGARLQECQKTLKNLEKKGLNLTLIDARFCKPLDENLMWNTAKNHEVVISIEEGSIGGFGSHLSKFLSEKGLLEKIKFRSMTFPDKFIDQDKPDLMYQIAGLDSKAIEEKVYEVLDSKVVVQKKN

SEQ ID NO: 111279 - protein, 230 aa, Unknown
  Bacterial polypetide isolated from the Sargasso Sea
ALGMDEASKHQKNNKNIFSVIGDGAMTAGIAFEAMMHAGHLNNNLKIILNDNDMSISKNKGGLSDYLAKIWASKSYKKLKSSGKKVLKNLPYGLHITRNLKDGIKSAVMPGNLFEDLGLHYVGPIDGHDIPLLIKTINRMMEKNEPYLLHVITKKGAGFEPAENERIKFHAISKIENTPAPKKTKFQDIFGDWLCYKAKQDSKLVGITPAMKEGSGMVNFEREFPERFYD

SEQ ID NO: 111280 - protein, 81 aa, Unknown
  Bacterial polypetide isolated from the Sargasso Sea
MQNYKYLNNINFPSDIKKLNNEELKVLSEEVRSEMIDAVSKTGGHLGAGLGVVELTVALHHVFDTPKGQIDMGCWSSIIPS

SEQ ID NO: 111281 - protein, 88 aa, Unknown
  Bacterial polypetide isolated from the Sargasso Sea
MKVFKEIPVEKPNTPLLDSVTYPSDLRSFSINELETLANELREFLLYSVGQSGGHLGGGLGVIELTIILHHLYKTPYDNLVWDVGHQA

SEQ ID NO: 111282 - protein, 57 aa, Unknown
  Bacterial polypetide isolated from the Sargasso Sea
MAKSVTVRAPCSTANLGPGFDVFGLALDAFYDEVTVTKKGKGITIVSSDDIPLEPEQ

SEQ ID NO: 111283 - protein, 63 aa, Unknown
  Bacterial polypetide isolated from the Sargasso Sea
YPHKILTGRKNKIRTLRKGRGLSGFTKRSESEYDPFGAAHSSTSISSALGMAVCYKCQINLIM

SEQ ID NO: 111284 - protein, 152 aa, Unknown
  Bacterial polypetide isolated from the Sargasso Sea
MKETQFLDHLNFPADIKELSIDNLDILAQEIRQRLLEIGDRCGGHLASNLGVVELTMVLHSLFDSPKDKFLWDTSHQVYVHKMLTGRLNEIFSIRQEGGLSGFAKISESDHDTFGAGHASTALSAALGVAHSRDLQDEDYNVIAVFGDASLS

SEQ ID NO: 111285 - protein, 272 aa, Unknown
  Bacterial polypetide isolated from the Sargasso Sea
MTWLTTPAATEHPGQLLKQLLQKKEILRVPGAHNALTALLAKEAGFDSVYLSGGALSASLGLPDLGVMMPDELLMVVRSICRASKLPLIVDGDTGYGEALNVMRLIQDLEISGAAAVQLEDQLLPKKCGHLSDKLLNSKEDMAAKISAANAARSNLQIIARTDAAASEGLDAAIDRAKCYIEAGADIIFPEALTTEQEMEKFNKEINFPTLANMTEFGKTPYLSAKKFEELGFDIVIWPVTSLRCEAAAMKQLFSHLKEYGGQGAYLDKLME

SEQ ID NO: 111286 - protein, 49 aa, Unknown
  Bacterial polypetide isolated from the Sargasso Sea
ADGPTHAGSFDITYLSTLPNFVVMAASDEAELVRMINTSVYINDRPSAV

SEQ ID NO: 111287 - protein, 163 aa, Unknown
  Bacterial polypetide isolated from the Sargasso Sea
MAKSVTVRAPCSTANLGPGFDVFGMALDALYDNVILTKKGKGVVIVSSDNIPLSPSKNTAGLVVSAMKKKFKIKDGIEIKIKKNVPAGFGMGSSAASAAACAVGLNKLYNLKLTDAELVEFAGIGEKASAGTIHYDNVAASALGGFVIVKTKPLHVVKIQPPN

SEQ ID NO: 111288 - protein, 306 aa, Unknown
  Bacterial polypetide isolated from the Sargasso Sea
MVKSVTVRAPCSTANLGPGFDVFGMALDALYDNVILTKKGKGVVIVSSDNIPLNPSKNTAGLVVSAMKKKFKLKEGIEIKIKKNVPAGFGMGSSAASAAACAVGMNKLYNLKLSDAELVEFAGIGEKASAGTIHYDNVAASALGGFVIVKTKPLQVVKMQPPNDLVLCVAVPELKVPAKKTKVSRGAIPKKVSLSDMVKNISNASGIVAGFSQKNSELVGRSVQDVIVEPARKHMIPGFDKVKKNALAAGAYGVTISGAGPSVIAFTDKKHDSKKISNAMKRGFKAARKESKVFVCKPSKGPVIRR

SEQ ID NO: 111289 - protein, 99 aa, Unknown
  Bacterial polypetide isolated from the Sargasso Sea
MKVFKDFPTERPVTRFLDNIESPEDLKKLTIDELEILADELREYLLYSVRQTGGHFGAGLGAIEITIALHYLLDMPSDKIVWDTGHQAYPHKILTGEKR

SEQ ID NO: 111290 - protein, 455 aa, Unknown
  Bacterial polypetide isolated from the Sargasso Sea
MFITTFLFADKPITGKNIINLEYATQPALNSDGSRIAYVRIVSPEEGSKSRSSFREIWVVDGDGSNQRKFTSAPINSWSPQWAPNGNLTFLSSRKEHNKSTQVYSIPINGGEAYPITDYKDGIGSYKWSPNGKWIAFTSREKESAKVKKMKKDGYDMIVMGKEHLYNRLWIFNIESNTYKKIYRQDLNVSLFEWAPDSESIVFQASEKVNVDLEYLESSIYLVKIPNGNPKKVTDTPGKLSSMSISPNNKQLAFLGATSYNDPLAQSIYVAEIKTGKSKLITDNFKESFIDVDWIDDQTVIGLSQRGTKTVLSAIFLNNNSSEKVFNQNDILTPKEIITSISYHRNTKQFLFTANSHRHHNEVFLGLYGSKKMQRITFLNPSLSNIKLAKQETVSWKAEDGITIEGVLTYPLSYRGGKRYPLILQIHGGPEGVSQDGWNTRTTYPVQLLAANGYL

SEQ ID NO: 111291 - protein, 186 aa, Unknown
  Bacterial polypetide isolated from the Sargasso Sea
MNESELRNLMYTAQAHNKNPFTIRYPRGKGVQIEWETEMELVEIGSGRTICEGEEIAILSIGHIGNYATKAIKKLNEDNIFPSHYDMRFVKPLDEKLLHKILKNHKYILTVEDGCIMGGFGSSVIEFMADNNYKNPVQRLGIPDKIIEHGSQDELYNECYYDDKAIYDFCRKMLDHQGSKYEEVVI

SEQ ID NO: 111292 - protein, 184 aa, Unknown
  Bacterial polypetide isolated from the Sargasso Sea
FVLMAPKDEAELQRMLITSINHNGPTALRIPRGSGLGVAVMDEGWETLNIGEAEILEEGEDILIIAYGSMVASAIETAKILKNMKINACLINARFVKPLDKNLIMPLASRIQKVVTMEEGTLIGGFGSAIVELLNDNEINIPVYRIGIPDVLVDHASPDQSKEKLGLMPDQMADKIVKKFKLDN

SEQ ID NO: 111293 - protein, 346 aa, Unknown
  Bacterial polypetide isolated from the Sargasso Sea
MSISPNFEDIKQAYERIKGDVKKTPIVESSLLNKWMGNRILFKAECLQTIGAFKIRGAMNFLARLKEEGRLPKHVVANSSGNHAQAVAYAAAHFGIKATIFASETISPIKAAATQSYGAELKIFPTRPEADAAVEQASKAPDTVWIPPFNHKDIVAGQGTATLEALNEIGEVDAVFAPCGGGGLLSGSLLATRALQPNALVIGAEPAEANDASMSLQAGEIIALDYAPNTLADGAATPSVGDVTFPILQEIDDFYEVDELQIAYWTQWLHHLLKLHIEPTCAMTMAAVAAWAANTPPGQTALVILSGGNISQSSMAKIWERDFLLQPPILDLDDEDEFEDTESVEA

SEQ ID NO: 111294 - protein, 222 aa, Unknown
  Bacterial polypetide isolated from the Sargasso Sea
AGLVGADGATHAGSFDIAYLSCLPNVVIMAPSNENELALMLFTASEYDSGPIFCRYPRGEGVGIKIQDKLISLEIGKGKIIKKGKQIAILSLGSRLNDIMEASELLKNDGFEITIADARFAKPIDKNLIKSLFLNHEALFFVEEGSLGGFSSQCLNYLSSENLLGQKSTLVRCLTLPDRFQDHGSQEDQLVEAKLDRDGIFSEIKNVISKLKISPQLTNKTG

SEQ ID NO: 111295 - protein, 270 aa, Unknown
  Bacterial polypetide isolated from the Sargasso Sea
EALGVRYFGPVEGHTLPNLIRYLELVKDEEGPILLHVLTEKGHGFKPAEDDPVFFHTPAPFECDDDDCIVAVKKSSVRGYTDAASAAIADCMKHDDRVTVMTAAMCQGNKLEAVREAFPDRFFDVGICESHAVAFAAGQAKAGCRPIVDIYSTFLQRSYDQIFQEVCLQNLPVVFMLDRAGLTGPDGPTHHGVFDLGYMRLFPNMTVLAPADEHDLTSMVAWALKHDGPVAIRYPKAVLESGLSNRFGEDRLPVTVRQCEPLIDGPDGLI

SEQ ID NO: 111296 - protein, 269 aa, Unknown
  Bacterial polypetide isolated from the Sargasso Sea
LSAMLGMAMASKESYPDKKHVAVIGDGAMTAGMAFEALSHTGDLKPNVLIILNDNDMSISENIGGLSNYFSRIWASKLYKGIKKSGASFLKPLPQAFHLARKVETQMKAMVAPGTIFEELGLNYIGPIDGHNIKELIKVISNLKEFEGPQFLHIITKKGAGLDPAEADRIGFHAIGKINSIKDEKSKQKKYQDIFGEWIVDMASYDENLIGITPAMKEGSGLVEFSKKYPGRYFDVAIAEQHSITFAAGLAVENKKHCGCNILNIFTKG

SEQ ID NO: 111297 - protein, 117 aa, Unknown
  Bacterial polypetide isolated from the Sargasso Sea
SSEIIILNFGALLNEANEISKELKATLVDMRFVKPLDEELLRKLLKKAKIFISIEDGSIMGGAGSAVQEFASKENLNVRSILFGIPDKFIEHASREEMLVDAGLNVENIRSKLSKLL

SEQ ID NO: 111298 - protein, 172 aa, Unknown
  Bacterial polypetide isolated from the Sargasso Sea
MSGKIYFSFRETLKLIISAFSKRFKNKAGKAEDFLRSAVTGGTLFNSMGFYYIGPIDGHDIDTMVSVFKNAKEINYDGPILVHVKTEKGKGYKFAEKSEDKFHGVSKFNVKTGEQIKSSSNAPSYTKVFANTLIKHAEKDSKVVGITAAMPSGTGMDLFGKKFPNRMFDVGI

SEQ ID NO: 111299 - protein, 252 aa, Unknown
  Bacterial polypetide isolated from the Sargasso Sea
KDKIIWDVGHQSYPHKILTGRRDQMSTLRKKDGLSGFTKRDESKYDHFGAGHSSTATSAGLGMSIGRDLKKRDNHVVCVVGDGAMSAGQAYEALNNAGAEKSKLIVILNDNDMSIAPPAGAMSAYLAKLISGGTYLGLRNFAKQVIEKLPKSLEKGAKKAEEITRLIAGNGTLFEALGFYYVGPLDGHNLDHLLPVIRNVKNANNGPVIIHVVTQKGKGYKPAEDSDEKFHGVTKFNIATGEQEKPKKKNIS

SEQ ID NO: 111300 - protein, 288 aa, Unknown
  Bacterial polypetide isolated from the Sargasso Sea
KYHGVTPFEPIDGKFVKKKTSVHGISYSQVFGNKMSELMEREENVVVLTAAMLSGTGIANLQTKYPDRVLDVGIAEGHAVTCSAGLATTGNKPYVAIYSTFLQRALDHIIHDVAVQKLPVRFMLDRAGFVGSDGPTHHGMFDLTYLRMIPNMTIMVPRNGAELRCMIEFSFNYETGPLAIRYPRANTAELNENQIPPIEFGKAQILRKGQNVALFAVGTMVEKAEKVADLLEKHGVFASVVNARFVKPIDEDLIVELSRKAKLVVSLEENTIQGGFGSAILEILSKNK

SEQ ID NO: 111301 - protein, 146 aa, Unknown
  Bacterial polypetide isolated from the Sargasso Sea
MKKKYQFLDQISFPSDLKRIPEKQLQKVADELREEMIDAVSVTGGHLGASLGVVELSVALHYIFNTPNDKLIWDVGHQCYPHKILTGRKDKIRTLRQGGGLSGFTKRLESEYDPFGAAHSSTSISSALGIAEANKLANKSDNVISV

SEQ ID NO: 111302 - protein, 168 aa, Unknown
  Bacterial polypetide isolated from the Sargasso Sea
DENETRLMLTTAFNHTGPASVRYPRGTGPNTEVEKKLVEIKIGEARIIHEANKNKILLNFGSLLHIAEEVARSIDITLIDMRFVKPLDEKILLKYLQSADMFISIEDGSVMGGAGSAVQEFCSENGIHIKSLLCGIPDRFIEHASRDEMLIEAGLSPEQIKSRIKELI

SEQ ID NO: 111303 - protein, 277 aa, Unknown
  Bacterial polypetide isolated from the Sargasso Sea
MKKIVKNDDSVRCVTAAMEIGTGLSTFVEEFPEKCIDVGIAEEHAVTYAAGLAANGLKPIVYIYSTFMQRAFDCIFHDVLLQDLPVIFCMDRAGIVGPDGPTHHGVFDISMLNILPNIIVAAPKDGDEFLDLLFTATKINKPFAIRYPKSNTDNFDVNREPTLIEVGTWEYLVERKDAKIAILATGSMVDMVLESKEYIQEQIGVDFNLVNCRFIKPLDADILNDISKKEITHIVTIEERVIIGGLGSMINEHFNNTVINVKAMGIPDKYIEHGSRG

SEQ ID NO: 111304 - protein, 70 aa, Unknown
  Bacterial polypetide isolated from the Sargasso Sea
MTSLIKQINFPSDLRKFKKDDLRQISDELRDELIDVVSETGGHLGAGLGVVELTVALHYVFNTPKDKLVW

SEQ ID NO: 111305 - protein, 190 aa, Unknown
  Bacterial polypetide isolated from the Sargasso Sea
RETVKLIISAFSKRFSKKAGAAEDFLRSAVTGGTLFSSLGFYYVGPIDGHNIDDLISVFKNAQNLNFEGPILIHLKTEKGKGYEFAEKSADKFHGVSKFNVKTGEQEKTKSNVPAYTKVFANTLVKHGEKDSKIIGITAAMPTGTGMDIFGKKFPNRMFDVGIAEQHAVTFAAGLATEGYKPYAAIYSTF

SEQ ID NO: 111306 - protein, 69 aa, Unknown
  Bacterial polypetide isolated from the Sargasso Sea
MKKKYELLDEINFPSDLKKIPESKLQKVADELRDEMIDAVSVTGGHLGASLGVVELTVALHYVFNTPND

SEQ ID NO: 111307 - protein, 52 aa, Unknown
  Bacterial polypetide isolated from the Sargasso Sea
DKILAVTAAMSSGTGLDKFPEIYPSRFFDVGIAEQHAVTFCAGMAVEGLKPF

SEQ ID NO: 111308 - protein, 124 aa, Unknown
  Bacterial polypetide isolated from the Sargasso Sea
PNVKVDEKLDTVEIGKARVINEAGKDKVILNFGSLLHIAREISEKFKFTLIDMRFVKPLDEQILNQYLKKADLFISIEDGSIMGGAGSAVQEFCSKNNINIESELFGIPDEFIEHASREEMLND

SEQ ID NO: 111309 - protein, 185 aa, Unknown
  Bacterial polypetide isolated from the Sargasso Sea
DAYQNITVMTPANENECRQMLYTGFLIDGPAAVRYPRGTGPGVEIREEMEAIPLGKATILRKGSKVALLAFGSMVKLAEDLGAEIDATVVNMRFVKPIDDEMIREMAASHDLVITIEENVIAGGAGSAVSESLVAMGITASVAHYGLPDRLVQHGSREDMLQDSGLNIDSFREFVMKRQSERGML

SEQ ID NO: 111310 - protein, 140 aa, Unknown
  Bacterial polypetide isolated from the Sargasso Sea
MKKNYEFLDQINFPSDLKKVPETKLQKVAEELREEMIDAVSVTGGHLGASLGVVELSVALHYIFNTPSDKLIWDVGHQCYPHKILTGRKDKIRTLRQGGGLSGFTKREESEYDPFGAAHSSTSISSALGIAEANKLSKKS

SEQ ID NO: 111311 - protein, 284 aa, Unknown
  Bacterial polypetide isolated from the Sargasso Sea
MAKSVTVRAPCSTANLGPGFDVFGMALDALYDNVVLTKKGKGVVIVSSDDIPLSPSKNTAGLVVSAMKKKFKIKDGIEIKIKKNVPAGFGMGSSAASAAACAVGLNKLYNLKLTDAELVEFAGIGEKASAGTIHYDNVAASVLGGFVIVKTKPLQVVKIQPPNDLVLCVAVPELKVPAKKTKVSRGAIPKKVSLIDMVKNISNASAIAAGFSEKNSELIGRSVQDVIVEPARKHMIPGFDKVKKNAIAAGAYGVTISGAGPSVIAFTDKKHDSKKISNAMKRGF

SEQ ID NO: 111312 - protein, 64 aa, Unknown
  Bacterial polypetide isolated from the Sargasso Sea
MSEKLLDKINYPSDLRQLEKKQLEQVARELRSEMVNVVSETGGHLGAGLGVVELTVALHYVFNT

SEQ ID NO: 111313 - protein, 72 aa, Unknown
  Bacterial polypetide isolated from the Sargasso Sea
MNKKLLDKINYPSDLRKFEKKDLKQISNELRNELIEVVSETGGHLGAGLGVVELTVALHYVFNTPQDKLVWD

SEQ ID NO: 111314 - protein, 217 aa, Unknown
  Bacterial polypetide isolated from the Sargasso Sea
ADGPTHAGSFDITYLSTLPNFIVMAASDESELVKMINTSVEINDRPTAFRYPRGNGIGVELPSIKEVLEIGKARIIKEGKKVTLLNFGTRLEECKKASEKLLSKGIDCTIVDARFAKPLDEKLIMELATNHEALITIEEGSVGGFGSHVMKLLSDRGVFDTGLKFRSMFLPDIFIDQDTPEKMYETAGLDSLSIVDKVEETLNSNIILAKNKNKISN

SEQ ID NO: 111315 - protein, 218 aa, Unknown
  Bacterial polypetide isolated from the Sargasso Sea
MVGSDGPTHAGSFDITYLSTLPNFVVMAASDEAELVRMINTSVNINDRPSAFRYPRGNGIGVELPDIKETLKIGEGKIITQGKHIAILNFGARLNECKKASENLEKKGITTTIFDARFAKPLDDKAIIELASCHEVILTIEEGSIGGFGSHVSKLLSERGFFDKGLKFRSMFLPDKFLDQDTPEKMYKSAGLDYEGIAQKIESTLNSNIVIAKNKNLS

SEQ ID NO: 111316 - protein, 220 aa, Unknown
  Bacterial polypetide isolated from the Sargasso Sea
KPFVAIYSTFLQRAYDQVIHDVVIQKLPVRFMLDRAGLVGADGSTHAGSFDLAYLSCLPNVVIMAPSNENELSKMVFTASNYDAGPIFCRYPRGEAVGLKIDEKLENLKIGKGRVLKKGNQIAILSVGTLLNSVLQSYEFLDNDGYSLTVADARFVKPIDYEMLETLFLNHQALLIVEEGAQGGFSSHCLSYLSKNNFLGRTSTFVKCLTLPDKFQDHGS

SEQ ID NO: 111317 - protein, 69 aa, Unknown
  Bacterial polypetide isolated from the Sargasso Sea
MKKNYQFLNNINFPSDLRKVSENNLQKVADEVREEMISAVSETGGHLGAGLGVVELTVALHYVFDTPNG

SEQ ID NO: 111318 - protein, 59 aa, Unknown
  Bacterial polypetide isolated from the Sargasso Sea
HYVFDTPNDKLIWDVGHQSYPHKILTGRKDKIRTLRQGNGLSGFTKRSESEYDPFGAAQ

SEQ ID NO: 111319 - protein, 87 aa, Unknown
  Bacterial polypetide isolated from the Sargasso Sea
MARLIKQINFPSDLRKFKKENLKQISDELRDELIDVVSETGGHLGAGLGVVELTVALHYVFDTPKDKLVWDVSHPVLPAIKLLLKKG

SEQ ID NO: 111320 - protein, 228 aa, Unknown
  Bacterial polypetide isolated from the Sargasso Sea
AVAKSLSKNSNHVVAVIGDGAMSAGMAYEAMNNAGAMKSKLIVVLNDNDMSIARPVGAMSSYLARLLSGKTYFSLREILKLITSSFSKTFKDKAGKAEEFVRDIVSGGTLFNELGFYYVGPIDGHDLNVLIPVLKNVKNSNYKGPILVHTVTKKGKGYKPAEESGDKYHGVSKFNVATGEQSKPKSNIPSYTKIFANTLIKHAENDTKIIGITGAMPSGTGMDVFGKK

SEQ ID NO: 111321 - protein, 109 aa, Unknown
  Bacterial polypetide isolated from the Sargasso Sea
MKKYEFLDKINFPSDLKKIPESQLHKVADELREELIDAVSVTGGHLGASLGVVELSVALHYIFNTPNDKLIWDVGHQCYPHKILTGRKDRIRTLRQGGGLSGFTKRSES

SEQ ID NO: 111322 - protein, 101 aa, Unknown
  Bacterial polypetide isolated from the Sargasso Sea
MNKEYKFLDDINFPSDIRKLSVSDLKNLADEVRTEMIDAVSVTGGHLGAGLGVVELTVALHYIFNTPNDKIIWDVSHQTYPHKILTGRKDKIRTLRKRWGS

SEQ ID NO: 111323 - protein, 108 aa, Unknown
  Bacterial polypetide isolated from the Sargasso Sea
MKKKYELLDKINFPSDLKKIPELKLQKVADELREEVIDAVSVTGGHLGASLGVVELTVALHYIFNTPKDKLIWDVGHQCYPHKILTGRKERIRTLRQGNGLSGSQKDP

SEQ ID NO: 111324 - protein, 311 aa, Unknown
  Bacterial polypetide isolated from the Sargasso Sea
FPAKDESEHDVLDTSHGGTSLSVASGIAISNRIQNKGGLPIAIIGDSALGEGMALEALNHIGYEKPNMLIIVNDNGWGITENKTAIKSYLSQRSDNPEISEGFFTSLGFDYKGPIDGHDLDCLIRELKEIKQNPNGPMVLHVKTQKGNGLDFPKDEITNHHFCFPLDKTGAPITEDKGTEEGIFYKPLSPFNAGLVGSKIDELMQKDPKLVLITPATQGASETLKAFNSVPDRSFDVGMAEQHALTLGVGLSLEGMKPVISYQSTFFQRSYDQLVHDVCVNNVPILIILARSGLAGLDHMTHHATLDLLIS

SEQ ID NO: 111325 - protein, 103 aa, Unknown
  Bacterial polypetide isolated from the Sargasso Sea
MKKKYELLDEINFPSDLKKLHESKLQKVADELREEMIDAVSVTGGHLGASLGVVELTVALHYIFNTPNDKLIWDVGHQCYPHKILTGRKDRIRTLRQGNGLSG

SEQ ID NO: 111326 - protein, 229 aa, Unknown
  Bacterial polypetide isolated from the Sargasso Sea
ESAYDTFGVGHSSTSLSALLGMAIASKESNPDKKHVALIGDGAMTAGIAFEALSHIGHLKPNVLIILNDNDMSISENIGGLSNYFSRIWASKLYKGIKKSGASFLKPLPQAFHLARKVETQMKAMVAPGTIFEELGLNYIGPIDGHNIKELIKVISNLKEFDGPQFLHIITKKGAGLDPAEADRIGFHAIGKINSIKDEKSQQKKYQDIFGEWIVDMASNDERLVGITP

SEQ ID NO: 111327 - protein, 195 aa, Unknown
  Bacterial polypetide isolated from the Sargasso Sea
PTHSGNYDLVYLRCIPNMIVMAPSDENETRKLLTTGFFYNGPASIRYPRGSGPNVVVENDLSPVEIGKGRLIKKGSKDLIVINFGALLDQAKEVANTLGLTLIDMRFVKPLDEDILRKYLSEAQAFISIEDGSVSGGAGSAVQEFCSDNNINVKSKLFGIPDIFIEHQSREEMIEESGLKASRIIEEIEELRLEE

SEQ ID NO: 111328 - protein, 110 aa, Unknown
  Bacterial polypetide isolated from the Sargasso Sea
MKVFKDFPTERPVTSFLDNIESPEDLKKLTIDELEVLADELREYLLYSVRQTGGHFGAGLGAIEITIALHYLLDMPSDKIVWDTGHQAYPHKILTGRRDKMHLMRKIDGL

SEQ ID NO: 111329 - protein, 222 aa, Unknown
  Bacterial polypetide isolated from the Sargasso Sea
AGLVGADGPTHAGSFDITYLATLPNFVVMAASDEAELVKMINTSVNINDKPSAFRYPRGNGVGVELPDIKDILKIGKGRVIKEGKKVALLNFGARLNECIKASSILENKGISTTIVDARFAKPLDKKLIMDLSINHEVLVTIEEGSIGGFGSHVMHMLSETGIFDRGLKIRSMILPDLFLDQDTPEQMYKKAGLDFDSIVEKVENALSSNVVIAKNKSKNIF

SEQ ID NO: 111330 - protein, 190 aa, Unknown
  Bacterial polypetide isolated from the Sargasso Sea
RAGLVGADGPTHAGSFDITYLSTLPNFVVMAASDEAELVRMINTSMDINDRPSAFRYPRGNGVGVKLPEITEKIELGKAKIIKEGKKVAVLNFGARLQECILASENLKKKGIDISIIDARFAKPLDENIIWQIATEHEVLITIEEGSIGGFGSHVSQFLSEKNLLDSNLKFRSMILPDRFIDHDKPRTYV

SEQ ID NO: 111331 - protein, 82 aa, Unknown
  Bacterial polypetide isolated from the Sargasso Sea
MQNYKYLNNINFPSDIKKLNNEELKVLSEEVRSEMIDAVSKTGGHLGAGLGVVELTVALHHVFDTPKDKLIWDVGHQSYPHK

SEQ ID NO: 111332 - protein, 202 aa, Unknown
  Bacterial polypetide isolated from the Sargasso Sea
MDSFHACNLKSPADLQGQSIEQLNRLCAEIRHALIEKVFQSGGHLGSNLGVVELTVALHKVFDFSRDKLVFDVSHQCYVHKMLTGRYQGFDQLRQTNGMSGFINRDESEYDLLTAGHAGTSISFAAGLAAGMKDCVDENDTPPWSVAFIGDAAFASGVAFEGLNQAAEAKSRMLVVLNDNEWSISKCVGAMARYLSRIRSSQ

SEQ ID NO: 111333 - protein, 192 aa, Unknown
  Bacterial polypetide isolated from the Sargasso Sea
MSVGHSSTSINASLGMNEANQLLKGNKTIFSVIGDGAMTAGLAFEGLMHAGHLGRNLNIILNDNDMSISKNKGGLSDYLAKVWASKSYKKLKSSGKKVLKNLPFGLHISRSLKDGLKSAVMPGNLFEDIGLHYIGPIDGHDVKLLVKTLERMKEKSEPYLLHIITKKGAGFEPAENERIKFHAISKIEKNPS

SEQ ID NO: 111334 - protein, 171 aa, Unknown
  Bacterial polypetide isolated from the Sargasso Sea
TPADENETRLMLSTGFNYKGPASIRYPRGVGPNVEVDEKLDTVEIGKARVINEAGKDKVILNFGSLLHIARQISEKFKFTLIDMRFVKPLDEEILNQYLKKADLFISIEDGSIMGGAGSAVQEFCSKNNINIESELFGIPDEFIEHASREEMLNNAGLSVDKISSRLKELI

SEQ ID NO: 111335 - protein, 140 aa, Unknown
  Bacterial polypetide isolated from the Sargasso Sea
MNKIEIKYLDKIKSPKDLDELNDEQLKDLASELRYDVIETVSKTGGHLGASLGVIELTIALHKIFDAPKDKIIWDVGHQSYPHKILTGRRDQMSTLRKKDGLSGFHKRDEKQYDHFGAGHSSTATSAGIGMSIGRDLKKR

SEQ ID NO: 111336 - protein, 110 aa, Unknown
  Bacterial polypetide isolated from the Sargasso Sea
RSESEYDVFGAGHAYTAIYAGLGMAVSRNLENDDFKVVSIIGDGALSGGLAFEALNNAGNIRKQMLVIVNDNDMSISPNVGAFRNYLVKIATNKQYNKLRRWIYRTIKKL

SEQ ID NO: 111337 - protein, 82 aa, Unknown
  Bacterial polypetide isolated from the Sargasso Sea
MLEQITCPADLRRLSPSELKKLSQEIRSFIVDTVETNGGHLGSNLGVVELTIALHRAFDSPRDILLWDTGHQAYVHKVLTGR

SEQ ID NO: 111338 - protein, 247 aa, Unknown
  Bacterial polypetide isolated from the Sargasso Sea
DNGRSYAPTVGRLSESLIRIRSNPTYMRRQRHLEDLAERLPWVGELVERGISATKAALREMFEPTAFFEALGVHYLGPFDGHDIPEMEDALTNAAEFEGPVVIHVLTQKGRGHAPAEQDPIKHMHDTGGVKPGSYTEAFTESLIKAAESRPEVVAITAAMPDSTGLLPFRDRFPERCFDVGIAEQHAVTAAAGMAMGGLRPVVALYATFLSRAFDQANLDVGLHGLPVVFCLDRAGITGDDGPSHHG

SEQ ID NO: 111339 - protein, 163 aa, Unknown
  Bacterial polypetide isolated from the Sargasso Sea
MNKDNSLLYTLDLPGDLKGLCKQDMETLASEIRQLLMEIGDECGGHLASNLGVVELTLALHSVFDSLNDKFVFDVSHQSYVHKIITDRLDKMFTIKQYGGLSGFSKMSESPYDVWGAGHASTALSAGLGMAQARDRMNDDYSVVSIVGDGSLSGGMCFEALNN

SEQ ID NO: 111340 - protein, 73 aa, Unknown
  Bacterial polypetide isolated from the Sargasso Sea
MVRLIKQINFPSDLRKFKKDNLRQISNELRDELIEVVSETGGHLGAGLGVVELTVALHYVFDTPKDKLVWDVS

SEQ ID NO: 111341 - protein, 245 aa, Unknown
  Bacterial polypetide isolated from the Sargasso Sea
VAYLGFTKRSESEYDPFGAAHSSTSISSALGIAIANKLSNKSDNVVAVIGDGAMSAGMAYEAMNNAGASKTKIIVILNDNDMSIAKPVGAMRAYLAKILSGKIYFSFRETIKLIISAFSKRFSKKAGKAEDFLRSVVTGGTLFSSMGFYYIGPIDGHDIDDLVSVLKNAKEINYDGPIMIHIKTEKGKGYEFAEKSDDKYHGVTKFNVNTGVQEKSKSSIPSYTKVFANTLIKHAEKDSKIIGVT

SEQ ID NO: 111342 - protein, 179 aa, Unknown
  Bacterial polypetide isolated from the Sargasso Sea
MDKKKETLLETLNLPDDIKGLCKQDMENLCQEIRDKLMEVKDECGGHLASNLGVVELTTALHAVFDSPKDKFVWDVSHQCYVHKMLTNRLDKIFTIKKHKGLSGFAKRDESPHDCFGAGHASTSLSAALGMAHARDIQGNDNSVIAIFGDAALSGGMAYEAINNIENMKKNFICILNDN

SEQ ID NO: 111343 - protein, 83 aa, Unknown
  Bacterial polypetide isolated from the Sargasso Sea
MSKTYKFLDDINFPSDVRKLSTSDLKTLADEVRSEMIDAVSVTGGHLGAGLGVVELTVALHYVFNTPNDKLIWDVGHQTYPHK

SEQ ID NO: 111344 - protein, 274 aa, Unknown
  Bacterial polypetide isolated from the Sargasso Sea
ATSAAGLAYGGLHPVVAVYATFLNRAFDQVLMDCALHNAGVTFVLDRAGVTGDDGPSHNGMWDMAMLGVVPGLHLSAPRDESTLRRALRESIAISDAPSVVRFAKGALGPDIPSLRAQGGVDVLFDHDQDEVDVLIVAIGSFCSVALDVAARLRDQGITTRVVDPRWALPISPDLVEMSRRGRRVVVIEDGVRLGGIGAGISQAMQDACVVAPTRLFGIPRTFLPHGKRQQILEHIGLSSQQISRDIVEWVAAEPAGSSTSEETQRPVPRTAGP

SEQ ID NO: 111345 - protein, 239 aa, Unknown
  Bacterial polypetide isolated from the Sargasso Sea
HGFKPAEADPVFFHTPAPFECDDDDCIVSIKKSSSKAYTNVASETISDCMSKNSQVTVLTAAMCQGNKLEKVREKFPDRFFDVGICESHAVAFAAGQAKAGARPIVDIYSTFLQRSFDQIFQEVCLQNLPVTFMLDRAGLTGPDGPTHHGAFDLGYMRLFPNMVVMAPGDEHDLKSMLPWALEHDGPVSLRYPKTVADSHAGKRDPIQLGKAEVLRDGSDGLIIACGTLLGAALEAAAS

SEQ ID NO: 111346 - protein, 163 aa, Unknown
  Bacterial polypetide isolated from the Sargasso Sea
RLMLSTGFNYKGPASIRYPRGVGPNVKVDEKLDTVEIGKARVINEAGKDKVILNFGSLLHIAREISEKFKFTLIDMRFVKPLDEQILNQYLKKADLFISIEDGSIMGGAGSAVQEFCSKNNINIKSELFGIPDEFIEHASREEMLNDAGLSLDKISSRLKELI

SEQ ID NO: 111347 - protein, 109 aa, Unknown
  Bacterial polypetide isolated from the Sargasso Sea
GTLISTSEEVAKELNASLLDMRFVKPLDKELIAEHSKGKKAIITIEDGAITGGAGSAVSEWAQENKISVQIVICGIPDEFIDHSSREEMIKVVGLDKDGILAKVKDFLS

SEQ ID NO: 111348 - protein, 262 aa, Unknown
  Bacterial polypetide isolated from the Sargasso Sea
SLSAMLGMAIATKESNPDKKHVAIIGDGAMTAGIAFEALSHTGHLKPNVLIILNDNDMSISENIGGLSNYFSRIWASKIYKGIKKGGRSFLKPLPQAFHLARKVETQMKAMVAPGTIFEELGLNYIGPIDGHNIKELINVISNLKEFDGPQFLHVITKKGAGLDPAEADRIGFHAIGKINSIKDEKTKQKKYQDIFGEWIVDMASQDKDLIGITPAMKEGSGLVMFSKKYPERYFDVAIAEQHSVTFAAGLAVENKKPCGCY

SEQ ID NO: 111349 - protein, 74 aa, Unknown
  Bacterial polypetide isolated from the Sargasso Sea
MLLSELSHPNQLHGLTVSQLEEIACQIRERHLQVVSTSGGHLGPGLGVVELTLALYQTLDLDFDKVVWDVGHQG

SEQ ID NO: 111350 - protein, 181 aa, Unknown
  Bacterial polypetide isolated from the Sargasso Sea
MDYELLDKINFPSDLREFKKKDLKQISEELRAKTIETVSKTGGHLGAGLGVIELTVAIHYVFNTPHDKLIWDVGHQTYPHKIITGRKKNIDTLRKKDGVYGFVRRSESEYDPFGTAHSSTAVSAGLGIKAAKDINKDNSKVICVVGDGALSAGLAYEGLNNAGAQKKGLIVILNDNKMSID

SEQ ID NO: 111351 - protein, 221 aa, Unknown
  Bacterial polypetide isolated from the Sargasso Sea
GLVGADGPTHQGVYDLTYLRMIPGMTIMVPRDGIELRMMIDFSYHYESGPIAVRYPRGNTVLTEQNEIPPIEMGRAHLLQDGTDIVLLAVGVMVEKAIQTANILEQEGFSVAIVNARFVKPLDQELILNLASNTNLVATMEENTILGGFGTAVTELLNQSGMTIPTLTFGIPDRYISQGTPEEQSFDAGLSSEQMSHGIRERYQQLPIRKKSLKLTRKKAS

SEQ ID NO: 111352 - protein, 306 aa, Unknown
  Bacterial polypetide isolated from the Sargasso Sea
MAKSVTVRAPCSTANLGPGFDVFGMALDALYDNVVLTKKGKGVVIVSSDDIPLSPSKNTAGLVVSAMKKKFKIKDGIEIKIKKNVPAGFGMGSSAASAAACAVGLNKLYNLKLTDAELVEFAGIGEKASAGTIHYDNVAASVLGGFVIVKTKPLQVVKIQPPNDLVLCVAVPELKVPAKKTKVSRGAIPKKVSLIDMVKNISNASAIAAGFSEKNSELIGRSVQDVIVEPARKHMIPGFDKVKKNAIDAGAYGVTISGAGPSVIAFTDKKHDSKKISNAMKRGFKAANKKSEIFICKPSKGPIIRK

SEQ ID NO: 111353 - protein, 113 aa, Unknown
  Bacterial polypetide isolated from the Sargasso Sea
LNFGALLEEAKVVCDNLDLTLIDMRFVKPLDSEMLLTYLNKANFFVSLEDGSIAGGAGSAVQEFCMEHNIEIRSKLFGIEDKFIEHASREEMLEEANLTSMKIERVLKNMLEI

SEQ ID NO: 111354 - protein, 102 aa, Unknown
  Bacterial polypetide isolated from the Sargasso Sea
MKYLDKINSPKDLKNIPKEELGEVCKELRTYIIDTINEIGGHLAPTLGAVEITTAVHYVFDAPRDKIVWDTGHQAYAHKVLTGRYSQFPTIKRYKGLSGFLK

SEQ ID NO: 111355 - protein, 110 aa, Unknown
  Bacterial polypetide isolated from the Sargasso Sea
MKYKYLDKINFPSDLRKLALTELEDLSKELRTKTIEAVSKTGGHLGAGLGVVELTIALHYVFNTPRDRLIWDVGHQSYPHKIITGRKNKIETLRQKNGLYGFVKRSESEY

SEQ ID NO: 111356 - protein, 257 aa, Unknown
  Bacterial polypetide isolated from the Sargasso Sea
TFLQRGWDQVVHDVALQKVPVRFAMDRAGLVGADGPTHAGAYDVTFMACLPDMVVMAPMNEAELCHMVATSLAIDDRPSCFRYPRGAGTGVNMESESVQILDPGLKGMVLDIGKGRVLREGTDVVLLGYGTPTTNCLLAAQLLQDFGVSATVADARFCKPLDVELIRRLAKSHPVFITVEEGSIGGFSSHVLHFLATDGLLDGGLKVRPMVLPDRPIDHGSYSFQLNEAGLSASHIASTALSLVGKQHESLEVLAKL

SEQ ID NO: 111357 - protein, 63 aa, Unknown
  Bacterial polypetide isolated from the Sargasso Sea
MYKYLDKINFPSDLKKLKKSELKVLSEEVRKEMINAVSETGGHLGAGLGVVELTVALHYVFET

SEQ ID NO: 111358 - protein, 186 aa, Unknown
  Bacterial polypetide isolated from the Sargasso Sea
PSCPEICQDMLHTGYLYPGPAIVRYPKESVEELPNKKEFQKIEIGKAKEIIKGKNIVFLCFGTLLDKAKIIAEKYNCSCIDMRFVKPLDEQLIKKYAKDNSLIISIEDNMLAGGAGSAVLEFLSKEEIKIDFLSFGSKDEFPQHASRDEQLIDSNISEENIEKLVKEYIKNNNLLSISDSSNIKDD

SEQ ID NO: 111359 - protein, 306 aa, Unknown
  Bacterial polypetide isolated from the Sargasso Sea
GKSNGSTNKITKQEEVPSFQDAFGYLSCEIAENRKDTVCITAAMREGTGLVPFEKKFPDRYYDVGIAEGHAVTFSAGLATQGIRPIVAIYSTFLQRAFDHIVHDVSVQNLPVIFCMDRSGIAGEDGPTHHGALDIPYFRCIQGMILTAPKNGNELRNLLYTALNHNGPFGIRYPKFSSLEFDRNGQADLLPLGSWEVEKKGEDLLILAVGPMVYSALSVATDLDQESIFCEVVNCRFVKPMDTAYLNSIIKRGFDKIITIEEGVINGGFGDGVSSYLLENGYTGVIKRLGLPDSYVEHGSRNQILN

SEQ ID NO: 111360 - protein, 267 aa, Unknown
  Bacterial polypetide isolated from the Sargasso Sea
SEYDPFGAAHSSTSISSALGIAVANKLSINPSNIIAVIGDGAISAGMAYEAMNNAGASKTKMIVVLNDNDMSIAKPVGAMRKYLAKILSGKIYFSFRETFKLIISAFSKRFKNKAGKAEDFLRSAVTGGTLFNSMGFYYIGPIDGHDIDTMVSVFNNAKDIDYDGPILIHVKTEKGKGYTFAEKSEDKFHGVSKFNIKTGEQLKSISKIPSYTKVFANSLIKHAEKDSKVVGITAAMPSGTGMDLFGKKFPDRMFDVGIAEQHAVTF

SEQ ID NO: 111361 - protein, 153 aa, Unknown
  Bacterial polypetide isolated from the Sargasso Sea
MKKKYELLDEINFPSDLKKLPESKLQKVADELREEMIDAVSVTGGHLGASLGVVELTVALHYIFNTPNDKLIWDVGHQCYPHKILTGRKDRIRTLRQGNGLSGFTKRSESEYDPFGAAHSSTSISSALGIAEANKLSNKSDNVIAVIGDGAIS

SEQ ID NO: 111362 - protein, 258 aa, Unknown
  Bacterial polypetide isolated from the Sargasso Sea
GSINKQLIVILNDNDMSIDKPVGAMSSYLSKLLSSKSYSSIRSIIKKVSRKFPKTFAKMMYRTEEFSKGFITGGTLFEELGFFYLGPIDGHNFNNLIPILQNIKLSKLEKPIFLHVITKKGKGYPPAEQAHDKFHGVNKFDINSGSPLTKSNSKTYSKIYGETLTQEAEKDESIVAVTAAMKSGTGLDKFSKKFPKRFFDVGIAEQHAVTMCAGLATEGLKPFATIYSTFLQRAYDQIVHDVALQKLPVRLLLIEQDK

SEQ ID NO: 111363 - protein, 154 aa, Unknown
  Bacterial polypetide isolated from the Sargasso Sea
MSKKYKYLDNVNFPSDLKKLSQSELRVLADEVREELIETVSETGGHLGAGLGVVELTVVLHYIFNTPNDKLIWDVGHQTYPHKILTGRKDRIRTLRKGDGLSGFTKRSESEYDTFGAAHSSTSISSALGIAVANKLSNKTDNVIAVIGDGAISA

SEQ ID NO: 111364 - protein, 322 aa, Unknown
  Bacterial polypetide isolated from the Sargasso Sea
VSETGGHLGAGLGVVKLTVALHYVFDTPNDKLIWDVGHQSYPHKILTGRKDKIRTLRQGDGLSGFTKRSESEYDPFGAAHSSTSISSALGIAEANKLDNKSSNVIAVIGDGAISAGMAYEAMNNAGASKTKMIVILNDNDMSIAKPVGAMRTYLAKLFTGKIYFSLRETLKLITSAFSKRFSAKAGKAEDFFRSAVTGGTLFSSLGFYYAGPIDGHDLSSLVPILKNAKESRHEGPIMIHIKTQKGKGYSYAEKANDHYHGVSKFNVKTGEQVKSKSNLPTYTKVFANTLVKHAKKDSKIVGITAAMPGGTGMDILGRSFQI

SEQ ID NO: 111365 - protein, 252 aa, Unknown
  Bacterial polypetide isolated from the Sargasso Sea
LTLRSYLFTFLQRAYDQVVHDVAIQSLPVRFAIDRAGLVGADGPTHAGSFDITYLTTLPNFIVMAASDEAELVKMINTSIDINDRPCAFRYPRGNGLGVELPSIDEKLIVGKGKVVREGKKVAIVNFGARLNDIFKSSEILQKKGINLTIVDARFAKPLDENLLWQVANEHEILITVEEGSIGGFGSHVSKFLTDKNLLDNNLKLRNMVLPDKFIDQDKPEQMYKIAGLDFLNIVDKVLETLNSKVIIKKTN

SEQ ID NO: 111366 - protein, 323 aa, Unknown
  Bacterial polypetide isolated from the Sargasso Sea
LREFLLYSVSQSGGHFGAGLGAIELTIALHSILNLPDDKIVWDTGHQAYPHKILTGRKDKMHLMRKLNGIAAFPSITESVYDAMSVGHSSTSISAALGMNEANLSKDSKKNVFAVIGDGAMTAGIAFEAMMHAGHLDNNLKIILNDNDMSISKNKGGLSDYLAKIWASKSYKKLKSSGKSVLNKLPYALHISRNLKDGIKSAIMPGNLFEDIGINYIGPIDGHDIELLQKTINRMMEKDSPYLLHIITKKGAGFIPAEEERIKYHAISKIEPEKNSSKPKFQDIFGDWLCDKAETDKSLVGITPAMKEGSGMVNFEKEYPERF

SEQ ID NO: 111367 - protein, 293 aa, Unknown
  Bacterial polypetide isolated from the Sargasso Sea
ELLDNINYPSDLRKLSKNQLDQVSKELRSELINVVSETGGHLGAGLGVVELTVALHYVFNTPKDKLVWDVGHQCYPHKLITGRRDRIRTLRKGGGLSGFTKRSESEYDPFGAAHSSTSISSTLGMATAKKLSNDKNNVVAVIGDGAMSAGMAYEAMNNAGAMKSKLIVVLNDNDMSIAPPVGAMSKYLARLLSGKIYFSFRETIKLILSAFSRRFSKSAGKAEDLLRSAVTGGTLFSQLGFYYIGPIDGHDVNNLVTILENAKNSNHQGPILIHAITKKGKGYKPAEESGDKY

SEQ ID NO: 111368 - protein, 289 aa, Unknown
  Bacterial polypetide isolated from the Sargasso Sea
DVGHQAYPHKILTGRKNQISSIRSKDGLAPFPSRNESDFDAFGAGHSSTSISSAVGMAIANKLNEGEKKTVAVIGDGAMTAGMAFEAMQHAGGIKPDMLIILNDNDMSISENVGGLNNYFSRIWASKLYKGIKSNGKKFLKNIPAAHHLARTVETHMKTMVAPGAIFEELGLNYIGPIDGHDIDQLLNVIGNLKNFEGPQFLHIITKKGAGYDLAEEDRIKYHAISKTNTSKNIGKTKPKYQDIFSNWIVDMAREDIDLVAITPAMREGSGLVEFSKEFPERYFDVAIA

SEQ ID NO: 111369 - protein, 222 aa, Unknown
  Bacterial polypetide isolated from the Sargasso Sea
MKKNYQFLNNINFPSDLRKVSENNLQKVADEVREEMISAVSETGGHLGAGLGVVELTVALHYVFDTPNDKLIWDVGHQSYPHKILTGRKDKIRTLRQGDGLSGFTKRSESEYDPFGAAHSSTSISSALGIAEANKLENKSSNVIAVIGDGAISAGMAYEAMNNAGASKTKMIVILNDNDMSIAKPVGAMRTYLAKLFTGKIYFSLRETLKLITSAFSKRFSA

SEQ ID NO: 111370 - protein, 276 aa, Unknown
  Bacterial polypetide isolated from the Sargasso Sea
MSISKPVGAMRKYLAKILSGKVYFSFRETLKLIISAFSKRFKNQAGKAEDFLRSAVTGGTLFNSMGFYYIGPIDGHDIDSMVSVFNNAKDINYDGPILIHVKTEKGKGYSFAEKSEDKFHGVSKFNVKTGEQEKSKSNTPSYTKVFANSLIKHAEKDSKVIGITAAMPSGTGMDLFGKKFPERMFDVGIAEQHAVTFAAGMATEGYKPYAAIYSTFLQRAYDQVVHDVAIQSLPVRFAIDRAGLVGADGPTHAGSFDITYLSTLPNFVVMAASDEA

SEQ ID NO: 111371 - protein, 296 aa, Unknown
  Bacterial polypetide isolated from the Sargasso Sea
KPVFLHCITKKGKGYSPAEKSEDKFHGVEKFDINTGNSVKKTNLKSYSNVFGEKLTKLAKNDEKIVAITAAMMSGTGLKLFQQNFEKRFFDVGIAEQHAVTMAAGLATEGFKPFVAIYSTFLQRAYDQIVHDVAIQKLPVRFAIDRAGLVGSDGPTHAGSFDITYLATLPNFIVMAPSNQRELSNMIELSCEINDTPSAFRFPRGTGSDELFNNQPTDISIGKGYILIEGNDVAILNLGTRLEKCIEASKFLNQNNIYPTIADARFAKPLDTQLIDDLLNNHKYILTIEEGSIGGF

SEQ ID NO: 111372 - protein, 309 aa, Unknown
  Bacterial polypetide isolated from the Sargasso Sea
KKLSKKILHKIDESLKALLVPGVLFDELGFRYFGPIDGHDINELVKALNNIKNINQPVLLHIITKKGKGLVSTREDNGEYHRDAVKFHAVKPNSTNGELKKSKKKIIPSFQDVFGYLSCEVARNRDDTICITAAMREGTGLVPYAKEFPNRYYDVGIAEGHGVTFSAGFATEGLRPIVAIYSTFLQRAFDHIVHDVAIQHLPVIFCMDRSGIAGEDGPTHHGSLDIAYLRCIQDMIVTAPRNGNEFRHLLYSALNQTKSPFSIRYPKSSSVVFDIDGQAELLPIGSWEVLRSGSDIAVLCVGSLSYDVE

SEQ ID NO: 111373 - protein, 338 aa, Unknown
  Bacterial polypetide isolated from the Sargasso Sea
MSKELREELIEAVSFTGGHLGAGLGVVELTVALHHVFDTPNDKIVWDVGHQSYPHKILTGRKNRIKTLRQGNGLSGFTKRSESEYDPFGAAHSSTSISAALGIATANKLSKKSENVVAVIGDGAISAGMAYEAMNNAGISKTKMIVILNDNDMSIAEPVGAMRSYLAKLLTGKIYFSLRETFKLIISAFSKRFSKKAGKAEDFLRSAVTGGTLFNSLGFYYVGPIDGHDIDTLVSVLKNAKDTNFDGPIMIHIKTEKGKGYQFAENSKDKYHGVSKFNIKTGVQEKSSSKIPSYTSVFANTLIKHAERDSKIIGITAAMPSGTGMDLFAKKFPNRMFD

SEQ ID NO: 111374 - protein, 314 aa, Unknown
  Bacterial polypetide isolated from the Sargasso Sea
NILKDLSLGGTLFEELGFYYLGPIDGHNIDDMVSVLENIRDNKFDKPVFLHCITKKGKGYSPAEKSEDKFHGVEKFDINTGNSVKKTNLKSYSNVFGETLSKLAENDEKIVAITAAMMSGTGLKLFQKNFEKRFFDVGIAEQHAVTMAAGLATEGFKPFVAIYSTFLQRAYDQIVHDVAIQKLPVRFAIDRAGLVGSDGPTHAGSFDITYLATLPNFIVMAPSNQRELSSMIELSCEINDTPSAFRFPRGTGSEELFNNQPTDISIGKGYILSEGNDVAILNLGTRLEKCIEAIKFLNQIIFILLLQMPDLQNH

SEQ ID NO: 111375 - protein, 288 aa, Unknown
  Bacterial polypetide isolated from the Sargasso Sea
QTYPHKILTGRKDAMESMRQNNGLAPFPVRSESEYDTFGVGHSSTSISAALGMITGAEKKNEKRHVTAVIGDGAMTAGMAYEALAHAGSIDKNLLVILNDNQMSISENIGGLRNYLARIWASKTYNRIREGGKNVLTYVPRAKEFARKAEIHAKGMVAPGSLFEELGFEYFGPVDGHDTNGLINILDDLKHINGPKFLHVITTKGKGFAPAEDDPIGFHAINKIKQEDLVNDKNAQSKKPSYSKIFGEWLSYKANKDEKLVAITPAMGEGSGMIEFSAEFPDRYYDVA

SEQ ID NO: 111376 - protein, 178 aa, Unknown
  Bacterial polypetide isolated from the Sargasso Sea
MKIFSEIPNKIPSTELLDKINYPEDLKELSPRDLKILADELREFLLYSVGKSGGHLGAGLGVVELTIVLHYLYDSPSDNIVWDVGHQAYPHKILTGRKNQISSIRSKDGLAPFPSRNESDFDAFGAGHSSTSISSAVGMAIANKLNEEEKKTVAIIERWCNDCRNGFRSNATCWRHKA

SEQ ID NO: 111377 - protein, 317 aa, Unknown
  Bacterial polypetide isolated from the Sargasso Sea
VKTNNVIAVIGDGAMSAGMAYEAINNAGALNTNLLVILNDNDMSIAPAVGALSNYLSNVVSSRPFNNVREIAKQMVNFLPKEIGETAKRAENLARNFLGNSEGTIFSHMGMSYLGPIDGHDVKSMVKILENLKNSTQNEPVLLHIVTEKGKGHPFSKVSHEKYHAVSQFNVVTGDTVKSISNAPTYTNVFSETLCKIAKKDKKVLAITAAMPSGTGLNKFADEFRDRFYDVGIAEQHAVTFAAGMASEGLKPFVAIYSTFLQRAYDQIIHDVVIQNLPVRFMLDRAGFVGADGATHSGSFDLAYLCCLPNGSCYGTK

SEQ ID NO: 111378 - protein, 172 aa, Unknown
  Bacterial polypetide isolated from the Sargasso Sea
MDEKLLDKINYPADLRLLKKNQLEQVAKELRSEVINVVSETGGHLGAGLGVVELTIALHYVFNTPKDKLVWDVGHQCYPHKIITGRKDRIRTLRKGGGLSGFTKRSESEYDPFGAAHSSTSISSTLGMATAKRLSNDNNNVIAVIGDGAMSAGMAYEAMNNAGAMKSKLIVI

SEQ ID NO: 111379 - protein, 298 aa, Unknown
  Bacterial polypetide isolated from the Sargasso Sea
GIKPDMLIILNDNDMSISENVGGLNNYFSRIWASKLYKGIKNNGKKFLKNIPAAHHLARTVETHMKTMVAPGAIFEELGLNYIGPIDGHDIDQLLNVIGNLKNFDGPQFLHIITKKGAGYDLAEDDRIKYHAISKTNVSKNKGKTKLKYQDIFSDWVVDMARKDSDLVTITPAMREGSGLVEFSKEFPERYFDVAIAEQHAVTLSAGLACEKKKPVVAIYSTFLQRAYDQLIHDVALQNLDVTFAIDRAGLVGEDGPTHSGNYDLVYLRCIPNMIVMTPSDENETRKLLTTGFFHNGP

SEQ ID NO: 111380 - protein, 294 aa, Unknown
  Bacterial polypetide isolated from the Sargasso Sea
VKQKYKFLQNINFPSDIKKLSQSELKILAREVREEMIDAVSETGGHLGAGLGVVELTVALHYIFNTPNDKLIWDVGHQSYPHKILTGRKDKMRTLRKGNGLSGFTKRTESEYDPFGAAHSSTSISSALGIAIANKLSNKSDNVVAVIGDGAISAGMSYEAMNNAGSSKTKMIVILNDNDMSIAKPVGAMRTYLAKILSGKIYFSFRETVKLIISAFSKRFSNKAGKAEDFLRSAFTGGTLFNSMGFYYIGPIDGHDLDALVPVLKNAKEINIEGPIMIHLKTQKGKGYEFAEKS

SEQ ID NO: 111381 - protein, 160 aa, Unknown
  Bacterial polypetide isolated from the Sargasso Sea
MKIFKEIPIHEPSTPLLDDINIPADIRSLSVNELEVLANELREFLLYSVGQSGGHLGGGLGVIELTIVLHHIFNTPYDNLVWDVGHQAYPHKIITGRKKEIQTIRKKDGLAPFPSRKESKYDAFGVGHSSTSLSALLGMAIATKESNPDKKHVAVIGDGA

SEQ ID NO: 111382 - protein, 315 aa, Unknown
  Bacterial polypetide isolated from the Sargasso Sea
KGYPYAEADQVGYHAQSAFDLTTGKSIPSKKPKPVSYSKIFGQTLLKICEQDSKVVGITAAMATGTGLDILQRNIPDQYIDVGIAEQHAVTLAAGMSCDGLKPVVAIYSTFLQRAFDQLIHDVGIQNLPVSFVLDRAGIVGADGPTHQGQYDISYMRSIPNFVLMAPKDESELQRMLITSINHNGPTALRIPRGSGLGVAVMDEGWEPLNIGEAEILEEGEDILIIAYGSMVASAIETARILKNMNINACLINARFVKPLDKNLIMPLASRIQKVVTMEEGTLIGGFGSAIVELLNDNEINIPVYRIGIPDVLVD

SEQ ID NO: 111383 - protein, 199 aa, Unknown
  Bacterial polypetide isolated from the Sargasso Sea
MKIFSEIPTKKPETPVLDKVNVPADMKNLTSLELKALADDVRAHMLFSVGQSGGHLGGGLGVVELTVVLHYLYNAPDDKILWDVGHQAYPHKILTGRKESLVTIRQKDGLAPFPSREESPYDAFGVGHSSTSISAALGMAIANKDSDKKVVAVIGDGAMTAGMAFEALSHTGHIKPNMLIILNDNDMSISENVGGLNNY

SEQ ID NO: 111384 - protein, 357 aa, Unknown
  Bacterial polypetide isolated from the Sargasso Sea
HSSTSISSALGIAIANKLSNKSDNVIAVIGDGAISAGMSYEAMNNAGGSKTKMIVVLNDNDMSIAKPVGAMRTYLAKILSGKIYFSFRETVKLIISAFSKRFSNKAGKAEDFLRSAVTGGTLFNSMGFYYIGPIDGHDIDALISVLKNAKEINIEGPIMIHIKTQKGKGYEFAEKSKDKYHGVSKFNINTGIQEKSKSNLPAYTKVFANTLVKHAEKDSKIVGITAAMPSGTGMDIFGEKFPSRMFDVGIAEQHAVTFAAGLATEGYKPYAAIYSTFLQRAYDQVVHDVAIQSLPVRFAIDRAGLVGADGPTHAGSFDTTYLSTLPNFICMAASDEAELVRMINTSVDINDNPSAFR

SEQ ID NO: 111385 - protein, 283 aa, Unknown
  Bacterial polypetide isolated from the Sargasso Sea
MNYKHLDKINFPSDMRKLSIVELEKLSNELRDKTIETVSKTGGHLGAGLGVVELTIALHYVFNTPRDRLIWDVGHQSYPHKILTGRKHKIETLRQKNGLYGFVKRSESEYDPFGTAHSSTSISAGMGMKVAKDLNKDDAKIICVIGDGALSAGMAYEALNNVGASNKQIIVILNDNEMSIDRPVGAMSNYLTKLLSSKQYTNVRTLLKKISSKLSNSVSKTLYKAEEFSKSLVTGGTLFEELGFYYLGPIDGHDIKTLVPVLENIKNLSIEKPIFLHCVTKKG

SEQ ID NO: 111386 - protein, 189 aa, Unknown
  Bacterial polypetide isolated from the Sargasso Sea
MTQKSTFLKDINFPSDLKKISEKDLPKVANEVRSEMIDAVSQTGGHLGAGLGVVELTVALHYVFDTPNDKLIWDVGHQSYPHKILTGRKNKIRTLRQGDGLSGFTKRTESEYDPFGAAHSSTSISSALGIAEANKLENKSSNVIAVIGDGAISAGMAYEAMNNAGVSKTKIIVILNDNDMSIAKPVGAM

SEQ ID NO: 111387 - protein, 300 aa, Unknown
  Bacterial polypetide isolated from the Sargasso Sea
AGASKTKIIVILNDNDMSIAKPVGAMRSYLAKILSGKIYFSLRETIKLIISAFSKRFSKKAGKAEDFLRSAVTGGTLFNSMGFYYVGPIDGHDIDALLPVLQNARDVNYQGPIMIHVKTQKGKGYSFAEKSDDKYHGVSKFNVNTGQQEKSKSSKPSYTKVFANTLVEHAKKDSKIIGITAAMPSGTGMDIFGKNFPNRMFDVGIAEQHAVTFAAGLATEGYKPYAAIYSTFLQRAYDQVVHDVAIQSLPVRFAIDRAGLVGADGPTHAGSFDITYLSTLPNFVVMAASDEAELVKMINT

SEQ ID NO: 111388 - protein, 364 aa, Unknown
  Bacterial polypetide isolated from the Sargasso Sea
DNIESPEDLKKLTIDELEVLADELREYLLYSVRQTGGHFGAGLGAIEITIALHYLLDMPSDKIVWDTGHQAYPHKILTGRRDKMHLIRKIDGLAAFPSIKESEFDAMSVGHSSTSISAALGMDEASKHQKNNKNIFSVIGDGAMTAGIAFEAMMHAGHLNNNLKIILNDNDMSISKNKGGLSDYLAKIWASKSYKKLKSSGKKVLKNLPYGLHITRNLKDGIKSAVMPGNLFEDLGLHYVGPIDGHDIPLLIKTINRMMEKNEPYLLHVITKKGAGFEPAENERIKFHAISKIENTPAPKKTKFQDIFGDWLCHKAKQDSKLVGITPAMKEGSGMVNFEKEFPDRFYDVAIAEQHAVTFSAGVS

SEQ ID NO: 111389 - protein, 260 aa, Unknown
  Bacterial polypetide isolated from the Sargasso Sea
FSERYPSRCFDVGIAEQHAVTFSAALAAGGMKPFCAIYSTFLQRGYDQVVHDVAIQRLPVRFAIDRAGLVGADGATHAGSFDISFLANLPGFVVMAPSDEAELIHMVQTAAEYSEGPIALRYPRGEGVGVELPNAGDLLEIGKGRVINNGNKVAILSFGTRLKEVLKASELLRPMGFDITVADARFAKPLDHDLIQLLCSEHEVIITVEEGAVGGFGSHVAQHIAEKGFLDRGLKFRSMFLPDVFIDQASQSDMYNVAKM

SEQ ID NO: 111390 - protein, 248 aa, Unknown
  Bacterial polypetide isolated from the Sargasso Sea
MIKNYQYLDKVDFPSDIKNLKQSELKILAKEVREEMIDAVSVTGGHLGAGLGVVELTIALHYVFDTPNDKIIWDVGHQTYPHKILTGRKDKIKTLRQGNGLSGFTRRAESEYDPFGAAHSSTSISAALGIATANKLEKKSNQVVAVIGDGAISAGMAYEAMNNAGSSKTKMIVILNDNDMSIAKPVGAMSTYLAKILSGKIYFSLRETFKLIISAFSKRFSDKAKKAEDFLRSAVTGGTLFNSLGFLL

SEQ ID NO: 111391 - protein, 331 aa, Unknown
  Bacterial polypetide isolated from the Sargasso Sea
MKIFKEIPTELPNTPLLDSVDYPSDLRSFSINELETLASELREFLLYSVGQSGGHLGGGLGVIELTIILHHLYNTPYDNLVWDVGHQAYPHKILTGRKDRIMSIRKKDGLAPFPSRSESEYDTFGVGHSSTSLSALVGMAEATKNSNPDKKHVAVIGDGAMTAGMAFEALSHIGHLKPNLLVILNDNDMSISENVGGLSNYFSRIWASKTYKGIKKSGSSFLKPLPQAYHLARKVETQMKAMVAPGTIFEELGLNYIGPIDGHNLKELKDVISNLKEFEGPQFLHVITKKGAGLDSAEADRIGFHAIGKINAIKDKKLSKKNIKIYLANGL

SEQ ID NO: 111392 - protein, 246 aa, Unknown
  Bacterial polypetide isolated from the Sargasso Sea
MNEKLLDKINYPSDLRKLKKKQLDQVSKELRSELINVVSETGGHLGAGLGVVELTVALHYVFNTPKDKLVWDVGHQCYPHKIITGRKDRIRTLRKGGGLSGFTKRSESEYDPFGAAHSSTSISSTLGMATAKKLSNDKNNVIAVIGDGAMSAGMAYEAMNNAGAMKSKLIVVLNDNDMSIAPPVGAMSKYLARLLSGKIYFSLRETIKLILSAFSRRFSKSAGKAEDLLRSAVTGGTLFSQSRILL

SEQ ID NO: 111393 - protein, 299 aa, Unknown
  Bacterial polypetide isolated from the Sargasso Sea
NYEFLDNINFPDDVRKLSQSDIKILADEVRQELIDVVSETGGHLGAGLGVVELTVVLHYIFNTPHDKLIWDVGHQTYPHKILTGRKKQIRTLRKGEGLSGFTKRSESEYDPFGAAHSSTSISSALGIAVANKLSNKSGNVIAVIGDGAISAGMAYEAMNNAGGNKTKIIVVLNDNDMSISKPVGAMRKYLAKILSGKVYFSFRETFKLIISAFSKRFKNQAGKAEDFLRSAVTGGSLFNSMGFYYIGPIDGHDIDSMVSVFNNAKDINYDGPILIHVKTEKGKGYSFAEKSEDKFHGVS

SEQ ID NO: 111394 - protein, 348 aa, Unknown
  Bacterial polypetide isolated from the Sargasso Sea
LNDNDMSMQKPVGAMRTYLAKLFTEKIYFSLRETFKLITSAFSKRFSAKAVKAEDFLRSAVTGGTLFNSLGFYYAGPIDGHDLTTLVPILKNARDSKHEGPIMIHIKTQKGKGYSYAEKATDHYHGVSKFNVETGEQVKSSSNLPAYTKVFANTLVKHAQRDSKIVGITAAMPDGTGMNIFGKEFPKRMFDVGIAEQHAVTFSAGLATEGYKPYAAIYSTFLQRAYDQVVHDVAIQSLPVRFAIDRAGLVGADGSTHAGSFDITYLSTLPNFIVMAASDEAELVKMINTSVDINDRPSAIRYPRGTGIGIELPSIDEKIEIGRGRIIQEGKQACILSLGTRLEECKMA

SEQ ID NO: 111395 - protein, 284 aa, Unknown
  Bacterial polypetide isolated from the Sargasso Sea
ICNTLVQHAKKDSKIVAITAAMPDGTGLDIFRKEFPERTFDVGIAEQHAVTFAAGLATENYKPYAAIYSTFLQRAYDQVVHDVAIQSLPVRFAIDRAGLVGADGPTHAGSFDITYLSTLPNFVVMAASDESELVRMINTSTKINDRPCAFRYPRGTGLGAVLPSINEKIEIGKSKIIQEGKKLAILNFGARLNETLKASENLKKKGVNITIVDARFAKPLDENLIWQLAITHEAIITIEEGSIGGFGSHVVDFLSKKGLMDTNLKFRSMILPDIFIDQDTPEHM

SEQ ID NO: 111396 - protein, 208 aa, Unknown
  Bacterial polypetide isolated from the Sargasso Sea
MKIFKEIPTELPNTPLLDSVNYPSDLRSFSINELETLANELREFLLYSVGQSGGHLGGGLGVVELTIILHYLYDTPYDNLVWDVGHQAYPHKILTGRKDKIMSIRKKDGLAPFPSRSESEYDTFGVGHSSTSLSALVGMAEATKNSNPDKKHVAVIGDGAMTAGIAFEALSHIGHLKPNLLVILNDNDMSISENVGGLSNYFSRIWAS

SEQ ID NO: 111397 - protein, 242 aa, Unknown
  Bacterial polypetide isolated from the Sargasso Sea
MSKYKLLNNVNFPSDIKKFSNSDLKILSKEIREKMIEAVSKTGGHLGAGLGVVELTVALHYIFDTPKDKIIWDVGHQSYPHKILTGRKDKIETLRTGGGLSGFTKRDESEYDPFGAAHSSTSISAALGIATANKLSNKSEDVVAVIGDGALSAGMAYEAMNNAGTSKTKMIVVLNDNDMSIAKPVGALRTYLAKILSGKIYFNLRETIKLIISSFSKRFMKKAGQAEDFFRSAVTGGTLFNS

SEQ ID NO: 111398 - protein, 267 aa, Unknown
  Bacterial polypetide isolated from the Sargasso Sea
GAGLGVVELTVALHYVFDTPKDKLVWDVSHQCYPHKIITGRRDRIKTLRKGGGLSGFTKRTESEYDPFGAAHSSTSISSTLGMSVAKKLNNNKNNVIAVIGDGAMSAGMAYEAMNNAGALKSNLIVVLNDNDMSIARPVGAMSKYLANLLSGKLYFSFRETIKMIISAFSKRFSQKAGKAEDMLRNMVTGGTLFSELGFYYIGPIDGHDVENLVQIFENVKNSTHQGPVLIHVRTQKGKGYKPAEDSGDKYHGVTKINVSTGEQSKS

SEQ ID NO: 111399 - protein, 281 aa, Unknown
  Bacterial polypetide isolated from the Sargasso Sea
SKTKIIVILNDNDMLIAKPVGAMRTYLAKILSTKLYFSFRETVKLIISAFSKRFSKKAGKAEDFLRSAVTGGTLFNSLGFYYIGPIDGHDINDLVAVLKNAKDINHDGPIMIHIKTEKGKGYEFAEKSDDKYHGVTKFNVKTGVQEKSKSNVPAYTKVFANTLVKHAEKDSKIIGITAAMPSGTGMDIFGKKFPTRMFDVGIAEQHAITFAAGLATEGYKPYAAIYSTFLQRAYDQVVHDVAIQSLPVRFAIDRAGLVGADGPTHAGSFDTTYLATLPNFI

SEQ ID NO: 111400 - protein, 236 aa, Unknown
  Bacterial polypetide isolated from the Sargasso Sea
MKIFSEIPSKPPKTPILDKVNLPEDVKNLSPIELETLADDVRAYMLYSVGQSGGHLGGGLGVVELTVVLQYLYNSPDDKIIWDVGHQAYPHKILTGRKDALTSIRHKNGLAPFPNRAESQYDAFGVGHSSTSISAALGMAIANQDTNKKVVAIIGDGAMTAGMAFEGLAHAGHIKPNMLIILNDNDMSISENVGGLNNYFSRIWASKVYKGIRKSGKSFLENLPQAHHIARKVETK

SEQ ID NO: 111401 - protein, 202 aa, Unknown
  Bacterial polypetide isolated from the Sargasso Sea
MCSKRFRQIEGYGAISTKPATPLLDTVNVPAHLKSMDMDQLKQVAKELRADLIYNVSQTGGHLGSSLGVIELTVALNYVFDQPEDRIIWDVGHQAYPHKMLTGRRDRMTTMRQTDGLSPFTKRSESAYDCFGAGHSSTSISAGLGMAVARDMQGRSNHVISIIGDGAITGGMAYEAMNNAGYLDNNMIIVLNDNQQVSLPTQ

SEQ ID NO: 111402 - protein, 102 aa, Unknown
  Bacterial polypetide isolated from the Sargasso Sea
MKIFKEIPIKKPATPLLDAIDFPSDIRSFSINELEILANELREFLLYSVGQSGGHLGGGLGVIELTITLHYIFNTPYDNLVWDVGHQAYPHKILTGRKDKIQ

SEQ ID NO: 111403 - protein, 261 aa, Unknown
  Bacterial polypetide isolated from the Sargasso Sea
DLKILADELREFLLYSVGKSGGHLGAGLGVVELTIVLHYLYDAPLDNIIWDVGHQAYPHKILTGRKNQINSIRSKDGLAPFPSRNESDFDTFGAGHSSTSISSAVGMAIANELNEGEKKTVAVIGDGAMTAGMAFEAMQHAGGVKPDMLIILNDNDMSISENVGGLNNYFSRIWASKLYKGIKSNGKKFLKNIPAAHHLARTVETHMKTMVAPGAIFEELGLNYIGPIDGHDIDQLLNVIGNLKNFEGPQFLHIITKKGAG

SEQ ID NO: 111404 - protein, 245 aa, Unknown
  Bacterial polypetide isolated from the Sargasso Sea
FAAGLACEGMKPFCALYSTFLQRGYDQLVHDVAVQNLPVRFAIDRAGLVGADGATHAGVYDLAYLSCLPNIVIMCPSDESELFHMVATAAEYDDGPSALRYPRGEGVGCTIPDAAEVLAIGKGRIVRKGSGLAILSLGTRLNASIEAADLLAGNGMSVTIADARFAKPLDTDLIDDLAVTHGSLLIVEEGSPGGFSAHVMTYLANQGHLDGLLKVRALTLPDKFIDHDSQTGQLASAGLDTDGIY

SEQ ID NO: 111405 - protein, 212 aa, Unknown
  Bacterial polypetide isolated from the Sargasso Sea
MKNYQYLDKVNFPSDIKKLSIDELKILSKEIREEMIEAVSVTGGHLGAGLGVIELTVALHYVFDTPNDKLIWDVGHQTYPHKIITGRKDKIRTLRQGNGLSGFTKRSESEYDPFGAAHSSTSISSALGIAVANKLSNKSNNVVAIIGDGAISAGMAYEAMNNAGISKTKMIVVLNDNDMSIAKPVGAMRLYLAKLLSGKLYFSLRETLKLII

SEQ ID NO: 111406 - protein, 83 aa, Unknown
  Bacterial polypetide isolated from the Sargasso Sea
MLLSELSHPNQLHGLTVSQLEEIACQIRERHLQVVSTSGGHLGPGLGVVELTLALYQTLDLDFDKVVWDVGHQAYPHKLITGR

SEQ ID NO: 111407 - protein, 318 aa, Unknown
  Bacterial polypetide isolated from the Sargasso Sea
DSLLPVLKNIKKNNIDKPIFLHCITKKGKGYAPAEESEDKFHGVNKFDLKTGESISISNKKTYSEIFGETLSKFADNDEKVLAITAAMTSGTGLNIFNKNHKEKLFDVGIAEQHAVTMSAGLATEGFKPFVAIYSTFLQRAYDQIVHDVAIQKLPVRFAIDRAGKVGADGPTHAGSFDIAFLSTLPNFILMAPSNQNELIRMMNTSLLINDRPSAFRYPRGTGIFYENNIKDKEPLEIGKGKIINEGKDIAILNLGTRIQSCFEAGKILNHYDINPTIADARFAKPIDTKLIDFLLDNHKFLLTIEEGSSGGFGSTCA

SEQ ID NO: 111408 - protein, 242 aa, Unknown
  Bacterial polypetide isolated from the Sargasso Sea
FTIFTKRPKIFLIWDVGHQAYPHKVLTGRRDRIKTLRQTGGLSGFTKREESEYDPFGAAHSSTSISAGLGMAVARDLKSEENHVVAVIGDGAMSAGMAYEAMNNAGASNSRLLVILNDNDMSIAPAVGAMSAYLSKLISSTSYRSLRDLAKQIASHLPKQIERTAKRAEEYARGLVTGGTLFEELGFYYVGPVDGHNLEHLLPVLQNIRNARQDKPVLLHVVTEKGRGHPFAEKSVEKYHAV

SEQ ID NO: 111409 - protein, 141 aa, Unknown
  Bacterial polypetide isolated from the Sargasso Sea
MKKKYKLLNEINFPSDLKKIPETKLQQVADELREEMIDAVSVTGGHLGASLGVVELTVALHYIFNTPNDKLIWDVGHQCYPHKILTGRKDKIRSLRQGGGLSGFTKRQESEYDPFGAAHSSTSISSALGIAEANRLSNKSN

SEQ ID NO: 111410 - protein, 251 aa, Unknown
  Bacterial polypetide isolated from the Sargasso Sea
HLGAGLGVVELTVALHYVFDTPNDKLIWDVGHQSYPHKILTGRKDKIRTLRQGDGLSGFTKRSESEYDPFGAAHSSTSISSALGIAEANKLENKSSNVIAVIGDGAISAGMAYEAMNNAGASKTKMIVILNDNDMSIAKPVGAMRTYLAKLFTGKIYFSLRETIKLITSAFSKRFSAKAGKAEDFFRSAVTGGTLFSSLGFYYAGPIDGHDLSTLVPILKNAKDSKHEGPIMIHIKTQKGKGYSYAEKAND

SEQ ID NO: 111411 - protein, 187 aa, Unknown
  Bacterial polypetide isolated from the Sargasso Sea
RETIKLIISAFSKRFSKKAGKAEDFLRSAVTGGTLFSSMGFYYVGPIDGHDTGALISVLKNAKEINYDGPIMIHVKTEKGKGYSFAEKSEDKYHGVTKFNVNTGIQEKSKSNSPSYTKVFANTLVKHAEKDSKIIGITAAMPSGTGMDIFGSKFPKRMFDVGIAEQHAVTFAAGLATEGYKPYAAIY

SEQ ID NO: 111412 - protein, 229 aa, Unknown
  Bacterial polypetide isolated from the Sargasso Sea
MSKTTFLDKINYPSDLRKLKKEELKQLSKELREELINVVSTTGGHLGAGLGVVELTIALHYVFDTPKDKLVWDVGHQAYPHKIITGRRDKIRTLRKGGGLSGFTKRSESEYDTFGAAHSSTSISSTLGIAVAKSLSNSSNHSIAVIGDGAMSAGMAYEAMNNAGAMKSKLIVILNDNDMSIAPPVGAMSSYLARLLSGRTYFGFRETIKSITSVFSKRFKDKAGKAEEL

SEQ ID NO: 111413 - protein, 271 aa, Unknown
  Bacterial polypetide isolated from the Sargasso Sea
KSKLIVVLNDNDMSIAKPVGAMSKYLAKLLSGKLYFSLRETIKMVISAFSKRFSQKAGKAEDLLRGIVTGGTLFSELGFYYIGPVDGHDVDNLVQIFENVKNSNHEGPILIHVRTQKGKGYKPAEESGDKYHGVSKFNIATGEQSKSQSNAPSYTKVFAETLIKHAEQDTKIIGITGAMPSGTGLNLFEKKFPDRTFDVGIAEQHAVTFAAGLATEGYKPYAAIYSTFLQRAYDQVVHDVAIQSLPVRFAIDRAGLVGADGPTHAGSFDIT

SEQ ID NO: 111414 - protein, 308 aa, Unknown
  Bacterial polypetide isolated from the Sargasso Sea
FTSISSALGIAEANKLENKSSNVIAVIGDGAISAGMAYEAMNNAGASKTKLIVILNDNDMSIAKPVGAMRTYLAKLFTGKIYFSLRETLKLITSAFSKRFSAKAGKAEDFFRSAVTGGTLFSSLGFYYAGPIDGHDLSSLIPILKNAKESRHEGPIMIHIKTQKGKGYAYAEKANDHYHGVSKFNVETGEQIKSKSNLPAYTKVFANTLVKHAKKDSKIVGITAAMPGGTGMDIFGKEFPSRMFDVGIAEQHAVTFAAGLATEGYKPYAAIYSTFLQRAYDQVVHDVAIQSLPVRFAIDRAGLVGADG

SEQ ID NO: 111415 - protein, 247 aa, Unknown
  Bacterial polypetide isolated from the Sargasso Sea
MKKQYQYLDEINFPSDIKKLKISELKILAEEVRQEMIDAVSVTGGHLGAGLGVVELTIALHYVFDAPKDKIIWDVGHQTYPHKILTGRKDKIRTLRQGMGLSGFTKRSESEYDPFGAAHSSTSISAALGIATANKLEKKSNQVVSIIGDGAISAGMAYEAMNNAGSSKTKMIVILNDNDMSIAKPVGAMSTYLAKLLSGKVYFSLRETFKLIISAFSKRFSDKAGKAEDFLRSAVTGGTLFNSLGFY

SEQ ID NO: 111416 - protein, 272 aa, Unknown
  Bacterial polypetide isolated from the Sargasso Sea
FSQCFPEQYFDVAIAEQHAVTFGAGLAKEGMNAVVAIYSSFLQRAYDQLIHDVAIQDLPVLFAIDRAGIVGADGPTHQGAFDIAFLRCIPNMVVMAPSDENECRQMLYTGHKLQKPAAVRYPRGAGMGITPDEAMTELEIGKSRTCRESSKGKSESIAILNFGCLLPYALEAAEAIDATVIDMRFIKPLDGDAVLKAASEHSALITLEDGCIMGGAGSAVLEHLQQNGVLKAVKMLGLPDSFILQGTQQEMYKEHGLDAEGIIAGARQLTSK

SEQ ID NO: 111417 - protein, 283 aa, Unknown
  Bacterial polypetide isolated from the Sargasso Sea
MNYIGPIDGHNIPLLVKTLRRMLEKNEPYILHVITKKGAGFEPAENERIKYHAISKIEKNPKKAKPKFQDIFGDWLCYKAKIDPNLVGITPAMKEGSGMVEFEQKFPDRFYDVAIAEQHSVTFGSGLFLGGLKPVVAIYSSFLQRAYDQFIHDVCLENLDVTFALDRAGVVGEDGPTHSGNFDLAFMRCVPNIIISTPSDENELWKLLNTSYHYKGPAAIRYPRGSGVGAKVSGKSDLLDVGKANKILDGSKTCILNFGVLLSRVINLAEEQNFGLYDMRFVK

SEQ ID NO: 111418 - protein, 286 aa, Unknown
  Bacterial polypetide isolated from the Sargasso Sea
ASSLGTVEITVALLKHFNFSQDRIVWDVGHQAYPYKILTDRNEKFSSLGKKGGIKKFLSRDESSFDHFGAGHASTSVSAALGMAIGRDILNKKFKVVAVIGDGAMTGGLAFEALNHNGSLDKNMLIIYNDNGISIDPNVGAISKLLSRFASSRIYNIFRDETLELAEKAPFSERLGLKATLQKLHDSAKSFFSPPSMLFEQLGWRYFGTVDGHNLNELIKLIGQVKNLEGPIVIHAITQKGKGYTFAEEDSFKYHGVTPFEPDDGKFIKKISKSKKVSFSQVFGKN

SEQ ID NO: 111419 - protein, 295 aa, Unknown
  Bacterial polypetide isolated from the Sargasso Sea
INTLRQGNGLSGFTKRSESEYDPFGAAHSSTSISSALGMAEANKLENKSSNVIAVIGDGAISAGMAYEAMNNAGASKTKMIVILNDNDMSIAKPVGAMRTYLAKLFTGKIYFSLRETLKLITSAFSKRFSAKAGKAEDFFRSAVTGGTLFSSLGFYYAGPIDGHDISTLIPILRNARDSKHEGPIMIHIKTQKGKGYSYAEKASDHYHGVSKFNVETGEQQKSGSNLPAYTKVFANTLVKHAKKDSKIVGITAAMPGGTGMDIFGKEFPKRMFDVGIAEQHAVTFAAGLATEGYK

SEQ ID NO: 111420 - protein, 119 aa, Unknown
  Bacterial polypetide isolated from the Sargasso Sea
MKNKLLDNINYPSDLRKLSKNQLDQVSKELRSELINVVSETGGHLGAGLGVVELTVALHYVFNTPKDKLVWDVGHQCYPHKLITGRRDRIRTLRKGGGLSGFTKRSESEYDPFGAAHSS

SEQ ID NO: 111421 - protein, 292 aa, Unknown
  Bacterial polypetide isolated from the Sargasso Sea
FEELGFTYMGPIDGHDIGNLVNTFNAAHKLKKPVLVHVVTTKGKGYPYAEADQVGYHAQSAFDLTTGKSIPSKKPKPVSYSKIFGQTLLKICEQDSKVVGITAAMATGTGLDILQKNIPDQYIDVGIAEQHAVTLAAGMSCDGLKPVVAIYSTFLQRAFDQLIHDVGIQNLPVSFVLDRAGIVGADGPTHQGQYDISYMRSIPNFVLMAPKDESELQRMLITSINHNGPTALRIPRGSGLGVAVMDEGWEPLNIGEAEILEEGEDILIIAYGSMVASAIETARILKNMNINA

SEQ ID NO: 111422 - protein, 285 aa, Unknown
  Bacterial polypetide isolated from the Sargasso Sea
YTTVFSDTLCKLAENDKKIIAITAAMPSGTGLSNFKKKFRDRFFDVGIAEQHAVTFAAGMASEGLKPFVAIYSTFLQRAYDQVVHDVVIQNLPVKFMMDRAGLVGADGATHAGSFDLAYLLCLPNVVVMAPSDENELTKMIFTALNYELGPIFCRYPRGEAVGVKIDKTLTNLEIGKGRVLNQGVNIAVLSLGTRLEDILVVKETLKKDGFNITIADARFAKPIDEELLKKLFLDHQVLFIVEEGAAGGFSSHCLNYLSTQDLLGKESKLVKCLTLPDKFQDHAS

SEQ ID NO: 111423 - protein, 260 aa, Unknown
  Bacterial polypetide isolated from the Sargasso Sea
LHCITKKGKGYEPAEKSDDKFHGVEKFDIDTGITFKKTNQKSYSQVFGETLTTLAENDEKIVAITAAMMSGTGLKDFNEKFNNRFFDVGIAEQHAVTMAAGMATEGFKPYVAIYSTFLQRAYDQIVHDVAIQKLPVRFAIDRAGQVGSDGPTHAGSFDLTYLSTLPNFIVMAPSSQSELIKMIKTSALINDFPSAFRYPRGVGNLEEANDLETINVGKGRILIEGDEVAILNLGTRLEVCKEASKILNNNNIYPTLADAR

SEQ ID NO: 111424 - protein, 288 aa, Unknown
  Bacterial polypetide isolated from the Sargasso Sea
GHLGPGLGVVELTLALYQTLDLDFDKVVWDVGHQGYPHKLITGRFSQFDSLRQQNGVAGYLKRSESKFDHFGAGHASTSISAALGMAIARDRKGENYKCVAVIGDGALTGGMALEAINHAGHLPNTPLVVVLNDNDMSISPPVGALSSYLNKVRVSPPLQFLSDSVQESVKNIPLIGKDIPEELKNIKGSVRRLAVPKVGAVFEELGFTYMGPIDGHDIGNLINTFNAAHKLKKPVLVHVVTTKGKGYPYAEADQVGYHAQSAFDLTTGKSIPSKKPKPVSYSKIFGQ

SEQ ID NO: 111425 - protein, 267 aa, Unknown
  Bacterial polypetide isolated from the Sargasso Sea
LFQQNFEKRFFDVGIAEQHAVTMAAGLATEGFKPFVAIYSTFLQRAYDQIVHDVAIQKLPVRFAIDRAGLVGSDGPTHAGSFDITYLATLPNFIVMAPSNQKELSKMIELSCEINNTPSAFRFPRGAGSDELFNNQPTDINIGKGYILIEGSDVAILNLGTRLEKCIEASKFLNQNNIYPTIADARFAKPLDTQLIDNLLINHKYILTIEEGSIGGFSSHVLHYVHNIRSKKDNVVIKNLIFPDRFVEHMTPDEQYQDIKMDTESII

SEQ ID NO: 111426 - protein, 313 aa, Unknown
  Bacterial polypetide isolated from the Sargasso Sea
DNDMSIAKPVGAMRTYLAKILSGKIYFSFRETVKLIISAFSKRFSKKAGKAEDFLRSAVTGGTLFSSMGFYYIGPIDGHDIDALVPVLKNAKDISFDGPIMIHIKTKKGKGYEFAEKSNDKYHGVSKFNVNTGVQEKSKSNVPAYTKVFANTLVEHAEKDSKIIGITAAMPSGTGMDIFGKKFPTRMFDVGIAEQHAVTFAAGLATEGYKPYAAIYSTFLQRAYDQVVHDVAIQSLPVRFAIDRAGLVGADGPTHAGSFDITYLSTLPNFIVMAASDEAELVRMINTSVDINDKPSAFRYPRGNGVGVNLPRI

SEQ ID NO: 111427 - protein, 312 aa, Unknown
  Bacterial polypetide isolated from the Sargasso Sea
SDLKKISETKLQKVADELREEMIDAVSVTGGHLGASLGVVELSVALHYIFNTPNDKLIWDVGHQCYPHKILTGRKDKIRTLRQGGGLSGFTKRIESEYDTFGAAHSSTSISSALGIAEANKLSNKSDNVIAVIGDGAISAGMAYEAMNNAGASKTKMIVILNDNDMSIARPVGAMGTYLAKIFSGKIYFSLRETIKLITSAFSKRFSAKAGKAEDLLRSAVTGGTLFSSLGFYYIGPIDGHDLNSLIPILKNARDSKHEGPILIHIKTKKGKGYSFAENAKDNYHGVSKFNVKTGEQAKNLSKIPSYTKVLL

SEQ ID NO: 111428 - protein, 319 aa, Unknown
  Bacterial polypetide isolated from the Sargasso Sea
MAGTSKTKMIVVLNDNDMSIAKPVGAMRKYLAKILSGKIYFNFRETIKLIISAFSKRFSKKAGKAEDFLRSAVTGGTLFNSMGFHYIGPIDGHDIDALVSVLKNAKEINYEGPILVHIKTKKGKGYKFAEKSNDKYHGVSKFNVNTGIQEKSKSNIPAYTKVFANTLVKHAEKDSKIIGVTAAMPSGTGMDIFGEKFPNRMFDVGIAEQHAVTFAAGLATEGFKPFAAIYSTFLQRAYDQVVHDVAIQNLPVRFAIDRAGLVGADGPTHAGSFDITYLSTLPNFVVMAASDEAELVRMINTAVDINDRPSAFRYPRGNG

SEQ ID NO: 111429 - protein, 301 aa, Unknown
  Bacterial polypetide isolated from the Sargasso Sea
KKGAGLDSAEADRIGFHAIGKINSIKDKKSKQKKYQDIFGEWIIDMAEASEDLIGITPAMREGSGLVEFSKKFPNRYFDVAIAEQHSVTFAAGLSVEKKKPVVAIYSTFLQRGYDQLIHDVAVQNLDVTFALDRSGLVGEDGPTHSGNYDIAYLRCIPNMVICTPSDENETRKLLTTAYLHNGPASVRYPRGTGPNSNINKNLQPVKIGEANIIKEENSKIVILNFGTLLEEAKQVSKDLKATLVDMRFVKPLDEKLLKKLFKKAEVFISIEDGSIMGGAGSAVQEFVSKEDLNIKSILFG

SEQ ID NO: 111430 - protein, 127 aa, Unknown
  Bacterial polypetide isolated from the Sargasso Sea
MYVEKIKSPADLRALDSEELDSLCVEIREFLVEAVSRTGGHLGSNLGAVELTLAVHRVFESPRDVIVWDTGHQSYVHKIVTGRADEFANLRQRHGLSGYPSGEESEHDVVENSHASTSLSWASGLAA

SEQ ID NO: 111431 - protein, 241 aa, Unknown
  Bacterial polypetide isolated from the Sargasso Sea
GKGYSFAEKSDDKYHGVSKFNIKTGIQQKSDTKVPSYTKVYANTLVKHAENDSKIIGITAAMPSGTGMDIFGNKFPNRMFDVGIAEQHAVTFAAGLATEGYKPYASIYSTFLQRAYDQVVHDVAIQSLPVRFAIDRAGLVGADGPTHAGSFDITYLATLPNFIVMAASDEAELVKMINTSVEINDKPCAFRYPRGNGTGVQLPEISEKIQIGKAKVVREGKKIAILNFGARLNECLIAEEI

SEQ ID NO: 111432 - protein, 254 aa, Unknown
  Bacterial polypetide isolated from the Sargasso Sea
AMNNAGTSKTKMIVILNDNDMSIAKPVGALRTYLAKILSGKIYFSLRETIKLVISSFSKRFMKKAGKAEDFFRSAVTGGTLFNSLGFYYVGPIDGHDMDVLTSVLENAKKMKYDGPILIHIKTEKGKGYEFAEKSSDKYHGVAKFNVLTGQQEKGKNLAPSYTKVFAKTLIKHAEKDSKIVGVTAAMPGGTGMDLFAEKFPDRMYDVGIAEQHAVTFSGGLATQGYKPFAAIYSTFLQRAYDQVVHDIAIQSLP

SEQ ID NO: 111433 - protein, 128 aa, Unknown
  Bacterial polypetide isolated from the Sargasso Sea
MSNNYKFLNNINFPDDVRKLSQSEIKILADEVRQELIDVVSETGGHLGAGLGVVELTVVLHYIFNTPHDKLIWDVGHQTYPHKILTGRKNQIRTLRKGKGLSGFTKRSESEYDPFGAAHSSTSISSAL

SEQ ID NO: 111434 - protein, 152 aa, Unknown
  Bacterial polypetide isolated from the Sargasso Sea
MKKKYELLDKINFPSDLKKLPESKLQKVADELREEMIDAVSVTGGHLGASLGVVELTVALHYIFNTPNDKLIWDVGHQCYPHKILTGRKDRIRTLRQGNGLSGFTKRSESEYDPFGAAHSSTSISSALGIAEANKLSNKSDNVIAVMGDGAI

SEQ ID NO: 111435 - protein, 311 aa, Unknown
  Bacterial polypetide isolated from the Sargasso Sea
RDRIRTLRKGGGLSGFTKRSESEYDPFGAAHSSTSISSTLGMATAKKLSNDKNNVVAVIGDGAMSAGMAYEAMNNAGAMKSKLIVVLNDNDMSIAPPVGAMSKYLARLLSGKIYFSFRETIKLILSAFSRRFSKSAGKAEDLLRSAVTGGTLFSQLGFYYIGPIDGHDVNNLVTILENAKNSNHQGPILIHAITKKGKGYKPAEESGDKYHGVSKFDVLTGKQAKGKSAGPSYTKVFANTLIKHAQNDTKIVAITGAMPSGTGLDLFQKKFPDRMFDVGIAEQHGVTFAAGLATEGYKPYAAIYSTFYKEL

SEQ ID NO: 111436 - protein, 289 aa, Unknown
  Bacterial polypetide isolated from the Sargasso Sea
SAFSKRFSQKAGKAEDILRGLVTGGTLFSELGFYYIGPVDGHDVDSLVQIFENVKNSSHQGPILIHLRTQKGKGYKPAEESGDKYHGVSKFNIATGEQSKSVSSVPSYTRVFAETLIKHAEQDTKIIGITGAMPSGTGINLFEKKFPERTFDVGIAEQHAVTFAAGLATEGYKPFAAIYSTFLQRAYDQVVHDVAIQSLPVRFAIDRAGLVGADGPTHAGSFDITYLSTLPNFIVMAASDESELVKMINTSVQINDRPSAFRYPRGNGIGVDLPAINEILEIGKGRVIK

SEQ ID NO: 111437 - protein, 297 aa, Unknown
  Bacterial polypetide isolated from the Sargasso Sea
RRYKGLSGFLKRSESEYDVFGAGHASTAISAGLGMAVSRNLENDDFKVVSIIGDGALSGGLAFEALNNAGNIRKQMLVIVNDNDMSISPNVGAFRNYLVKIATNKQYNKLRRWIYRTIKKLPKSLKFIESILRKAESSAKNFFLPTTVFEDLGFRYFGPVDGHNIEEMVEILENIKDYDSPVVLHAITKKGKGLDYAEDDPIKYHGVKEKKKDSAVTKVEAPIYQNVFGEVLCNLAEENKNIVAITAAMREGTGLVEYSTRFPERFYDVGIAEGHAVTFSGGLSTENKIPVVAIYST

SEQ ID NO: 111438 - protein, 267 aa, Unknown
  Bacterial polypetide isolated from the Sargasso Sea
MIVILNDNDMSIAKPVGAMRAYLAKILSGKLYFSFRETLKLIISAFSKRFSKKAGKAEDFLRSAMTGGTLFNSMGFYYIGPIDGHDVDALVSVMKNAKEINYDGPIMIHIKTEKGKGYEFAEKSKDKFHGVSKFNVNTGIQEKSTSSIPSYTKVFANTLIKHAEKDSKIIGITAAMPSGTGMDLFGEKFPSRMFDVGIAEQHAVTFAAGLSTEGYKPYAAIYSTFLQRAYDQVVHDVAIQNLPVRFAIDRAGLVGADGPTHAGSFDI

SEQ ID NO: 111439 - protein, 239 aa, Unknown
  Bacterial polypetide isolated from the Sargasso Sea
MNKEFSKKKYIDKINSPEDLKKLSINELDNVSDELRSELIEIVSQTGGHLGAGLGVVELTVALHYVFNAPDDKIIWDVGHQAYPHKIITGRREKMRSLRKKDGISGFLKRTESKYDQFGAGHSSTSISASLGMAVARDQLKNKNKVVAIIGDGAMSAGMAYEGLNNAGIINSDMIIILNDNDMSIAPAVGALSNYLSNVVSSRPFNTVREIAKQMIDFFPKEISETARRAENLARNILN

SEQ ID NO: 111440 - protein, 221 aa, Unknown
  Bacterial polypetide isolated from the Sargasso Sea
MKKNYQFLNDINFPSDLRKVSENNLQKVADEVREEMIDAVSETGGHLGAGLGVVELTVALHYVFDTPNDKLIWDVGHQSYPHKILTGRKDKIRTLRQGEGLSGFTKRSESEYDPFGAAHSSTSISSALGIAEANKLENKSSNVIAVIGDGAISAGMAYEAMNNAGASKTKMIVILNDNDMSIAKPVGAMRTYLAKLFTGKIYFSLRETLKLITSAFSKRFS

SEQ ID NO: 111441 - protein, 292 aa, Unknown
  Bacterial polypetide isolated from the Sargasso Sea
TVMKKNNQKLEKKILDLVNSPSELKNLTIEELEKLSDELRTELIDVVSKTGGHLGAGLGVIELTIALHYVFNTPEDKLIWDVGHQAYPHKILTGRRNKMHTLRKKNGLSGFLKRSESKFDHFGAGHSSTSISSALGMAVARDKLRKKFNVIAVIGDGAMSAGMAYEAMNNAGNINTNMIVILNDNDMSIAPAVGALSNYLSNVVSSRPFNTVREIAKQMMEFFPEELSKTAKKAEDLARNLLNKRERTIFSQMGMFYLGPVDGHDVKSMVKILENLKDGPIEGPVLLHVVQK

SEQ ID NO: 111442 - protein, 264 aa, Unknown
  Bacterial polypetide isolated from the Sargasso Sea
TELLQDINSPKDLRKLDQSEIPKLADELRESLLYTVGKTGGHFGAGLGVIELTLALHYKFDTPTDRIVWDVGHQTYPHKILTGRKDAMQSMRQSNGLAPFPVRSESEYDTFGVGHSSTSISAALGMITAAEKKQEDRHVTAVIGDGAMTAGMAYEALAHAGSIDKNLLVILNDNQMSISENIGGLRNYLARIWASKTYNRIRDSGKSVLTYLPGAKEFVRKAEIHAKGMVAPGSLFEELGFEYFGPVDGHDTNNLINILENLKL

SEQ ID NO: 111443 - protein, 306 aa, Unknown
  Bacterial polypetide isolated from the Sargasso Sea
MVSLDMKNREYHDDAVKFHAVKPNGKSKNKTEYQKPIKKDLTPSFQDVFGELACEMAENNDKVVCITAAMREGTGLVPFSKKYPDRYYDVGIAEGHAVTFASGLATQGIRPIVAIYSTFLQRAYDHIIHDCAIQHLPVIFCLDRSGIAGEDGPTHHGSLDIAYLRCIQDIIVTAPKDGNEFRRLLHTGMSVTDKPFAIRYPKSSSVQFSQESQIELLPIGSWETIKEGNDIAILAVGSMVFTALKASEIVKELGISIQIINCRFIKPMDVSFLKTISTKFSKIITIEEGTINGGFGDGVASWLLEN

SEQ ID NO: 111444 - protein, 217 aa, Unknown
  Bacterial polypetide isolated from the Sargasso Sea
ALQNLDVLFAIDRAGLVGLDGATHHGAFDLSYMRCIPNMVIMAPSDESLAWKMFNTGYEHSGPVAIRYPRGTGRGIDYFKNEETVEIGKSSTVINSDEKEVIILSFGSLLESAMEAGKRINARVVDMLFIKPLDESLLEEINNNYKLVVTIEDNVMAGGAGSAVNEHLIKLNSSSKILNLGLPDEFVEHGDQEQQKILNGLDANGIEKSIREKLKLI

SEQ ID NO: 111445 - protein, 261 aa, Unknown
  Bacterial polypetide isolated from the Sargasso Sea
GYSFAEKSEDKFHGVSKFNVKTGEQEKSKSSTPSYTKVFANSLIKHAEKDSKVVGITAAMPSGTGMDLFGKKFPERMFDVGIAEQHAVTFAAGMATEGYKPYAAIYSTFLQRAYDQVVHDVAIQSLPVRFAIDRAGLVGADGPTHAGSFDITYLSTLPNFVVMAASDEAELVRMINTSMEINDRPSAFRYPRGNGVGVQLPEITEKIELGKAKIIKEGKKVAILNFGARLQECILASENLIKKGIDISIIDARFAKPLDET

SEQ ID NO: 111446 - protein, 176 aa, Unknown
  Bacterial polypetide isolated from the Sargasso Sea
MKIFSEIPSEAPSTKLLDKINYPRDLKELLPPDLTILADELREFLLYSVGKSGGHLGAGLGVVELTIVLHYLYDSPSDNIVWDVGHQAYPHKILTGRKNQIGSIRSKDGLAPFPSRNESDYDVFGAGHSSTSVSSAVGMAIANKLNEGEKKTVAVIGDGAMTAGKAFEAMQHAGGI

SEQ ID NO: 111447 - protein, 285 aa, Unknown
  Bacterial polypetide isolated from the Sargasso Sea
MKIFSEIPNEVPSTELLDKINYPKDLKELSPPDLKILADELREFLLYSVGKSGGHLGAGLGVVELTIVLHYLYNSPSDNIVWDVGHQAYPHKILTGRKNQIGSIRSKDGLAPFPSRNESNYDVFGAGHSSTSISSAVGMAIANKLNEGEKKTVAVIGDGAMTAGMAFEAMQHAGGMKPDMLIILNDNDMSISENVGGLNNYFSRIWASKLYKGIKSNGKKFLKNIPAAHHLVRTVETHMKTMVAPGAIFEELGLNYIGPIDGHDIDQLLKVIGNLKNFEGPPVPP

SEQ ID NO: 111448 - protein, 257 aa, Unknown
  Bacterial polypetide isolated from the Sargasso Sea
ATEGFKPFAAIYSTFLQRAYDQVVHDVAIQSLPVRFAIDRAGLVGADGPTHAGSFDITYLATLPNFIVMAASDEAELVRMINTSVDINDKPSAFRYPRGNGVGISLPSIDEKLELGKGRIIKEGKKVALINFGARLNECLIAKENLSKKGIKPTIIDARFVKPLDQNLIWQIAIDHEVLISIEEGSIGGFGSHVGQFLSDKNLLDNNLKYRSMILPDRFIDHDKPSLMYKYAGLDAESIENKILDALNSKVIIKKTN

SEQ ID NO: 111449 - protein, 249 aa, Unknown
  Bacterial polypetide isolated from the Sargasso Sea
MFEKIPSERPNTPLLDEIEDPKDLKRLEIAQLSELADQLRLYLLYAVGQTGGHFGAGLGVVELTIALHYVFNTPKDRLIWDVGHQAYPHKILTGRRDQILTIRQEGGLAAFPNRSESEFDQFGVGHSSTSVSAILGMMVADRIREQDHHHVAVIGDGAMTAGMAFEALNHAGHLDDNVLVILNDNNMSISNNVGGLSSYFARMWASKPYNFIRTGSKRVFSKIPPALKAIHRAEEYMKGMVSPGTLLKR

SEQ ID NO: 111450 - protein, 275 aa, Unknown
  Bacterial polypetide isolated from the Sargasso Sea
VLKNAKESKHKGPILIHIKTQKGKGYSFAEKSEDKYHGVSKFNIKTGIQQKSVSKAPSYTKVYANTLVKHAENDSKIIGITAAMPSGTGMDIFGNKFPNRMFDVGIAEQHAVTFAAGLATEGYKPYASIYSTFLQRAYDQVVHDVAIQSLPVRFAIDRAGLVGADGPTHAGSFDITYLATLPNFIVMAASDEAELVKMINTSVEINDKPCAFRYPRGNGTGVQLPDISEKIQIGKAKVVREGKKIAILNFGARLNECLIAEENLRKKGVNASIVD

SEQ ID NO: 111451 - protein, 307 aa, Unknown
  Bacterial polypetide isolated from the Sargasso Sea
ALHKVFNTPKDKIVWDVGHQGYAHKILTGRLDKFNTIRKMGGLSGFLKISESEYDAFGAGHASTSISAATGIAEAQKINGKNHRVVSVIGDGSMTGGLAFEAMNNAGHLKTPMLVILNDNEMSISPNVGALNTYLTKIVTNPVYNQIRSEIWDVAGKLTFGKKTIQKVLRKVEESLKSFLVPGMLFEELGFRYFGPIDGHNLDELVSTLDRIKDLKTPCLLHILTKKGKGMVSTNSNNDKYYLDAVKFHAVKPTSKANGKIDQKTPSVVKPPVFQDVFGSLVCEIARNRKDTVCITAAMREGTGLVP

SEQ ID NO: 111452 - protein, 243 aa, Unknown
  Bacterial polypetide isolated from the Sargasso Sea
DQIVHDVALQNLPVRFAIDRAGQVGADGPTHAGSFDIAFLSTLPNFIIMAPSNQNELIRMINTTLVINDRPSAFRYPRGTGELSNSDKDTEPVEIGKGVILNEGNDVAVLNLGSRLQSCREAIKILNIRGINPTLADARFAKPIDTDLLDLLLDNHKYLLTIEEGSSGGFSASVLNYIHNKRIKLTSTKVNNIFFPDKFVDHQSPDDQYSEIGMDADSISKKILKIYEDNVINFQSYNKNIKN

SEQ ID NO: 111453 - protein, 300 aa, Unknown
  Bacterial polypetide isolated from the Sargasso Sea
GFTKRSESEYDPFGAVYSSTSISSALGIAVANKLSNKSGNVIAVIGDGAISAGMAYEAMNNAGENKTKMIVVLNDNDMSIAKPVGAMRKYLAKILSGKIYFSFRETLKLIISAFSKRFKNQAGKAEDFLRSAVTGGTLFNSMGFYYIGPIDGHDIDTMVSVFNNAKDINYDGPILIHVKTEKGKGYSFAEKSEDKFHGVSKFNVKTGEQEKSKSNTPSYTKVFANSLIKHAEKDSKVIGITAAMPSGTGMDLFGKKFPDRMFDVGIAEQHAVTFAAGMATEGYKPYAAIYSTFLQRAYDQ

SEQ ID NO: 111454 - protein, 247 aa, Unknown
  Bacterial polypetide isolated from the Sargasso Sea
CEGIKPVVAIYSTFLQRAYDQLIHDIGIQNLPVTFVLDRAGIVGADGPTHQGQYDISYLRCVPNFTVMAPKDESELQRMLVTCINHNGPSALRIPRGSGEGAALMEEGWESLEIGKAEIIEEGDNLLIIGYGSMVSPATKTAAILKESGVNSTVINARFIRPLDEETIHKLAKKIGKVVTMEEGTLLGGFGSAVVESFNDNDIFVPTLRIGIPDKLVDHATPQQSKESLGLTPEMMADQIRNKFNFN

SEQ ID NO: 111455 - protein, 242 aa, Unknown
  Bacterial polypetide isolated from the Sargasso Sea
MHLGDLTHPNELHGLRLSELEDVARQIRDRHLQVVSTSGGHLGPGLGVVELTLALYQTLDLDRDRVIWDVGHQAYPHKLITGRFNDFHTLRQQNGVAGYLKRSESNFDHFGAGHASTSISAALGMAMARDNRGEDFKCVAVIGDGALTGGMALEAINHAGHLPETPLLVVLNDNDMSISPPVGAISNVLNRARLSPPMQFISGSVEESVRHLPFMGGGAPAELTRLEGSMRRLAVAKVGAVF

SEQ ID NO: 111456 - protein, 167 aa, Unknown
  Bacterial polypetide isolated from the Sargasso Sea
MDYELLDKINFPSDLREFKKKDLKQISEELRAKTIETVSKTGGHLGAGLGVVELTVAIHYVFNTPHDKLIWDVGHQAYPHKIITGRKKNIDTLRKKDGVYGFVRRSESEYDPFGTAHSSTAVSAGLGIKAAKDINKDNSKVICVVGDGALSAGLAYEGLNNAGAQKK

SEQ ID NO: 111457 - protein, 267 aa, Unknown
  Bacterial polypetide isolated from the Sargasso Sea
TIKLITSAFSKRFSAKAGKAEDLLRSAVTGGTLFSSLGFYYIGPIDGHDLSSLIPILRNARDSKHQGPILIHIKTKKGKGYSFAEEAKDNYHGVSKFNVKTGEQEKSSSKIPSYTKVFADTLIQHAKKDSKIVAITAAMPDGTGLSNFRKEFPDRTYDVGIAEQHAVTFAAGLATENYKPYAAIYSTFLQRAYDQVVHDVAIQSLPVRFAIDRAGLVGADGPTHAGSFDTTYLATLPNFIVMAASDEAELVRMINTTTEINDRPMCI

SEQ ID NO: 111458 - protein, 128 aa, Unknown
  Bacterial polypetide isolated from the Sargasso Sea
MGRLIRQINFPADLRKFKKDDLRQISNELRDELIDVVSETGGHLGAGLGVVELTVALHYVFDTPKDKLVWDVSHQCYPHKIITGRRDKIKTLRKGGGLSGFTKRTESEYDPFGAAHSSTSISSTLGIA

SEQ ID NO: 111459 - protein, 300 aa, Unknown
  Bacterial polypetide isolated from the Sargasso Sea
SAGMAYEAMNNAGALKSKLIVVLNDNDMSIARPVGAMSKYLPKLLSGKIYFSLRETIKLIISAFSKRFSQKAGKAEDILRGIVTGGTLFSELGFYYIGPVDGHDVNNLVTIFENVKNSNHEGPILIHTVTKKGKGYKPAEESGDKYHGVTKFNVVTGEQSKKKTNKPAYTKVFAETLIKHAENDTKIVGITGAMPSGTGLNLFEKKFPERMFDVGIAEQHAVTFAAGLATEGYKPFAAIYSTFLQRAYDQVVHDVAIQSLPVRFAIDRAGLVGADGPTHAGSFDITYLSTLPNFVVMAAK

SEQ ID NO: 111460 - protein, 170 aa, Unknown
  Bacterial polypetide isolated from the Sargasso Sea
MSFPFELPILDKVSGPEDLRKLSDADLDQVAKELRNEVIEVVSQTGGHLGSSLGVVELTVALHAIFKTPLDKLIWDVGHQCYPHKIITGRRKRMMGLRQKDGVSGFTKRSESEYDPFGAAHSSTSISAALGFTMGRELGQTVGDCIAVIGDGSISAGMAYEAMNNAGAEN

SEQ ID NO: 111461 - protein, 253 aa, Unknown
  Bacterial polypetide isolated from the Sargasso Sea
DKIIWDVGHQSYPHKILTGRKDRIKTLRQGNGLSGFTKRSESEFDPFGAAHSSTSISAALGIATANKLSNKNDEVVAVIGDGAISAGMAYEAMNNAGDAKTKMIVILNDNNMSIAKPVGAMKSYLAKIFSGKIYFNLRETIKLIISSFSKRFSKKAAKAEDFLRSMVTGGTLFSSLGFYYIGPIDGHDLDVLLPILKNARDSRHNGPILIHLKTQKGKGYEYAEKSDDKYHGVSKFNVKTGIQEKSKSNIPAY

SEQ ID NO: 111462 - protein, 290 aa, Unknown
  Bacterial polypetide isolated from the Sargasso Sea
LFSSLGFYYIGPIDGHDLDVLLPILKNARDSRHNGPILIHLKTQKGKGYEYAEKSDDKYHGVSKFNVQTGIQEKSKSNIPAYTKVFANTLIKHAEKDSKIVGITAAMPSGTGMDIFSKKFPNRMFDVGIAEQHAVTFAAGLATEGFKPYAAIYSTFLQRAYDQVVHDVAIQSLPVRFAIDRAGLVGADGPTHAGSFDITYLSTLPNFVVMAASDEGELVKMINTTVDINDRPSAFRYPRGIGVGMDLPDITEKLQIGKGRIIREGKKIAILNFGARLKECLIAEENLKKK

SEQ ID NO: 111463 - protein, 162 aa, Unknown
  Bacterial polypetide isolated from the Sargasso Sea
MKSILSSISQPKDIQNLNLVELTHLAYECRQRIIEVTSKKGGHLASSLGTVEITVALLKHFDFSQDRIVWDVGHQAYPYKILTDRNESFDSLGEKGGIKKFLSREESIFDHFGAGHASTSVSAALGMSIGRDLLNKKFKVIAVIGDGAMTGGLAFEALNHNG

SEQ ID NO: 111464 - protein, 86 aa, Unknown
  Bacterial polypetide isolated from the Sargasso Sea
MKKNYQFLNDINFPSDLRKVSEDNLQKVADELREEMINAVSETGGHLGAGLGVVELTVALHYVFDTPNDKLIWDVGHQSYPHKILT

SEQ ID NO: 111465 - protein, 231 aa, Unknown
  Bacterial polypetide isolated from the Sargasso Sea
MIKQINFPSELRKFKKENLKQISDELRDELIDVVSETGGHLGAGLGVVELTVALHYVFDTPKDKLVWDVSHQCYPHKIITGRRDRIRTLRKGGGLSGFTKRSESEYDPFGAAHSSTSISSTLGISVAKKLSNNKNNVIAVIGDGAMSAGMAYEAMNNAGALKSNLIVVLNDNDMSIARPVGAMSKYLANLLSGKLYFSLRETIKMIISAFSKRFSQKAGKAEDMLRNMVTG

SEQ ID NO: 111466 - protein, 280 aa, Unknown
  Bacterial polypetide isolated from the Sargasso Sea
ERMFDVGIAEQHGVTFAAGFATEGYKPFAAIYSTFLQRAYDQVVHDVAIQSLPVRFAIDRAGLVGADGATHAGSFDITYLSTLPNFVVMAASDEAELVRMINTSVHINDRPSAFRYPRGNGIGIELPDIKEVLEIGKGRIISTGKHLAILNFGARMNECKKAAEVLKKKGISISIFDARFAKPLDEKLILELASNHEAVLTIEEGSIGGFGSHVSNLLSDRGFFDGGLKFRSMILPDKFLDQDTPDNMYKTAGLDSNNIIQKIESILNSNVVIAKNKNLS

SEQ ID NO: 111467 - protein, 243 aa, Unknown
  Bacterial polypetide isolated from the Sargasso Sea
FSQLGFYYVGPIDGHDVNNLVTILENVKKSKHEGPILIHAITKKGKGYKPAEESGDKYHGVSKFNVLTGEQSKGKSKAPSYTKVFANTLIKHAENDTKIVAITGAMPSGTGLDLFEKKFPERMFDVGIAEQHGVTFAAGLATEGYKPFAAIYSTFLQRAYDQVVHDVAIQSLPVRFAIDRAGLVGADGPTHAGSFDITYLSTLPNFVVMAASDEAELVRMVNTSVNINDKPSAFRYPRGNGIG

SEQ ID NO: 111468 - protein, 291 aa, Unknown
  Bacterial polypetide isolated from the Sargasso Sea
LSNKSDNVIAVIGDGAISAGMAYEAMNNAGAIKTKIIVILNDNDMSIAKPVGAMRTYLAKILSGKLYFSFRETIKLIISAFSKRFSKKAGKAEDFLRSVVTGGTLFSSLGFYYMGPIDGHDMNDLVSVLKNAKEINYDGPIMIHIKTEKGKGYKFAEKSLDKYHGVTKFNVNTGVQEKSKSNIPSYTKVFANTLVKHAEKDSKIIGVTAAMPSGTGMDIFGEKFPLRMFDVGIAEQHAVTFAAGLATEGYKPYAAIYSTFLQRAYDQVVHDVAIQSLPVRFAIDRAGLVGA

SEQ ID NO: 111469 - protein, 298 aa, Unknown
  Bacterial polypetide isolated from the Sargasso Sea
RKKGGLAPFPSKNESEYDVFGVGHSSTSISAALGMSEALKEQSSKIVCVIGDGAMTAGMAFEALSHTGHLKPNMLIILNDNDMSISENVGGLSNYFSRIWASKLYKGIRKGGKSFLENLPQAHHIARKVETQMKSMVAPGTIFEELGLNYIGPVDGHNIDELLQVVGNLKDFDGPQFLHIITKKGAGLDDAEADRIGFHAIGKIKPVTKTSKKTSSPKYQDIFSDWIVDMADKDSDLVAITPAMREGSGLVEFSKKYPDRYYDVAIAEQHAVTFAAGLACESKKPVVAIYSTFLQRAY

SEQ ID NO: 111470 - protein, 119 aa, Unknown
  Bacterial polypetide isolated from the Sargasso Sea
HQAYPHKILTGRRDQMHTIRQKDGLHPFPFRDESDYDTFSVGHSSTSISAALGMSIAAQKEGAGRKTVAVIGEGAITAGMAFEAMNHLGDVKSDMLIILNDNEMSISENVGALTNHFAR

SEQ ID NO: 111471 - protein, 307 aa, Unknown
  Bacterial polypetide isolated from the Sargasso Sea
VAVIGDGAMSAGMAYEAMNNAGAMKSKLIVVLNDNDMSIAPPVGAMSKYLARLLSGKIYFSFRETIKLILSAFSRRFSKSAGKAEDLLRSAVTGGTLFSQLGFYYIGPIDGHDVNNLVTILENVKNSNHQGPILIHAITKKGKGYKPAEESGDKYHGVSKFDVLTGKQVKGKTAGPSYTKVFANTLIKHAQNDTKIVAITGAMPSGTGLDLFQKKFPDRMFDVGIAEQHGVTFAAGLATEGYKPYAAIYSTFLQRAYDQVVHDVAIQSLPVRFAIDRAGLVGSDGATHAGSFDTTYLSTLPNFVVMA

SEQ ID NO: 111472 - protein, 246 aa, Unknown
  Bacterial polypetide isolated from the Sargasso Sea
PSDIKKLSHNELKLLAQEVREEMIDAVSETGGHLGAVLGVVELTVVLHYIFNTPNDKLIWDVGHQTYPHKILTGRKDKIRTLRKGNGLSGFTKRSESEYDPFGAAHSSTSISSALGIAIANKLSNKSDNVIAVIGDGAISAGMAYEAMNNAGSSKTKLIVILNDNDMSIAKPVGAMRAYLAKIFTGKIYFSLRETVKLIISAFSKRFSKKAGKAEDFLRSAVTGGTLFSSMGFYYVGPIDGHDIDA

SEQ ID NO: 111473 - protein, 290 aa, Unknown
  Bacterial polypetide isolated from the Sargasso Sea
NIEINYISSFSKRFSKKAGKAEDFLRSAVTGGTLFNSLGFYYIGPIDGHDMDSLISVLKNAKQINFDGPILIHIKTEKGKGYEFAEKSDDKYHGVAKFNINTGVQEKSQSVNPSYTKVFANTLIKHAEKDSKIVGITAAMPSGTGMDIFAKKFPSRMFDVGIAEQHAVTFAAGLATEGYKPYAAIYSTFLQRAYDQVVHDVAIQSLPVRFAIDRAGLVGADGPTHAGSFDITYLATLPNFIVMAASDEAELVRMINTSVDINDKPSAFRYPRGNGIGVELPNISEKLEIG

SEQ ID NO: 111474 - protein, 283 aa, Unknown
  Bacterial polypetide isolated from the Sargasso Sea
EYDPFGAAHSSTSISSALGIAEANKLENKSSNIIAVIGDGAMSAGMAYEAMNNAGASKTKMIVILNDNDMSIAKPVGAMRTYLAKLLTGKIYFSFRETIKLITSAFSKRFSAKAGKAEDFLRSAFTGGTMFNSLGFYYVGPIDGHDLSTLIPILKNARDSNHEGPIMIHIKTQKGKGYSYAEEAKDHYHGVSKFNVDTGEQNKSGSNLPSYTKVFANTLVKHAKKDSKIVGITAAMPGGTGMDIFSKEFPKRMFDVGIAEQHAVTFAAGMATEGYKPYAAIYS

SEQ ID NO: 111475 - protein, 276 aa, Unknown
  Bacterial polypetide isolated from the Sargasso Sea
GVIELTIVLHYLFDSPNDNIVWDVGHQAYPHKILTNRKHLIETIRSKEGLSPFPKRKESKYDAFGVGHSSTSISAALGMSIGNKIKGLNDKTVAIIGDGAMTAGMSFEALSHAGAEKSNILVILNDNDMSISENVGGLNNYFARIWASKLYTGIKKSGKKVLKNLPTAHHLARTVETSMKTMVAPGGIFEELGWNYIGPIDGHNIQQLIEVIDNLKNLEGPQFLHIITKKGAGFNLAEKNRIKYHAISKDKSSKSKKIKYQDIFGKWIVDMASIND

SEQ ID NO: 111476 - protein, 122 aa, Unknown
  Bacterial polypetide isolated from the Sargasso Sea
TGGHLGAGLGVVELTIALHYVFNTPRDRLIWDVGHQSYPHKILTGRKHKIETLRQKNGLYGFVKRSESEYDPFGTAHSSTSISAGMGMKVAKDLNNDDAKIICVIGDGALSAGMAYEALNNV

SEQ ID NO: 111477 - protein, 318 aa, Unknown
  Bacterial polypetide isolated from the Sargasso Sea
TVALHYIFNTPNDKLVWDVGHQTYPHKILTGRKDKIRTLRKGGGLSGFTKRSESEYDPFGAAHSSTSISSALGIAIANKLSNKSDNVVAVIGDGAMSAGMAYEAMNNAGASKTKMIVILNDNDMSIAKPVGAMRAYLAKILSGKIYFSFRETIKLIISAFSKRFSKKAGKAEDFLRSVVTGGTLFSSMGFYYIGPIDGHDIDDLISVLKNAKEINYDGPIMIHIKTEKGKGYEFAEKSDDKYHGVTKFNVNTGVQEKSKSNIPSYTKVFANTLIKHAEKDSKIIGVTAAMPSGTGMDIFGEKFPSRMFDVGIAEQHAV

SEQ ID NO: 111478 - protein, 263 aa, Unknown
  Bacterial polypetide isolated from the Sargasso Sea
YPERYFDVAIAEQHAVTLAAGMAIEGLKPVVAIYSSFLQRGYDQLIHDIAIQNLDVLFAIDRAGVVGADGPTHQGSFDLSFMRCIPNMLIMVPSDENECRQMLYTGYQHKGPAAVRYPRGSGNGEAPESVMTELALGKGVIRRQGEKVALLAFGPLLQACHTAAEQLNATLVDMRFVKPLDQQLLTELSKTHSHFVTIEDNALMGGAGSAVNEYCIAEQLPVKLLNIGLPDIFIKHGTQEQIYAELGLDSAGIQAKVEVFLRR

SEQ ID NO: 111479 - protein, 194 aa, Unknown
  Bacterial polypetide isolated from the Sargasso Sea
MKKKYELLDEINFPSDLKKLPESKLQKVADELREEMIDAVSVTGGHLGASLGVVELTVALHYIFNTPNDKLIWDVGHQCYPHKILTGRKDRIRTLRQGNGLSGFTKRSESEYDPFGAAHSSTSISSALGIAEANKLSNKSDNVIAVIGDGAISAGMAYEAMNNAGASKTKMIVILNDNDMSIARPVGAMSTYLA

SEQ ID NO: 111480 - protein, 253 aa, Unknown
  Bacterial polypetide isolated from the Sargasso Sea
YKPYAAIYSTFLQRAYDQVVHDVAIQSLPVRFAIDRAGLVGADGPTHAGSFDITYLSTLPNFIVMAASDEAELVRMINTTVDINDKPSAFRYPRGNGVGVSLPLNDEKIIIGKGRVIKEGKKIVLLNFGARLKECLIAEENLKKKGINLTIIDARFCKPLDENLIWQVATDHDAIITIEEGSIGGFGSHVGQLLADKNLLDNNLKYRSMILPDRFIDHDKPELMYKFAGLDANSIESKVLDTLNSKVIIKKTN

SEQ ID NO: 111481 - protein, 284 aa, Unknown
  Bacterial polypetide isolated from the Sargasso Sea
MALRLIPSARKFASKAEEHIKGMIAPGTLFEELGFNYVGPMDGHNVKEIIRTLRNLNDTSGPKLLHLITKKGKGFKPAEVDPIGFHAITKMENPNASKMKNVGMKYSDVFGSWLISKANVDPSLIAITPAMKEGSGMVEFADKFPSRFYDVAIAEQHAMTFAAGLACEGKKPVLAIYSTFLQRAYDQLIHDVAIQNLDLLIAIDRAGLVGEDGPTHSGIFDLSFMRCIPNLIIMTPSSEEECWRLLETGYKFEGPAAVRYPKGFGIGTDLPTEFKEIEMENLKK

SEQ ID NO: 111482 - protein, 269 aa, Unknown
  Bacterial polypetide isolated from the Sargasso Sea
LAKEDEKIVAITAAMASGTGLDNFSKEFPSRFFDVGIAEQHAVTMCAGLATEGYKPFAAIYSTFLQRAYDQIIHDVALQKLPVRFAIDRAGQVGADGPTHAGSFDIAYLNSIPNFIIMAPSSQNELKRIINTSLYIDDRPSAFRYPRGLGTFKDNENDSTPVEIGKGVVIKEGNEVAIINLGTRLDTCLDAIENLKEHNIYPTLVDARFAKPLDTNLIDLILDSHKYILTIEEGSIGGFASSVLNYTHNIRLKPTNSIIKNLFFPDKFI

SEQ ID NO: 111483 - protein, 275 aa, Unknown
  Bacterial polypetide isolated from the Sargasso Sea
MFDVGIAEQHAVTFAAGMATEGYKPYTAIYSTFFQRAYDQVVHDVAIQSLPVRFAIDRAGLVGADGPTHAGSFDITFLSTLPNFVVMAASDEAELVRMINTSMDINDRPSAFRYPRGNGVGVQLPEMTEKIELGKAKIIKEGKKVAILNFGARLQECILASENLTKKRIDISIIDARFAKPLDENLIWQIATEHEVLITIEEGSIGGFGSHVSQFLSEKNLLDSNLKFRSMILPDRFIDHDKPELMYKFASLDSIGIENKILDTLNSKVLMKKSN

SEQ ID NO: 111484 - protein, 316 aa, Unknown
  Bacterial polypetide isolated from the Sargasso Sea
KAEDLLRSAVTGGTLFSSLGFYYIGPIDGHDLNSLIPILKNARDSKHEGPILIHVKTKKGKGYTFAETAKDNYHGVSKFNVKTGEQVKSTSKLPSYTKVFANTLIQHAKKDSKIVAITAAMPDGTGLDIFRKEFPDRTFDVGIAEQHAVTFAAGLATENFKPYAAIYSTFLQRAYDQVVHDVAIQCLPVRFAIDRAGLVGADGPTHAGSFDTTYLSTLPNFIVMAASDEAELVRMINTSTEINDRPCAFRYPRGTGLGAILPSINEKIEIGKSKIVKEGKKLAILNFGARLHETLKAADNLAKKGVDITVVDARFA

SEQ ID NO: 111485 - protein, 121 aa, Unknown
  Bacterial polypetide isolated from the Sargasso Sea
MRLSQLSHPNELHGLPISELEDVACQIRERHLQVVSTSGGHLGPGLGVVELTIALYQTLDLDVDKVIWDVGHQAYPHKLITGRYDRFDSLRQQKGVAGYLKRTESKFDHFGAGHASTSILL

SEQ ID NO: 111486 - protein, 273 aa, Unknown
  Bacterial polypetide isolated from the Sargasso Sea
SHRKDVVCITAAMREGTGLVPYEKSYPDRYYDVGIAEGHGITFAAGLATQGIKPIVAIYSTFLQRAFDHIVHDVAIQNLPVIFCMDRAGIAGEDGPTHHGALDIAYLRCIQGMTLAAPKNGNEFRKLLYTALDHNGPFGIRYPKCTSFEFDKKGQAELIPIGSWEVEKKGDDIVILAIGPMVYSALDVASKLEKYGYSCEVVNCRFIKPMDIGYLKGIIKNFDKIVTIEEGVLSGGFGDGVSSWILENGFKGKIKRIGLPDNYVQHGSRSPNF

SEQ ID NO: 111487 - protein, 109 aa, Unknown
  Bacterial polypetide isolated from the Sargasso Sea
MKIFSEIPNEVPSTELLDKINYPRDLKELSPPDLKILADELREFLLYSVGKSGGHLGAGLGVIELTVVLHYLYDSPSDNIVWDVGHQAYPHKILTGRKSQISSIRSKDG

SEQ ID NO: 111488 - protein, 291 aa, Unknown
  Bacterial polypetide isolated from the Sargasso Sea
VLHYIFNTPHDKLIWDVGHQTYPHKILTGRKNKIRTLRKGGGLSGFTKRSESEYDPFGAAHSSTSISSALGIAVANKLSNKAGNVVAVIGDGAISAGMAYEAMNNASENKTKMIVVLNDNDMSIAKPVGAMRKYLAKILSGKIYFSFRETLKLIISAFSKRFKNHAGKAEDFLRSAVTGGTLFNSMGFYYIGPIDGHDIDSMISVFNNAKDIDYNGPILIHVKTEKGKGYSFAEKSEDKFHGVSKFNIKTGEQVKSKSNAPSYTKVFANSLIKHAEKDSKVVGITAAMPSG

SEQ ID NO: 111489 - protein, 155 aa, Unknown
  Bacterial polypetide isolated from the Sargasso Sea
MLLSELSHPNQLHGLTVSQLEEIACQIRERHLQVVSTSGGHLGPGLGVVELTLALYQTLDLDFDKVVWDVGHQGYPHKLITGRFSQFDSLRQQNGVAGYLKRSESKFDHFGAGHASTSISAALGMAIARDRKGENYKCVAVIGDGALTGGMALEA

SEQ ID NO: 111490 - protein, 284 aa, Unknown
  Bacterial polypetide isolated from the Sargasso Sea
MNKNYKLLDEINFPSDIRKLSASELKNLADEVRAEMIDAVSVTGGHLGAGLGVVELTVALHYVFNTPNDKLIWDVGHQTYPHKILTGRKDKIRTLRKGGGLSGFTKRSESEYDPFGAAHSSTSISSALGMAVANKLSNKSNEVVAVIGDGAMSAGMAYEAMNNAGTSKTKMIVILNDNDMSIAKPVGALRSYLAKLFSGKVYFSLRETIKLIISSFSKRFSKKAGKAEDFLRSAVTGGTLFNSLGFYYIGPIDGHDMDSLISVLKNAKQINFEGPIMIHIKTEK

SEQ ID NO: 111491 - protein, 249 aa, Unknown
  Bacterial polypetide isolated from the Sargasso Sea
DPFGAAHSSTSISSALGIAEANKLSKKTENVVAVIGDGAISAGMAYEAMNNAGASKTKMIVILNDNDMSIARPVGAMGTYLAKIFSGKIYFSLRETIKLITSAFSKRFSAKAGKAEDLLRSAVTGGTLFSSLGFYYIGPIDGHDLSSLIPILRNARDSKHKGPILIHIKTKKGKGYSFAEEAKDHYHGVSKFNVKTGEQEKSSSKIPSYTKVFADTLIKHAKKDSKIVAITAAMPDGTGLSNFRKEFPD

SEQ ID NO: 111492 - protein, 258 aa, Unknown
  Bacterial polypetide isolated from the Sargasso Sea
LLHNINDPADMRGLSRAQLKTLAAELRTYVIDSVSRTGGHLSSNLGTVELTVALHSVFNTPYDRIVWDVGHQTYPHKILTGRRDHMATLRQFGGLSGFPQRAESEYDTFGTAHSSTSISAALGMALAAKQKGEDRRAIAVIGDGAMTAGMAFEALNNGGVHDANLLVILNDNDMSISPPVGALNRYLAQLMSGQFYAKARDVGKSVLKQVPPLLELAKRLEQQAKGMVVPATMFEQFGFNYIGPIDGHDLDSLIPTLE

SEQ ID NO: 111493 - protein, 260 aa, Unknown
  Bacterial polypetide isolated from the Sargasso Sea
MKKDYKFLNNINFPSDIKKLSHNELKTLAEEVREEMIDAVSETGGHLGAGLGVVELTVVLHYIFNTPNDKLIWDVGHQTYPHKILTGRKDKIRTLRKGNGLSGFTKRSESEYDPFGAAHSSTSISSALGIAIANKLSNKSDNVIAVIGDGAISAGMAYEAMNNAGSSKTKLIVILNDNDMSISKPVGAMRAYLAKIFTGKIYFSLRETVKLIISAFSKRFSKKAGKAEDFLRSAVTGGTLFSSMGFYYVGPIDGHDIDAL

SEQ ID NO: 111494 - protein, 133 aa, Unknown
  Bacterial polypetide isolated from the Sargasso Sea
MKKNYQFLNDINFPSDLRKISEKNLQKVADEVRKEMIDAVSETGGHLGAGLGVVELTVALHYVFDTPNDKLIWDVGHQSYPHKILTGRKDKIRTLRQGDGLSGFTKRSESEYDPFGAAHSSTSISSALGIAEA

SEQ ID NO: 111495 - protein, 265 aa, Unknown
  Bacterial polypetide isolated from the Sargasso Sea
MPRLINKVNFPSDLRKFRKENLKQISEELRDELIDVVSETGGHLGAGLGVVELTVALHYVFDTPKDKLVWDVSHQCYPHKIITGRRDRIKTLRKGGGLSGFTKRSESEYDPFGAAHSSTSISSTLGMSVAKKLSNNNNNVIAVIGDGAMSAGMAYEAMNNAGALKSNLIVVLNDNDMSIARPVGAMSKYLANLLSGKLYFSFRETIKMIISAFSKRFSQKAGKAEDMLRNIVTGGTLFSELGFYYVGPIDGHDVENLVQIFENVK

SEQ ID NO: 111496 - protein, 264 aa, Unknown
  Bacterial polypetide isolated from the Sargasso Sea
GKAEDLLRSAVTGGTLFSSLGFYYIGPIDGHDLNSLIPILKNARDTKHEGPILIHIKTKKGKGYTFAEEAKDNYHGVSKFNIKTGEQLKSSSKIPSYTKVFANTLVQHAKKDSKIVAITAAMPDGTGLDIFRKEFPDRTFDVGIAEQHAITFAAGLATENFKPYAAIYSTFLQRAYDQVVHDVAIQKLPVRFAIDRAGLVGADGATHAGSFDTTYLTTLPNFVVMAASDEAELVRMINTSVDINDRPCSFRYPRGSGFGSVLPS

SEQ ID NO: 111497 - protein, 245 aa, Unknown
  Bacterial polypetide isolated from the Sargasso Sea
MTRILKEINFPSDLKKFKKENLKQISEELRDELIDVVSETGGHLGAGLGVVELTVALHYVFDTPKDKLVWDVSHQCYPHKIITGRRDRIKTLRKGGGLSGFTKRAESEYDPFGAAHSSTSISSTLGMSVAKKLSNNKNNVIAVIGDGAMSAGMAYEAMNNAGALKSNLIVVLNDNDMSIARPVGAMSKYLANLLSGKLYFSFRETIKMIISAFSKRFSQKAGKAEDMLRNMVTGGTLFSELGFYY

SEQ ID NO: 111498 - protein, 304 aa, Unknown
  Bacterial polypetide isolated from the Sargasso Sea
FFKRFSVKAGKAEDLLRSAVTGGTLFSSLGFYYIGPIDGHDLNSLIPILKNARDSKHEGPILIHIKSKKGKGYTFAEEAKDHYHGVSKFNVKTGEQLKSATKSPSYTKVFADTLIQHAKKDSKIVAITAAMPDGTGLGNFRKEFPDRTFDVGIAEQHAVTFAAGLATENFKPYAAIYSTFLQRAYDQVVHDVAIQSLPVRFAIDRAGLVGADGPTHAGSFDTTYLSTLPNFIVMAASDEAELVKMINTSTEINDKPCAFRYPRGTGLGSVLPSINEKIEIGKSKIIKEGKKLAILNFGARLNET

SEQ ID NO: 111499 - protein, 254 aa, Unknown
  Bacterial polypetide isolated from the Sargasso Sea
FVAIYSTFLQRAYDQIVHDVAIQKLPVRFAIDRAGLVGSDGPTHAGSFDITYLATLPNFIVMAPSNQRELSKMIELACEINDTPCAFRFPRGTGSDELFNNQPTDIDIGKGYILIEGNDVAILNLGTRLEKCIEASKFLNQNNIYPTIADARFAKPLDTKLIDNLLNNHKYILTIEEGSIGGFSSHFLHYAHNIRPKKDNVVIRNLIFPDRFVEHMTPDEQYQDIKMDMESIIREINNFYENKIIDIKNFKLNV

SEQ ID NO: 111500 - protein, 190 aa, Unknown
  Bacterial polypetide isolated from the Sargasso Sea
MQNYKYLNNINFPSDIKKLNNEELKVLSDEVRNEMIDAVSKTGGHLGAGLGVVELTVAIHHVFDTPNDKLIWDVGHQSYPHKILTGRKDKIRTLRQGSGLSGFTKRSESEFDPFGAAHSSTSISAGLGIATANKLSNKSNQVIAVIGDGAMSAGMAYEAMNNAGDSKTKMIVILNDNDMSIAKPVGAMKS

SEQ ID NO: 111501 - protein, 247 aa, Unknown
  Bacterial polypetide isolated from the Sargasso Sea
SSRAYDQVVHDVAIQSLPVRFAIDRAGLVGADGPTHAGSFDITYLSTLPNFVVMAASDESELVKMINTSVNINDRPSAFRYPRGNGLGVKIPSIDEVLKIGKGRIIKEGKKAAILNFGTRLEECKTASEILFKKGIDLTIIDARFAKPLDEKLIMEVANNHEVLVSIEEGSIGGFGSHVMQFLSDRGVFDRGLKFRSMILPDIFIDQDTPDKMYEMAGLDSSSIVNKIEETLNSNIILAKNKNKISY

SEQ ID NO: 111502 - protein, 229 aa, Unknown
  Bacterial polypetide isolated from the Sargasso Sea
MSEKKLLDKIKYPVDLRKINVEDLKQVSTELREELIDAVSTTGGHLGAGLGVVELTIALHYVFNTPNDKLVWDVGHQSYPHKIITGRRDSIRTLRKGGGLSGFTKRTESEYDPFGAAHSSTSISSTLGMAVAKSLSNNSNHVVAVIGDGAMSAGMAYEAMNNAGAMKSKLIVILNDNDMSIARPVGAMSSYLARLLSGKTYFNFRETVKMITSAFSKDLRIKQEKLKIY

SEQ ID NO: 111503 - protein, 141 aa, Unknown
  Bacterial polypetide isolated from the Sargasso Sea
MKKYKFLDKVEFPSDIRKLKLSELRILSNEVRQELIDAVSVTGGHLGAGLGVVELSVALHYVFDTPNDKLVWDVGHQSYPHKILTGRKEKIRTLRQGNGLSGFTKRSESEYDPFGAAHSSTSISAGLGIATANKLSKKMIT

SEQ ID NO: 111504 - protein, 219 aa, Unknown
  Bacterial polypetide isolated from the Sargasso Sea
DRAGLVGADGPTHAGSFDTTYLTTLPNFIVMAASDEAELVRMINTSTEINDKPCAFRYPRGTGVGVILPSTNEKIEIGKSRIIKEGRKLAILNFGARLNETLKATENLKKKGVNITIVDARFAKPLDENLIWQLATNHEAIMTIEEGSIGGFGSHVVDFLSKKGLLDSGLKFRSIKLPDFFIDQDTPENMYKNANLDAVSIEAKILDLLNSNIILQKQK

SEQ ID NO: 111505 - protein, 269 aa, Unknown
  Bacterial polypetide isolated from the Sargasso Sea
ISAVSETGGHLGAGLGVVELTVALHYVFDTPNDKLIWDVGHQSYPHKILTGRKDKIRTLRQGDGLSGFTKRSESEYDPFGAAHSSTSISSALGIAEANKLENKSSNVIAVIGDGAISAGMAYEAMNNAGASKTKIIVILNDNDMSIAKPVGAMRTYLAKLFTGKIYFSLRETFKLITSAFSKRFSAKAGKAEDFFRSAVTGGTLFSSLGFYYAGPIDGHDLSSLVPILKNAKESRHEGPIMIHIKSQKGKGYSYAEKASDHYHGVSKFN

SEQ ID NO: 111506 - protein, 301 aa, Unknown
  Bacterial polypetide isolated from the Sargasso Sea
SVLENIKNSSVDKPIFLHCVTKKGKGYEPAEKSDDKFHGVNKFDVRTGQSLNSSNKKTYSSVFGEALSNAAQNDEKIVAITAAMMSGTGLDIFNSQHSERLFDVGIAEQHAVTMAAGLATEGFKPYVAIYSTFLQRAYDQIIHDVALQKLPVRFAIDRAGLVGADGPTHAGSFDITFLSTLPNFIIMAPSNQNELIRMINTSVLINDRPSAFRYPRGTGEMDLNDYNIAPIEIGKGIIIEEGNEVAILNLGSRLQSCQEALKILKTNGIYPTLADARFAKPIDTNLLERLLDNHKYLLTIE

SEQ ID NO: 111507 - protein, 263 aa, Unknown
  Bacterial polypetide isolated from the Sargasso Sea
QLEEIACQIRERHLQVVSTSGGHLGPGLGVVELTLALYQTLDLDFDKVVWDVGHQGYPHKLITGRFSQFDSLRQQNGVAGYLKRSESKFDHFGAGHASTSISAALGMAIARDRKGENYKCVAVIGDGALTGGMALEAINHAGHLPNTPLVVVLNDNDMSISPPVGALSSYLNKVRVSPPLQFLSDSVQESVKNIPLIGKDIPEELKNIKGSVRRLAVPKVGAVFEELGFTYMGPIDGHDIGNLVNTFNAAQNLKNCTCSCCHN

SEQ ID NO: 111508 - protein, 270 aa, Unknown
  Bacterial polypetide isolated from the Sargasso Sea
MVEFSEQHPDKFFDVAIAEQHSVTLAAGMAIEGLKPIVAIYSTFLQRAYDQLIHDVSLQNLNVTFAIDRAGAVGSDGPTHQGAFDLAFLRCIPNMTIMTPSSKEKLWKMLNTGFNHEGPVAIRYPRGEAKGDKFEKDKSCIDFGKSDLIKEAKSEEVVILSFGSCLELALEISNAIEATIIDMNFVKPLDEKRILQCSSYKIIVTLEENSLKGGAGSSVNEVLTSNNIKTDILSFGFPDQFLPHGDQDNQKLNAGLDKDQIIKKIKDRLN

SEQ ID NO: 111509 - protein, 129 aa, Unknown
  Bacterial polypetide isolated from the Sargasso Sea
MQPSLLSKIKSPADIKDFSIDELILLSNEIRAHTINVVSEIGGHLAPTLGVVELTVAIHKVFDTPDDKIVWDVGHQGYAHKLLTGRFESFPSIRKLGGLSGFLKRSESEYDTFGAGHASTSISAATGIA

SEQ ID NO: 111510 - protein, 280 aa, Unknown
  Bacterial polypetide isolated from the Sargasso Sea
MSAGMAYEAMNNAGASKTKMIVILNDNDMSIAKPVGAMRTYLAKLLTGKIYFSFRETIKLITSAFSKRFSAKAGKAEDFLRSAFTGGTMFNSLGFYYVGPIDGHDLSTLIPILKNAKDSNHEGPIMIHIKTQKGKGYTYAEEAKDHFHGVSKFNVDTGEQNKSGSNLPSYTKVFANTLVKHAKKDSKIVGITAAMPGGTGMDIFGKEFPKRMFDVGIAEQHAVTFAAGMATEGYKPYAAIYSTFLQRAYDQVVHDVAIQSLPVRFAIDRAGLVGADGSTH

SEQ ID NO: 111511 - protein, 319 aa, Unknown
  Bacterial polypetide isolated from the Sargasso Sea
EKKDLKQISEELRSELIDVVSETGGHLGAGLGVIELTVALHYVFNTPKDKLVWDVSHQCYPHKIITGRKNEIRTLRKGGGLSGFTKRDESEYDPFGAAHSSTSISSTLGISVAKKLSNDKNNVIAVIGDGAMSAGMAYEAMNNAGALKSKLIVILNDNEMSIAKPVGAMSKYLAKLLSGKLYFSLRETIKLIMSAFSKRFSQKAGKAEDILRGIVTGGTLFSELGFYYIGPIDGHDVNYLVEILENVKNSNHNGPILIHAITQKGKGYKPAEQSGDKYHGVSKFNISTGQQSKSSNNAPSYTKVFSETLIKHAEKDTKI

SEQ ID NO: 111512 - protein, 119 aa, Unknown
  Bacterial polypetide isolated from the Sargasso Sea
KIVAITGAMPSGTGLDIFQKKFPDRMFDVGIAEQHGVTFAAGLATEGYKPYAAIYSTFLQRAYDQVVHDVAIQSLPVRFAIDRAGLVGSHRATHAGSFDTTYLSTLPNFVVMAASDEAE

SEQ ID NO: 111513 - protein, 295 aa, Unknown
  Bacterial polypetide isolated from the Sargasso Sea
APSYTSIFGQTLVKEATLDEKIVAVTAAMPSGTGLNIFQDGFPGRTFDVGIAEQHAVTFCAGMAAGGLKPFCAIYSTFLQRGYDQIVHDVALQKLPVRFAIDRAGLVGADGATHAGSFDVAYLSNLPGFVVMAAADELELMHMIRTSAEYNDGPISFRYPRGEGIGVELPERGEVLELGKGRICKEGNRVAILSFGAHLKEALDASEELEQLGISVTVADARFAKPLDVDLVKVLSENHELLITLEEGSIGGFGSHVVDWLLKNNMINNNLKVRSLFLPDKFIDQASPNVMYKEA

SEQ ID NO: 111514 - protein, 213 aa, Unknown
  Bacterial polypetide isolated from the Sargasso Sea
SSFSKRFSQKAGKAEDLLRNIVTGGTLFSELGFYYVGPIDGHDVENLVQIFENVKNSNHQGPILIHVRTQKGKGYKPAENSGDKYHGVSKFNISTGKQTKSNSNAPSYTKVFAETLIKHAEQDTKIVGITGAMPSGTGLNLFEKKFPERTFDVGIAEQHAVTFAAGLATEGYKPYAAIYSTFLQRAYDQVVHDVALQSLPVRFAIDRAGLVGA

SEQ ID NO: 111515 - protein, 278 aa, Unknown
  Bacterial polypetide isolated from the Sargasso Sea
SKRFKNQAGKAEDFLRSAVTGGTLFNSMGFYYIGPIDGHDIDSMVSVFNNAKDINYDGPILIHVKTEKGKGYSFAEKSEDKFHGVSKFNIKTGEQEKSKSNTPSYTKVFANSLIKHAEKDSKVVGITAAMPSGTGMDLFRKKFPERMFDVGIAEQHAVTFAAGMATEGYKPFAAIYSTFLQRAYDQVVHDVAIQSLPVRFAIDRAGLVGADGPTHAGSFDITYLSTLPNFVVMAASDEAELVRMINTSMDINDRPSAFRYPRGNGVGVQLPEITEKIE

SEQ ID NO: 111516 - protein, 325 aa, Unknown
  Bacterial polypetide isolated from the Sargasso Sea
VELTVALHYVFNTPKDKLVWDVSHQCYPHKIITGRKKEIKTLRKGGGLSGFTKREESEYDPFGAAHSSTSISSTLGMSVAKKLSNDNNNVIAVIGDGAMSAGMAYEAMNNAGALKSKLIVILNDNKMSIAKPVGAMSKYLAKLLSGKIYFSLRETIKLVTSAFSKRFSQKAGKAEDILRGIVTGGTLFSELGFYYIGPIDGHDVDYLVQILENVKKSKHEGPILIHTITQKGKGYKPAEESGDKYHGVSKFNVSTGQQSKSKSNVPSYTKVFSETLIKHAEKDTKIIGITGAMPSGTGLNLFEKRFPDRMFDVGIAEQHAVTSQR

SEQ ID NO: 111517 - protein, 276 aa, Unknown
  Bacterial polypetide isolated from the Sargasso Sea
MKKNYKFLNNINFPSDIKKLSHNELKILAEEVREEMIDAVSETGGHLGAGLGVVELTAVLHYVFNTPNDKIIWDVGHQSYPHKILTGRKDKIRTLRKGNGLSGFTKRSESEYDPFGAAHSSTSISSALGIAIANKLSNKSGSVIAVIGDGAISAGMAYEAMNNAGSSKTKLIVVLNDNDMSIAKPVGAMRAYLAKIFTGKIYFSLRETVKLIISAFSKRFSKKAGKAEDFLRSAVTGGTLFNSMGFYYVGPIDGHDIEALISVLKNAKEVNYEGPI

SEQ ID NO: 111518 - protein, 164 aa, Unknown
  Bacterial polypetide isolated from the Sargasso Sea
MKYNFLNNINFPDDLRSYKDEDLKDIAKELRHKTIDAVSKTGGHLGAGLGVIELTIAIHYIFDTPKDKLIWDVGHQAYPHKILTGRKKQIETLRQEDGLYGFVKRSESEYDTFGTAHSSTSISAGLGIKIAQELKKDDSKVICVIGDGALSAGMAYEALNNAGA

SEQ ID NO: 111519 - protein, 289 aa, Unknown
  Bacterial polypetide isolated from the Sargasso Sea
SVYSLGFYYIGPIDGHDLNSLVPILKNARDSKHEGPILIHIKTKKGKGYSFAEKAKDNFHGVTKFNVETGEQSKSSSKLPSYTKVFANTLVQHAKKDSKIVAITAAMPDGTGLDVFRKEFPDRTFDVGIAEQHAVTFAAGLATENFKPYAAIYSTFLQRAYDQVVHDVAIQSLPVRFAIDRAGLVGADGPTHAGSFDTTYLSTLPNFVVMAASDEAELVRMINTSTEINDRPCAFRYPRGTGLGSVLPTINEKIEIGKSKIIQEGNKLAILNFGARLNETLKAAENLKK

SEQ ID NO: 111520 - protein, 281 aa, Unknown
  Bacterial polypetide isolated from the Sargasso Sea
NNVIAVIGDGAMSAGMAYEAMNNAGALKTDLLIILNDNDMSIAPAVGALSNYLSNVVSSRPFNNVREIAKQMVNLFPKEIGETAKRAESLARNFLGNAEGTIFSQMGMNYLGPIDGHDVKSMVKILQNLKNGSQDKPILLHVVTEKGRGHPFSKGSHEKYHAVSEFNVITGDSVKLSSNAPTYTNVFAETLCKIAEKDKKVLAITAAMPSGTGLNKFAEKFQDRFYDVGIAEQHAVTFAAGMASEGLKPFVAIYSTFLQRAYDQVVHDVVIQNLPVRFMLD

SEQ ID NO: 111521 - protein, 234 aa, Unknown
  Bacterial polypetide isolated from the Sargasso Sea
AIQKLPVRFAIDRAGLVGSDGPTHAGSFDITYLATLPNFIVMAPSNQRELTNMIELSCEINDTPSAFRFPRGTGSDELFKNQPIDINIGKGYILIEGNDVAILNLGTRLEKCIEASNFLNQNNIYPTIADARFAKPLDTQLIDNLLNNHKYILTIEEGSIGGFSSHILHYVHNIRSKKDNVLIKNLIFPDRFVEHMTPDEQYQDIKMDTESIIREINNFYENKIIDIKSFKLKV

SEQ ID NO: 111522 - protein, 274 aa, Unknown
  Bacterial polypetide isolated from the Sargasso Sea
LHYIFNTPNDKLIWDVGHQCYPHKILTGRKDKIRTLRQGGGISGFTKRQESEYDPFGAAHSSTSISSALGIAEANRLSNKSDNVVAVIGDGAISAGMAYEAMNNAGASKTKMIVILNDNDMSIARPVGAMSTYLAKIFSGKIYFSLRETVKLIASAFSKRFSAKAGKAEDLLRSAVTGGTLFSSLGFYYIGPIDGHDLNSLLPILKNARDSKHDGPILIHIKTKKGKGYSFAEKAKDNFHGVSKFNVETGEQSKSLSKLPSYTKVFANTLVQPC

SEQ ID NO: 111523 - protein, 205 aa, Unknown
  Bacterial polypetide isolated from the Sargasso Sea
MKKKYELLDEINFPSDLKKLPESKLQKVADELREEMIDAVSVTGGHLGASLGVVELTVALHYIFNTPNDKLIWDVGHQCYPHKILTGRKDRIRTLRQGNGLSGFTKRSESEYDPFGAAHSSTSISSALGIAEANKLSNKSDNVIAVIGDGAISAGMAYEAMNNAGASKTKMIVILNDNDMSIARPVGAMSTYLAKIFSGKIYFSL

SEQ ID NO: 111524 - protein, 277 aa, Unknown
  Bacterial polypetide isolated from the Sargasso Sea
MRKKYEFLDEINFPSDLKKIPETKLQKVADELREEMIDAVSVTGGHLGASLGVVELSIALHYIFNTPNDKLIWDVGHQSYPHKILTGRKDRIRTLRQGKGLSGFTKRSESEYDPFGAAHSSTSISSALGIAVANKLSNKSDNVIAVIGDGAMSAGMAYEAMNNAGASKTKMIVILNDNDMSIARPVGAMSTYLAKIFSGKIYFSLRETLKLIMSAFSKRFSAKAGKAEDLIRSAVTGGTLFSSLGFYYIGPIDGHDLNSLISILKNARDTKHQGPIL

SEQ ID NO: 111525 - protein, 105 aa, Unknown
  Bacterial polypetide isolated from the Sargasso Sea
MKFFKEIPNSRPSTPLLDEINSPKDLKPLTLEQLKNLADELRAFLLYQVGQTGGHLGGGLGVVELTVVLHYLFNTPDDNLIWDVGHQAYPHKILTGRRDKLKTIR

SEQ ID NO: 111526 - protein, 302 aa, Unknown
  Bacterial polypetide isolated from the Sargasso Sea
MKKNYKFLNNINFPSDIKKLSQNELKTLSQEVRDEMIDAVSETGGHLGAGLGVVELTVVLHYIFNTPNDKLIWDVGHQSYPHKILTGRKDKIRTLRKGNGLSGFTKRSESEYDPFGAAHSSTSISSALGIAIANKLSNKSDNVIAVIGDGAISAGMAYEAMNNAGSSKTKLIVILNDNDMSIAKPVGAMRAYLAKIFTGKIYFSLRETVKLIISAFSKRFSKKAGKAEDFLRSAVTGGTLFSSMGFYYVGPIDGHDIDALVPVLKNAKDVNYEGPIMIHVKTQKGKGYSFAEKSEDKYHGVQ

SEQ ID NO: 111527 - protein, 264 aa, Unknown
  Bacterial polypetide isolated from the Sargasso Sea
HYVFNTPQDKLVWDVGHQCYPHKIITGRKDKIRTLRKGGGLSGFTKRAESEYDPFGAAHSSTSISSTLGMATAKRLSNDKNNVVAVIGDGAMSAGMAYEAMNNAGAMKSKLIVILNDNDMSIARPVGAMSKYLARLLSGKIYFSLRETIKLILSSFSKRFSKSAGKAEDMLRSFVTGGTLFNQLGFYYIGPIDGHDVNNLVTILENVKNSKHEGPILIHAVTKKGKGYKPAEDSGDKYHGVSKFNVLTGVQSKGQSKAPSYTKV

SEQ ID NO: 111528 - protein, 204 aa, Unknown
  Bacterial polypetide isolated from the Sargasso Sea
MHIEKIKSPADLRALDQDQLEELCREIREFLVDAVSRTGGHLGSNLGAVELTIAVHRVFESPRDVILWDTGHQAYVHKLVTGRADMFSSLRQRHGLSGYPSNTESEHDIVENSHASTSLSWASGLSAGFDLTGHKHRQVVAVIGDGSMTGGMAFEALNNLGHYGQRAVIILNDNGRSYAPTVSRLATVMSRVRQSPNYGKADRQ

SEQ ID NO: 111529 - protein, 297 aa, Unknown
  Bacterial polypetide isolated from the Sargasso Sea
KASGPKYSGVFGEWLCDMAAADPRLVGVTPAMKEGSDLVAFSERFPLRYFDVAIAEQHAVTFAAGMACEGAKPVVAIYSTFLQRGYDQLVHDVAVQNLDVLFAIDRAGLVGEDGPTHAGSFDLSYLRCIPGMLVMTPSDENELRKMLSTGHLYNGPAAVRYPRGTGPNAVIEKDLEPIEIGKGIVRRQGSKTAFLVFGVQLAEALKVAEKIDATVVDMRFVKPLDDALVREIAAGHELLVTVEENAIMGGAGAAVSEFLARENILKSVLHLGLPDVYVEHAKPAQMLAECGLMRRVS

SEQ ID NO: 111530 - protein, 314 aa, Unknown
  Bacterial polypetide isolated from the Sargasso Sea
KKQIRTLRKGEGLSGFTKRSESEYDPFGAAHSSTSISSALGIAVANKLSNKSGNVIAVIGDGAISAGMAYEAMNNAGGSKTKMIVVLNDNDMSIAKPVGAMRKYLAKILSGKVYFSFRETLKLIISAFSKRFKNQAGKAEDFLRSAVTGGTLFNSMGFYYIGPIDGHDIDSMVSVFNNVKDINYDGPILIHVRTEKGKGYSFAEKSEDKFHGVSKFNVKTGEQEKSKSSTPSYTKVFANSLIKHAEKDSKVVGITAAMPSGTGMDLFGKKFPERMFDVGIAEQHAVTFAAGMATEGYKPYAAIYSTFLQRAYDQ

SEQ ID NO: 111531 - protein, 104 aa, Unknown
  Bacterial polypetide isolated from the Sargasso Sea
MSKNYQYLKNINFPSDIKKLSSSELKKLVDEVREELISVVSETGGHLGAGLGVVELTVALHYVFDTPNDKLIWDVGHQTYPHKILTGRKDKIRTLRQGNGLSGF

SEQ ID NO: 111532 - protein, 206 aa, Unknown
  Bacterial polypetide isolated from the Sargasso Sea
MPKTFTQIPLTRPATPLLDTLTSPAELRRLPATRLEQVVDELREYLLYAVGQCGGHFGAGLGVVELTVALHYLYNTPDDRLVWDVGHQCYPHKILTGRREGITSIRQQDGLSGFPKRSESEYDTFGVGHSSTSISAALGMALGAEMAGSDRRAVAIIGDGAMTAGQAFEAMSHAAHTRSNLLVILNDNNMSISHNVGGLSNYFARI

SEQ ID NO: 111533 - protein, 143 aa, Unknown
  Bacterial polypetide isolated from the Sargasso Sea
MSSLLDKINYPHDLRRFNKEDLPLIAEELRKELIDAVSTTGGHLGAGLGVVELTLAIHYIFDTPKDRLIWDVGHQAYPHKIITGRKDKIRTLRQGKGLSGFTKRSESEYDPFGAAHSSTSISAGLGMSVARDLDGKTNNIISV

SEQ ID NO: 111534 - protein, 266 aa, Unknown
  Bacterial polypetide isolated from the Sargasso Sea
DRAFDVGIAEQHAVTLSAGMATQGMVVFCNIYSTFLQRAYDQVIHDVTLQNLPVIFCLDRAGIVGEDGATHHGVFDLAYLRCIPNMIIYAPKNELDLQNILYTASLGLNHPIAIRYPRGRGKNPNFKISKRSFQKIEIGKAHLLKKGTKVAVLSTGFIGNNVSKALESIQNKNDFAHYDFSFVKPLDEMLLHEIFGKHTSIITIEDGVIKGGFGSAVCEFAVTNNYTNSVKVLGIPDAFIEHGTIDELQQICKIDVKSLEILFSKY

SEQ ID NO: 111535 - protein, 341 aa, Unknown
  Bacterial polypetide isolated from the Sargasso Sea
SPQNFLLGRKEKIISIRKRGGLAPFPLRSESEYDAFGVGHSSTSLSALVGMAEATKNSNPDKKHVAVIGDGAMTAGMAFEALSHIGHLKPNLLVILNDNDMSISENVGGLSNYFSRIWASKTYKGIKKSGSSFLKPLPQAYHLARKVETQMKAMVAPGTIFEELGLNYIGPIDGHNLKELKDVISNLKEFEGPQFLHVITKKGAGLDSAEADRIGFHAIGKINAIKDKKIKQKKYQDIFGEWIIDMAKISDNLIGITPAMREGSGLVEFSKKFPDRYFDVAIAEQHSVTFAAGLSVESKKPVVAIYSTFLQRAYDQLIHDVAVQNLDVTFALDRSGSCWVK

SEQ ID NO: 111536 - protein, 195 aa, Unknown
  Bacterial polypetide isolated from the Sargasso Sea
ALHYVFDTPKDKLVWDVSHQCYPHKLITGRRERIKTLRKGGGLSGFTKRTESEYDPFGAAHSSTSISSTLGMSVAKKLSNNNNNVIAVIGDGAMSAGMAYEAMNNAGALKSNLIVVLNDNDMSIARPVGAMSKYLANLLSGKLYFSFRETLKMIISAFSKRFSQKAGKAEDMLRNMVTGGTLFRELGFYYVGPID

SEQ ID NO: 111537 - protein, 244 aa, Unknown
  Bacterial polypetide isolated from the Sargasso Sea
AAGLACENKKPVVAIYSTFLQRAYDQLIHDVAVQNLDVTFALDRSGLVGEDGPTHSGNYDIAYLRCIPNMIICTPSDENEARHLLTTAFLHKGPASVRYPRGIGPNTKINEDLDPFDIGKAKLIIKGSPKIIILNFGALISEAKEVASSLELTLIDMRFVKPLDEEILKEYLSKADWFITIEDGSIMGGAGSSVQEFCSREGINIKSILFGIPDKFIDHASREEMIEGAGLSANKIKSKLKKLL

SEQ ID NO: 111538 - protein, 240 aa, Unknown
  Bacterial polypetide isolated from the Sargasso Sea
TEGLKPIVAIYSTFLQRAYDQLIHDVSLQNLNVTFAIDRAGAVGSDGPTHQGAFDLAFLRCIPNMTIMTPSSKEKLWKMLNTGFNHDGPVAIRYPRGEAKGDKFEKDNSCIELGKSDQIKETRTEEVAILSFGSCLELALEISNAIEATIIDMNFVKPLDEKRILQCSAYKIIVTLEENSLKGGAGSAVNEVLTSNNIKTDILSFGFPDQFLPHGDQDNQKLNAGLDKDQIIKKIKDRLN

SEQ ID NO: 111539 - protein, 177 aa, Unknown
  Bacterial polypetide isolated from the Sargasso Sea
MVNKDKKNKPSSTSMLDEIDNPHDLKFLKIEDLGNLSRELRSDMIDIVSKTGGHLGAGLGVVELAVAIHYVFDTPNDRLIWDVGHQAYPHKILTARRHKMSTLRKAKGLSGFTKRTESVYDPFGAGHSSTSISAALGMAVARDKLGKTNNVIAVIGDGAMSAGMAYEAINNAGSLKT

SEQ ID NO: 111540 - protein, 258 aa, Unknown
  Bacterial polypetide isolated from the Sargasso Sea
RKIIKKISKTLPSNLSKTLYRTEEYSKGLITGGTLFEELGFYYLGPIDGHNVDNIVSVLENIRDNKFDKPVFLHCITKKGKGYSPAEKSEDKFHGVEKFDINTGNSIKKTNLKSYSNVFGETLTKLARNDEKIVAITAAMMSGTGLKLFKQNFEKRFFDVGIAEQHAVTMAAGLATEGFKPFVAIYSTFLQRAYDQIVHDVAIQKLPVRFAIDRAGLVGSDGPTHAGSFDITYLATLPNFIVMAPSNQRELSNMIELS

SEQ ID NO: 111541 - protein, 285 aa, Unknown
  Bacterial polypetide isolated from the Sargasso Sea
MSKLLDQINFPADLRKFEKDKLRQISDELRDELIEVVSETGGHLGAGLGVVELTIALHYVFNTPKDKLVWDVGHQCYPHKIITGRKNKIRTLRQGGGLSGFTKRSESEYDPFGAAHSSTSISSTLGMAVAKKLSNDSNNVIAVIGDGAMSAGMAYEAMNNAGALKSKLIVVLNDNDMSIARPVGAMSKYLPKLLSGKIYFSLRETIKLIISAFSKRFSQKAGKAEDILRGIVTGGTLFSELGFYYIGPVDGHDVNNLVSIFENVQNSNHQGPILIHTITKKGKGY

SEQ ID NO: 111542 - protein, 287 aa, Unknown
  Bacterial polypetide isolated from the Sargasso Sea
MIVILNDNDMSIARPVGAMSTYLAKIFSGKIYFSLRETIKLITSAFSKRFSAKAGKAEDLLRSAVTGGTLFSSLGFYYIGPIDGHDLNSLIPILKNARDSKHEGPILIHIKTKKGKGYLFAEEAKDHYHGVSKFNVKTGEQVKSTIKIPSYTKVFANTLVQHAKKDSKIVAITAAMPDGTGLDIFSKEFPERTFDVGIAEQHAVTFAAGLATENYKPYAAIYSTFLQRAYDQVVHDVAIQSLPVRFAIDRAGLVGADGPTHAGSFDTTYLSTLPNLLLWLQVMRLNL

SEQ ID NO: 111543 - protein, 107 aa, Unknown
  Bacterial polypetide isolated from the Sargasso Sea
MHLSELSHPNELHGLSSSELEDVARQIREKHLKTVSTSGGHLGPGLGVVELTLALYQTLDLDHDRVVWDVGHQAYPHKLITGRFNEFHTLRQKDGVAGYLKRSESSF

SEQ ID NO: 111544 - protein, 322 aa, Unknown
  Bacterial polypetide isolated from the Sargasso Sea
NKVRLSPPLQFLSDSVQEGVKNIPLIVKDIPEELKNIKGSVRRLAVPKVGAVFEELGFTYMGPIDGHDIGNLINTFNTAHRLKKPVLVHVVTTKGKGYPYAEADQVGYHAQSAFDLTTGKSIPSNKPKPVSYSKIFGQTLLKICEQDSKVIGITAAMATGTGLDILQKNIPDQYVDVGIAEQHAVTLAAGMSCDGLKPVVAIYSTFLQRAFDQLIHDVGIQNLPVSFVLDRAGIVGADGPTHQGQYDISYMRSIPNFVLMAPKDESELQRMLITSINHKGPTALRIPRGSGLGVAVMDEGWEPINIGEAEILEEGNDILIIA

SEQ ID NO: 111545 - protein, 285 aa, Unknown
  Bacterial polypetide isolated from the Sargasso Sea
MVEFEQRFPDRYYDVGIAEQHAVTFAGGLACEGLKPVVAIYSTFLQRGYDQLIHDVALQNLPVVFALDRAGLVGADGATHAGAYDIAYLRCIPNMMVMTPADENECRQLLSTAFAQDGPTAVRYPRGAGTGVAVQPTLEPLPVGKAEVRRASTAPAGQRVAILAFGSMVAPASAAAERLDATVVNMRFVKPLDVACVLEMARTHDYVVTVEEGCVMGGAGSACLEALACAGVATPVLQLGLPDRFVDHGDHAALLAQCGLDANGILACIRERFAVQPRAAAPRVA

SEQ ID NO: 111546 - protein, 106 aa, Unknown
  Bacterial polypetide isolated from the Sargasso Sea
MAIKDKKTKSVTTPLLDKVNNPHDLKFLKLEDLDQLSSELRSDMIDIVSKTGGHLGAGLGVVELAIAIHYVFDTPDDRLIWDVGHQAYPHKILTNRRHEMSTLRKS

SEQ ID NO: 111547 - protein, 282 aa, Unknown
  Bacterial polypetide isolated from the Sargasso Sea
KINYPSELRKHKKEDLKQISDELRKELIDVVSETGGHLGAGLGVVELTVALHYVFDTPKDKLVWDVSHQCYPHKIITGRRDRIKTLRKGGGLSGFTKRTESQYDPFGAAHSSTSISSTLGIAVAKKLSNNKNNVIAVIGDGAMSAGMAYEAMNNAGALKSNLIVVLNDNDMSIARPVGAMSKYLANLLSGKLYFSLRETIKMIISSFSKRFSQKAGKAEDLLRNIVTGGTLFNELGFYYVGPIDGHDVENLVQIFENVKNSNHQGPVLIHVRTKKGKGYKPA

SEQ ID NO: 111548 - protein, 260 aa, Unknown
  Bacterial polypetide isolated from the Sargasso Sea
PERYYDVGIAEGHAVTFSAGLATQGIRPIVAIYSTFLQRAFDHIVHDVSVQNLPVIFCMDRSGIAGEDGPTHHGALDIPYFRCIQGMILTAPKNGNELRNLLYTALNHNGPFGIRYPKFSSVEFDRNGQADLLPIGSWEVEKKGEDLLILATGPMVYSALSVASDLDQENISCEVVNCRFIKPMDTAYLNSIIKRRFDKIITIEEGVINGGFGDGVSSYLLENGYRGAIKRLGLPDSYVEHGSRNQILNSLSLDNDGIKK

SEQ ID NO: 111549 - protein, 301 aa, Unknown
  Bacterial polypetide isolated from the Sargasso Sea
KFNINTGVQEKSKSNTPSYTKVFANTLIKHAEKDSKIIGITAAMPSGTGMDIFGEKFPSRMFDVGIAEQHAVTFAAGLATEGYKPFAAIYSTFLQRAYDQVVHDVAIQSLPVRFAIDRAGLVGADGPTHAGSFDITYLSTLPNFIVMAASDEAELVRMINTSVDINDRPSAFRYPRGNGVGVDLPTINEKIEIGKGRIISEGKKIALLNFGTRLNECLIAKESLAKKGINITLIDARFVKPLDQNLIWQISTDHEALITIEEGSIGGFGSHVAQFLSEKNLLDSNLKFRSMILPDRFMIKT

SEQ ID NO: 111550 - protein, 246 aa, Unknown
  Bacterial polypetide isolated from the Sargasso Sea
MSILSKINLPKDLKKLSFNQLRKLNDELRDYTIHVVSKTGGHLGASLGVIELTSALHYVFDTPRDKIIWDVGHQTYPHKILTGRKSKIHTLRKKNGLSGFTKRSESIYDPFGAAHSSTSVSANLGITAARDMLNQNFDVISIIGDGAISAGLAYEGLNNLGHLNRNSLIILNDNEMSIAEPVGAMSKYLVKLLSSKSYESFRDIIKNFTKRLPNEVGDFAKKTEGYLKGYLTGNTLFEELGLNYLG

SEQ ID NO: 111551 - protein, 267 aa, Unknown
  Bacterial polypetide isolated from the Sargasso Sea
MKFKVLDKIEYPSDIKKLDDRELIALSKELREFLIDTVSKTGGHLAAGLGTIELTIALHKVFDTPKDKLIWDIGHQCYPHKILTGRKDKMKTLRMKDGISGFLKRQESEYDSFGAGHSSTSISAAVGIDQANIINKDDADVVAIIGDGGLTAGMAYEALCHAGDLKSNILVILNDNDMSISPNVGAIHNYLTKMLTSKTLKNIKDGSKKVLSKIKPIENLARRVEGGAKNLITPGLLFEELGFKYYGPVDGHDLLDTIKLLKNLKAR

SEQ ID NO: 111552 - protein, 262 aa, Unknown
  Bacterial polypetide isolated from the Sargasso Sea
AEQHAVTFAAGMAAEGYKPFAAIYSTFLQRAYDQVVHDVAIQNLPVRFAIDRAGLVGADGQTHAGSFDVAYLGCLPNFVLMACADEAELCHMVATAVAYDEGPCAFRFPRGESVGVDMPEIGEILEIGKGRIIQEGSKVAILSYGGRMVEVLKAADELAAKGLPATIADARFAKPLDTDLVERLAKEHEVLITIEEGSIGGFAARVMDHLIRHDKIVPGLKIRPMTLPDKFQNQASPFDMYDEAELNARHITATALEALGIN

SEQ ID NO: 111553 - protein, 202 aa, Unknown
  Bacterial polypetide isolated from the Sargasso Sea
MLERIQTPGDLRSLSVEQLEELAAEIRTAICDQVSRTGGHLAPNLGVVELTIAMHTVFDFGHDRLLFDVGHQCYPHKLLTGRQSLLGKLRTREGMAGFPEPRESAYDLFSVGHAGTAVSTAVGMARGDSLNGESWSPETPMGRRVVSIVGDASIVNGVAMEGLNNAGTLKRQFLVVLNDNGMSISRPQGAVAQYFDRVRINP

SEQ ID NO: 111554 - protein, 216 aa, Unknown
  Bacterial polypetide isolated from the Sargasso Sea
FAAGMATEGYKPYAAIYSTFLQRAYDQVVHDVAIQSLPVRFAIDRAGLVGADGPTHAGSFDITYLSTLPNFVVMAASDEAELVRMINTSMDINDRPSAFRYPRGNGVGVQLPEITEKIELGKAKIIKDGKKVAILNFGARLQECILASENLIKKGIDISIIDARFAKPLDENLIWQIATEHEVLITIEEGSIGGFGSHVSQFLSEKNLLDSNLKFR

SEQ ID NO: 111555 - protein, 101 aa, Unknown
  Bacterial polypetide isolated from the Sargasso Sea
MKQNYKFLDKINFPSDIRKLSENDLQNVSDEVRKEMISAVSETGGHLGAGLGVVELTVALHYVFDTPNDKLIWDVGHQSYPHKILTGRKNKIRTLRQGNGL

SEQ ID NO: 111556 - protein, 303 aa, Unknown
  Bacterial polypetide isolated from the Sargasso Sea
PHIRSTSISSTLGMSVAKKLSNDNNNVIAVIGDGAMSAGMAYEAMNNAGALKSKLIVILNDNDMSIAKPVGAMSKYLARLLSGKIYFSFRETIKLITSAFSKRFSQKAGKAEDILRGIVSGGTLFSELGFYYIGPIDGHDVDYLVKILDNVKNSNHNGPILIHAVTEKGKGYKPAEISGDKYHGVSKFNITTGQQDKSKSTKPSYTKVFAEALIKHAERDTKIIGITGAMPSGTGLNLFEKKFPDRMFDVGIAEQHAVTFAAGLATEGYKPFAAIYSTFLQRAYDQVVHDVALQSLPVRFAID

SEQ ID NO: 111557 - protein, 278 aa, Unknown
  Bacterial polypetide isolated from the Sargasso Sea
MSYKNLNKINFPSDLRNLTLVELEDLSKELRFKTIETVSKTGGHLGAGLGVVELTIALHYVFNTPRDRLIWDVGHQSYPHKILTGRKNKIETLRQKNGLYGFVKRSESDYDPFGTAHSSTSISAGMGMKIAKDLNKDDAKIICVIGDGALSAGMAYEALNNVGASNKQMIVILNDNEMSIDRPVGAMSNYLTKLLSSKQYTNVRSLLKKISSKLPNSVSKTLYKAEEFSKGLVTGGTLFEELGFYYLGPIDGHDIKTLVPVLENMKKSNVDKPILSTL

SEQ ID NO: 111558 - protein, 286 aa, Unknown
  Bacterial polypetide isolated from the Sargasso Sea
AEEYARGIVTGGTLFEELGFYYIGPIDGHNIQHLIPVLKNIRDKREQGPILVHVVTQKGYGYSPAEQSSDKFHGVSKFNIKTGTQNKTKKGPPSYTSVFSKELINLAKKDKKIVAITAAMPSGTGLDDFAEKFPERFFDVGIAEQHAVTFAAGLAAEGMKPFATIYSTFLQRAYDQIIHDVAIQELPVRFAIDRAGLVGADGPTHAGSFDIAYLANIPKMVLMAAADENELKRMVLTAANINDQPSAFRYPRGESIGILSPKKTEPLTIGKGRIIKKGNKVAILSF

SEQ ID NO: 111559 - protein, 212 aa, Unknown
  Bacterial polypetide isolated from the Sargasso Sea
MSVLSRVKLPKDLKKLSFSELQKLNDELRDYTIEIVSKTGGHLGASLGVVELTVALHYVFNTPSDKIIWDVGHQTYPHKILTGRKNKIHSLRKKNGISGFTKRSESIYDPFGAAHSSTSISASLGITAARDILNKDFDVISVIGDGAISAGMAFEGLNNLGHLNKNSLIILNDNEMSIAEPVGAMSKYLVNLLSSKSYEGFRDIIKNFTKRL

SEQ ID NO: 111560 - protein, 268 aa, Unknown
  Bacterial polypetide isolated from the Sargasso Sea
ERHLQVVSTSGGHLGPGLGVVELTLALYQTLDLDFDKVVWDVGHQGYPHKLITGRFSQFDSLRQQNGVAGYLKRSESKFDHFGAGHASTSISAALGMAIARDRKGENYKCVAVIGDGALTGGMALEAINHAGHLPNTPLVVVLNDNDMSISPPVGALSSYLNKVRVSPPLQFLSDSVQESVKNIPLIGKDIPEELKNIKGSVRRLSVPKVGAVFEELGFTYMGPIDGHDLGNLVKTFNAAHKLKRPVLVHVVTTKGKGYPYAEADQVG

SEQ ID NO: 111561 - protein, 248 aa, Unknown
  Bacterial polypetide isolated from the Sargasso Sea
FAAGLACEGKKPVLAIYSTFLQRAYDQLIHDVAIQNLDLLIAIDRAGLVGEDGATHSGIFDLSFMRCIPNLVIMTPSSEEECWRLLETGYKFEGPAAVRYPKGFGLGTDLPTEFEEIEIGKSKEIKFSETNKISILSFGSMFSLSDEISKDLDANLIDMRFVKPLDTSCIIKCANHSELIVTLEDNVVAGGAGSAINEFIAEENIKVKTINFGISDHFPSIGGISEQRKDYQLDKDKIVKKIKERLSK

SEQ ID NO: 111562 - protein, 262 aa, Unknown
  Bacterial polypetide isolated from the Sargasso Sea
FSKRAGRAEDMFRSIVTGGTLFNELGFYYIGPIDGHDVNNLVTILENAKNSKHEGPILIHAITKKGKGYKPAEESGDKYHGVSKFNVSTGKQSKGKSKVPAYTKVFANTLIKHAENDTKIVAITGAMPSGTGLDLFEKKFPERMFDVGIAEQHGVTFAAGLATEGYKPFAAIYSTFLQRAYDQVVHDVAIQSLPVRFAIDRAGLVGADGPTHAGSFDITYLSTLPNFVVMAASDEAELVRMINTSVSINDRPSAFRYPRGSG

SEQ ID NO: 111563 - protein, 269 aa, Unknown
  Bacterial polypetide isolated from the Sargasso Sea
VARDILDKKNNVVVVIGDGAMSAGMAWEALNNLGAQKRNMIVILNDNDMSISPAVGAVSSYLSKLISSQPLTSIRELAKQIASHLPTELEKAAKRADEIARTMMAGGTIFSNLGMYYVGPVDGHNIHDLVHVLKNLKEGNDLGPVLLHVITEKGRGHPFAKDALEKYHAVPKFDIITGQHKKSASKIKTYTQVFSSSLINQAEKDDKIVAVTAAMPSGTGLDRFSEVYPNRFFDVGIAEQHAVTFCAGMAAEGLKPFCAIYSTFLQRAV

SEQ ID NO: 111564 - protein, 228 aa, Unknown
  Bacterial polypetide isolated from the Sargasso Sea
FAIDRAGQVGADGPTHAGSFDIAFLSTLPNFIIMAPSNQNELIRMINTTLFINDRPSAFRYPRGTGELSNSDKDTEPVEIGKGVILNEGNDVAVLNLGSRLQSCNEAIKILNIRGINPTLADARFAKPIDTDLLDLLLDNHKYLLTIEEGSSGGFSASVLNYIHNKRIKLTSTKVNNIFFPDKFVDHQSPDDQYSEIGMDADSISKKILKIYEDNVINFQNYNKNIKN

SEQ ID NO: 111565 - protein, 266 aa, Unknown
  Bacterial polypetide isolated from the Sargasso Sea
MDGHNVKEIIRTLRNLNDTSGPKLLHLITKKGKGFKPAEVDPIGFHAITKMENPNASKKKNVGMKYSDVFGSWLTSKANVDPSLIAITPAMKEGSGMVEFADKFPSRFYDVAIAEQHAMTFAAGLACEGKKPVLAIYSTFLQRAYDQLIHDVAIQSLDLLIAIDRAGLVGEDGATHSGIFDLSFMRCIPNLIIMTPSSEEECWRLLETGYKFEGPAAVRYPKGFGLGTDLPTEFEEIEIGKSKEIKFSETNKISILSFGSMLSLSD

SEQ ID NO: 111566 - protein, 278 aa, Unknown
  Bacterial polypetide isolated from the Sargasso Sea
NKFDLKTGQSLNLSNKKTYSSVFGETLSNAAQSDEKIVAITAAMMSGTGLDIFNSQHPNRLFDVGIAEQHAVTMAAGLATEGFKPYVAIYSTFLQRAYDQIVHDVALQKLPVRFAIDRAGLVGADGPTHAGSFDITFLSTLPNFIIMAPSNPIDLIRMINTSVLINDRPSAFRYPRATSEIEIADNNIGPIEIGKGIILEEGNNLAILNLGSRLKSCQEAIKLLKTYNIYPTLADARFAKPIDTNLLDQLLDNHKYLITIEEGSSGGFGSSILNYIHN

SEQ ID NO: 111567 - protein, 245 aa, Unknown
  Bacterial polypetide isolated from the Sargasso Sea
MFKEKLLDKIKYPADLRKMKLQDLKLLSKELREELIDVVSTTGGHLGAGLGVVELTIALHYVFNTPKDKLVWDVGHQSYPHKIITGRRDSIRTLRKGGGLSGFTKRSESEYDPFGAAHSSTSISSTLGMAVANSLSNNSNHVIAVIGDGAMSAGMAYEAMNNAGAMKSKLIVILNDNDMSIARPVGAMSSYLARLLSGKTYFGFRETVKSITSIFSKKIKDKAGKAEEFIRNMVSGGTLFNELGF

SEQ ID NO: 111568 - protein, 248 aa, Unknown
  Bacterial polypetide isolated from the Sargasso Sea
AITAAMPDGTGLFIFRKEFPDRTFDVGIAEQHAVTFAAGLATENFKPYAAIYSTFLQRAYDQVVHDVAIQSLPVRFAIDRAGLVGADGPTHAGSFDTTYLTTLPNFIVMAASDEAELVRMINTSTEINDRPCAFRYPRGTGLGSILPSISEKIEIGKSKIIKEGKKLAILNFGARLKETLKAVENLSKKGVPITVVDARFAKPLDENLIWQLATTHEAIMTIEEGSIGGFGSHVVDFLTKKGLMDTNL

SEQ ID NO: 111569 - protein, 302 aa, Unknown
  Bacterial polypetide isolated from the Sargasso Sea
LTVALHYIFDTPNDKLIWDVGHQTYPHKILTGRKDKIRTIRQGNGLSGFTKRNESEYDPFGAAHSSTSISSALGIAIANKLSNKSNNVVAVIGDGAISAGMAYEAMNNAGYSNTKMIVILNDNDMSIAKPVGAMRFYLAKLLSGKLYFSLRETIKLIISAFSKRFSDKAGKAEDFLRSAVTGGTLFSSLGFYYVGPIDGHDLTALVHVLKNAKETKHEGPIMIHIKTEKGKGYTFAEKASDKYHGVSKFNVQTGIQEKSKVKAPAYTKVFANTLIKHAERDSKIIGITAAMPSGTGMDIFGE

SEQ ID NO: 111570 - protein, 256 aa, Unknown
  Bacterial polypetide isolated from the Sargasso Sea
MSKLLDQINFPADLRKFEKSKLKQISGELRDELINAVSETGGHLGAGLGVVELTVALHYVFNTPKDKLVWDVGHQCYPHKIITGRKDKIKTLRQGGGLSGFTKRSESEYDPFGAAHSSTSISSTLGMAVAKKLSNDNNNVIAVIGDGAMSAGMAYEAMNNAGALKSKLIVVLNDNDMSIARPVGAMSKYLPKLLSGKIYFSLRETIKLIISAFSKRFSQKAGKAEDILRGIVTGGTLFSELGFYYVGPVDGHDVNN

SEQ ID NO: 111571 - protein, 226 aa, Unknown
  Bacterial polypetide isolated from the Sargasso Sea
MPVRFAIDRAGLVGADGPPHAGSFDITYLSTLPNFIVMGASDEAELVKMINTSIDINDKPCAFRYPRGNGFGVDLPKIDERLIIGKGKIVKEGKQVAILNFGARLNKALLARENLKKRGINLTIVDARFAKPLDEQLIWQIANDHELLVTIEEGSIGGFGSHVSQFLAEKNFLDSKVKFRSMIFPDKFIDHDKPEQMYKIAGLDSDSIVEKILNALNSKIIIKKTN

SEQ ID NO: 111572 - protein, 290 aa, Unknown
  Bacterial polypetide isolated from the Sargasso Sea
DKIRTLRKGGGLSGFTKRSESEYDPFGAAHSSTSISSALGMAVANKLSNKSNEVVAVIGDGAMSAGMAYEAMNNAGTSKTKMIVILNDNDMSIAKPVGALRSYLAKLFSGKVYFSFRETIKLIISSFSKRFSKKAGKAEDFLRSAVTGGTLFNSLGFYYIGPIDGHDMDSLISVLKNAKQINFEGPIMIHIKTEKGKGYEFAERSDDKYHGVTKFNVNTGVQEKSQSANPSYTKVFANTLIKHAEKDSKIVGITAAMPSGTGMDIFAKKFPSRMFDVGIAEQHGVTFAAV

SEQ ID NO: 111573 - protein, 260 aa, Unknown
  Bacterial polypetide isolated from the Sargasso Sea
YEAMNNAGTMKSKLIVILNDNDMSIAPPVGAMSKYLARLLSGKIYFSLRETIKLILSAFSRRFSKKAAKAEDFLRSAVTGGTLFSQLGFYYIGPIDGHDVNNLVTILENVKNSKHDGPILIHAITKKGKGYKPAEESGDKYHGVTKFDVSTGKQSKSKSVGPSFTKVFANTLIKHAENDTKIVAITGAMPSGTGLDLFQKKFPERMFDVGIAEQHGVTFAAGLATEGYKPFAAIYSTFLQRAYDQVVHDVAIQSLPVRFA

SEQ ID NO: 111574 - protein, 144 aa, Unknown
  Bacterial polypetide isolated from the Sargasso Sea
MKVFKDFPTERPVTSFLDNIESPEDLKKLTIDELEVLADELREYLLYSVRQTGGHFGAGLGAIEITIALHYLLDMPSDKIVWDTGHQAYPHKILTGRRDKMHLMRKIDGLAAFPSIKESEYDAMSVGHSSTSISAALGMNEASK

SEQ ID NO: 111575 - protein, 304 aa, Unknown
  Bacterial polypetide isolated from the Sargasso Sea
LKLGGHLGAGFCVVELTIALHYVFNTPRDRLIWDVGHQSYPHKILTGRKHKIETLRQKNGLYGFVKRSESEYDPFGTAHSSTSISAGMGMKIAKDLNKDDAKIICVIGDGALSAGMAYEALNNVGASNKRMIVILNDNEMSIDRPVGAMSNYLTKLLSSKQYTNVRSLLKKISSRLSNGVSKTLYKAEEFSKSLVTGGTLFEELGFYYLGPIDGHDIKTLVPVLENIKNLSVDKPIFLHCITNKGKGYEPAEKSEDKFHGVNKFDLKTGQSIGSSNKKSYSSVFGETLSNAALKMKKLLQLLQP

SEQ ID NO: 111576 - protein, 291 aa, Unknown
  Bacterial polypetide isolated from the Sargasso Sea
LNLFEKKFPERTFDVGIAEQHAVTFAAGLATEGYKPFAAIYSTFLQRAYDQVVHDVALQSLPVRFAIDRAGLVGADGPTHAGSFDITYLSTLPNFVVMAASDESELVKMINTSVIINDRPSAFRYPRGNGVGIELPSINETLEIGKGRVIKNGKKVALLNFGTRLEECKKASDKLLLKGIDCTIIDARFAKPLDEKLIMEVASNHEVLISIEEGSIGGFGSHVMQFLSDRGIFDRGLKFRSMILPDFFIDQDSPEKMYEVAGLDHISISNKVEETLNSNIILAKNKNKISN

SEQ ID NO: 111577 - protein, 294 aa, Unknown
  Bacterial polypetide isolated from the Sargasso Sea
GGTLFNSMGFYYIGPIDGHDLDALTSVLKNAKEINIEGPIMIHIKTQKGKGYEFAEKSEDKYHGVSKFNISTGVQEKSKSNIPAYTKVFANTLIKHAEKDSKIVGITAAMPSGTGMDIFGEKFPSRMFDVGIAEQHAVTFAAGLATEGYKPFAAIYSTFLQRAYDQVVHDVAIQSLPVRFAIDRAGLVGADGPTHAGSFDITYLSTLPNFIVMAASDEAELVRMINTSVDINDKPSAFRYPRGNGVGVNLPSNDEKIIIGKGRVVKEGKKIALLNFGARLKECLIAEENLKKKG

SEQ ID NO: 111578 - protein, 245 aa, Unknown
  Bacterial polypetide isolated from the Sargasso Sea
MKKNYEFLDKINFPSDLKKVPESKLDKVASELREEMIDAVSITGGHLGASLGVVELSVALHYIFNTPNDKLIWDVGHQCYPHKILTGRKDKIRTLRQGGGLSGFTKRNESEYDPFGAAHSSTSISSALGIAEANKLSNKSDNVVAVIGDGAISAGMAYEAMNNAGASKTKMIVILNDNDMSIARPVGAMSTYLAKIFSGKIYFSLRETIKLITSAFSKRFSAKAGKAEDLLRSAVTGGTLFSSLG

SEQ ID NO: 111579 - protein, 272 aa, Unknown
  Bacterial polypetide isolated from the Sargasso Sea
MIHIKTKKGKGYSFAEKSEDKYHGVTKFNVNTGVQEKSKSNAPSYTKVFANTLVKHAEKDSKIIGITAAMPSGTGMDIFGKKFPSRMFDVGIAEQHAITFAAGLATEGYKPFAAIYSTFLQRAYDQVVHDVAIQSLPVRFAIDRAGLVGADGPTHAGSFDITYLSTLPNFVVMAASDESELVKMINTSIDINDRPSAFRYPRGNGIGIELPNLNEKLEIGKGRIIKEGKNVALINFGARLNECLIARENLIKKGINLTLVDARFVKPLDENL

SEQ ID NO: 111580 - protein, 304 aa, Unknown
  Bacterial polypetide isolated from the Sargasso Sea
GLRSLNNAGASKTKMIVILNDNDMSIAKPVGAMRTYLAKLFTGKIYFSLRETLKLITSAFSKRFSAKAGKAEDFFRSAVTGGTLFSSLGFYYAGPIDGHDLSSLVPILKNAKESRHEGPIMIHIKTQKGKGYSYAEKANDHYHGVSKFNVETGEQVKSKSNLPAYTKVFANTLVKHAKKDSKIVGITAAMPGGTGMDIFGKEFPNRMFDVGIAEQHAVTFAAGLATEGYKPYAAIYSTFLQRAYDQVVHDVAIQSLPVRFAIDRAGLVGADGSTHAGSFDITYLSTLPNFVVMAASDEAELVKM

SEQ ID NO: 111581 - protein, 218 aa, Unknown
  Bacterial polypetide isolated from the Sargasso Sea
MTKEKYKYLDDINFPSDLRKIPESELKLLAKELREETISAVSTTGGHLGAGLGVIELTVALHHVFDTPNDKLIWDVGHQAYPHKILTGRKDKIRTLRQGKGLSGFTKRSESEYDPFGAAHSSTSISAALGIATANKLSNKSCNVIAVIGDGAMSAGMAYEAMNNAGASKTKLIVILNDNDMSIAKPVGALKSYLAKLLSGKVYFSLKDTIKLILSSFS

SEQ ID NO: 111582 - protein, 289 aa, Unknown
  Bacterial polypetide isolated from the Sargasso Sea
MIDAVSVTGGHLGASLGVVELTVALHYIFNTPNDKLIWDVGHQCYPHKILTGRRDKIRTLRQGGGLSGFTKRLESEYDPFGAAHSSTSLSSALGIAEANKLSNKSDNVVAVIGDGAISAGMAYEAMNNAGASKTKMIVILNDNDMSIARPVGAMSTYLAKIFSGKIYFSLRETIKLIISAFSKRFSAKAGKAEDLLRSAVTGGTLFSSLGFYYIGPIDGHDLNSLIPILKNARDSKHDGPILIHIKTKKGKGYTFAEEAKDNYHGVSKFNVKTGEQVKSDSKIPSYTKV

SEQ ID NO: 111583 - protein, 110 aa, Unknown
  Bacterial polypetide isolated from the Sargasso Sea
MKNKLLDNINYPSDLRKLSKNQLDQVSKELRSELINVVSETGGHLGAGLGVVELTVALHYVFNTPKDKLVWDVGHQCYPHKIITGRRDRIRTLRKGGGLSGFTKRSESEY

SEQ ID NO: 111584 - protein, 283 aa, Unknown
  Bacterial polypetide isolated from the Sargasso Sea
EQDTKIVGITGAMPSGTGLNLFEKKFPDRTFDVGIAEQHAVTFAAGLATEGYKPYAAIYSTFLQRAYDQVVHDVALQSLPVRFAIDRAGLVGADGPTHAGSFDITYLSTLPNFIVMAASDEAELIKMINTSVQINDRPSAFRYPRGNGVGAKLPSIKEVLEIGKARIIKEGKKVALLNFGTRLEECKKASDKLFSKGIECTLVDARFAKPLDEKLIMEIASNHEVLITIEEGSVGGFGSHVMQLLSERGVFDTGLKFRSMILPDIFIDQDTPEKMYQTAGLDN

SEQ ID NO: 111585 - protein, 220 aa, Unknown
  Bacterial polypetide isolated from the Sargasso Sea
ELRDELIDVVSETGGHLGAGLGVVELTVALHYVFDTPKDKLVWDVSHQCYPHKIITGRRDKIKTLRKGGGLSGFTKRTESEYDPFGAAHSSTSISSTLGMSIAKKLSNNNNHVISVIGDGAMSAGMAYEAMNNAGALKSNLIVVLNDNDMSIARPVGAMSKYLANLLSGKLYFSLRETFKMIISAFSKRFSQKAGKAEDMLRNMVTGGTLFSELGFYYIG

SEQ ID NO: 111586 - protein, 308 aa, Unknown
  Bacterial polypetide isolated from the Sargasso Sea
MDKKDLDDVCNDLRNYIIGSISENGGHFGASLGVVELTVALHYVYNTPEDKIVWDVGHQAYGHKILTGRKHNFHTNRIYGGLSGFPKISESEYDTFGVGHSSTSISAALGMAIAAKLSNDLKRQHIAVIGDGGMTGGISFEGMNHAGDTDANLTIILNDNCMSIDPNVGALKKYLTDISTSQAFNSIRNDIWKVLGKLEKVGESARGVAKTVEKSLKSFVLDNSNLFEALNLRYFGPIDGHDVNHLVKTLNDLKKIPGPKLLHCITKKGKGYSLAEKDQTKWHATGKFDVESGKSLVIKSTEKSPPKY

SEQ ID NO: 111587 - protein, 258 aa, Unknown
  Bacterial polypetide isolated from the Sargasso Sea
MAAGLATEGFKPFVAIYSTFLQRAYDQIVHDVAIQKLPVRFAIDRAGLVGSDGPTHAGSFDITYLATLPNFIVMAPSNQRELSKMIELSCEINDTPSAFRFPRGTGSDELFNNQPAEINIGKGYILIEGNDVAILNLGTRLEKCIEASKFLNQNNIYPTIADARFAKPLDTQLIDNLLNNHKYILTIEEGSIGGFSSHILHYVHNIRSKKNNTVIKNLIFPDRFVEHMTPDEQYQDIKMDTKSIIKEINNFYENKIVD

SEQ ID NO: 111588 - protein, 136 aa, Unknown
  Bacterial polypetide isolated from the Sargasso Sea
MRLSQLSHPNELHGLAISELEDVACQIRERHLQVVSTSGGHLGPGLGVVELTIALYQTLDLDVDKVIWDVGHQAYPHKLLTGRYNRFDSLRQQKGVAGYLKRTESKFDHFGAGHASTSISAALGMAIARDRKGEDY

SEQ ID NO: 111589 - protein, 129 aa, Unknown
  Bacterial polypetide isolated from the Sargasso Sea
EQIKSINKTPSYTKVFADTLTQHAKKDSKIVAITAAMPDGTGLNSFRKEFPERTFDVGIAEQHAVTFAAGLATENFKPYAAIYSTFLQRAYDQVVHDVAIQSLPVRFAIDRAGLVGADGPTHAGSFDTT

SEQ ID NO: 111590 - protein, 260 aa, Unknown
  Bacterial polypetide isolated from the Sargasso Sea
MNKNYKYLGNINFPSDIKKLSQSELKILVKELREELIDAVSETGGHLGAGLGVVELTVVLHYIFNTPHDKLIWDVGHQTYPHKILTGRKDRIRTLRKGGGLSGFTKRSESEYDPFGAAHSSTSISSALGIAVANKLSNKTDNVIAVIGDGAISAGMSYEAMNNAGSSKTKMIVILNDNDMSIAKPVGAMRAYLAKILSGKLYFSFRETLKLIISAFSKRFSKKAGKAEDFLRSAMTGGTLFNSMGFYYIGPIDGHDVDAL

SEQ ID NO: 111591 - protein, 183 aa, Unknown
  Bacterial polypetide isolated from the Sargasso Sea
MNNKYKTLENINLPSDIKNLSKDEILSLSKDLRGFLVESISKTGGHLAAGLGAVDITIALHYVYDTPKDIIVWDIGHQCYPHKILTGRKNQMSTLRKKNGISGFLKINESEYDAFGAGHSSTSISAAIGYEIASRLKNENKKVIAVIGDGGLTAGMAFEALSHAGGIKSNLLVVLNDNEMSIS

SEQ ID NO: 111592 - protein, 226 aa, Unknown
  Bacterial polypetide isolated from the Sargasso Sea
AIDRAGLVGADGPTHAGAFDVTYLTTLPNFIVMAASDESELVKMINTSVNINDRPSAFRYPRGNGIGVELPSIKEVLEIGKGRVVKEGKKVAILNFGGRLQECLKAAKGLDIKGISTTVADARFAKPLDEKLIMDLSLNHEVLITIEEGSIGGFGSHVMQLLAEKGIFDKGLKIRSMILPDKFLDQDIPEEMYKKAGLDCDSIIEKVENTLKSNVIVAKSTIKKSS

SEQ ID NO: 111593 - protein, 284 aa, Unknown
  Bacterial polypetide isolated from the Sargasso Sea
MLLSELSHPNQLHGLTVSQLEEIACQIRERHLQVVSTSGGHLGPGLGVVELTLALYQTLDLDFDKVVWDVGHQGYPHKLITGRFSQFDSLRQQNGVAGYLKRSESKFDHFGAGHASTSISAALGMAIARDRKGESYKCVAVIGDGALTGGMALEAINHAGHLPNTPLVVVLNDNDMSISPPVGALSSYLNKVRVSPPLQFLSDSVQESVKNIPLIGKDIPEELKNIKGSVRRLSVPKVGAVFEELGFTYMGPIDGHDIDNLVKTFNAAHKLKRPVLVHVVTTKG

SEQ ID NO: 111594 - protein, 115 aa, Unknown
  Bacterial polypetide isolated from the Sargasso Sea
MPKTFHEIPRVRPATPVLDRAATPEQLRRLGEAELEELANELRQELLYSAGHTGGHFGAGLGVIELTIALHYVYDTPDDRLVWDVGHQAYPHKILTGRRERMATLRQKDGLAAFP

SEQ ID NO: 111595 - protein, 301 aa, Unknown
  Bacterial polypetide isolated from the Sargasso Sea
DPVAYHGPGKFDPSVGLTKPATPPKQTFTQVFGQWLCDMAAQDPRLVGITPAMREGSGMVEFEKRFPDRYYDVGIAEQHAVTFAAGMACEGVKPVVAIYSTFLQRGYDQLIHDVALQNLPVVFALDRAGLVGADGATHAGAYDIPFVRCIPNMSMACPADERECRQLLSSAFEQDHPVAVRYPRGSGAGVAPLAALDGLPFGKGEIRRERKGEADGKAPRIAILAFGTLLYPALEVGEALDATVVNMRWAKPIDEALLREVAERHDALVTVEEGAIMGGAGSAVTEALNAMGIVRPRAAAG

SEQ ID NO: 111596 - protein, 304 aa, Unknown
  Bacterial polypetide isolated from the Sargasso Sea
LSSLVPILKNAKESRHEGPIMIHIKTQKGKGYSYAEKANDHYHGVSKFNVETGEQLKSKSNLPAYTKVFANTLVKHAKKDSKIVGITAAMPGGTGMDIFGKEFPNRMFDVGIAEQHAVTFAAGLATEGYKPYAAIYSTFLQRAYDQVVHDVAIQSLPVRFAIDRAGLVGADGSTHAGSFDITYLSTLPNFVVMAASDEAELVKMINTSVDINDRPSAIRYPRGTGVGVDLPSIDEKIEIGKGRVLQQGTQVCILNLGTRLEECKSAVEELKAKGISTTLIDARFAKPLDEEIILKSAKEHELMI

SEQ ID NO: 111597 - protein, 278 aa, Unknown
  Bacterial polypetide isolated from the Sargasso Sea
PSRMFDVGIAEQHAVTFAAGLATEGYKPYAAIYSTFLQRAYDQVVHDVAIQSLPVRFAIDRAGLVGADGPTHAGSFDITYLSTLPNFIVMAASDESELVKMINTTVDINDKPSAFRYPRGNGTGVNLPSNDEKIIIGKGRVIKEGKKIALLNFGARLRECLIAEENLKKKGINLTIIDARFSKPLDENLIWQIAVEHESIITIEEGSIGGFGSHVGQFLSDKSLLDSNLKYRSMILPDRFIEHDKPELMYKFAGLDAKSIETKVLDTLNSKVIIKKTN

SEQ ID NO: 111598 - protein, 286 aa, Unknown
  Bacterial polypetide isolated from the Sargasso Sea
ESKLQKVADELREEMIDAVSVTGGHLGASLGVVELSVALHYIFNTPNDKLIWDVGHQCYPHKILTGRKDKIRTLRQGGGLSGFTKRSESEYDTFGAAHSSTSISSALGIAEANKLSNKNDNVVAVIGDGAISAGMAYEAMNNAGASKTKMIVILNDNDMSIARPVGAMSTYLAKIFSGKIYFSLRETIKLITSAFSKRFSAKAGKAEDLLRSAVTGGTLFSSLGFYYIGPIDGHDLNSLVPILKNARDSKHQGPILIHIKTKKGKGYTFAEKAKDNYHGVSKFNVE

SEQ ID NO: 111599 - protein, 312 aa, Unknown
  Bacterial polypetide isolated from the Sargasso Sea
KILAKEVREQMIDAVSVTGGHLGAGLGVVELTIALHYVFDTPNDKIIWDVGHQTYPHKILTGRKDKITTLRQGNGLSGFTKRSESEYDPFGAAHSSTSISAALGIATANKLEKKSNQVVAIIGDGAISAGMAYEAMNNAGSSKTKMIVILNDNDMSIAKPVGAMSTYLAKILSGKIYFSLRETIKLIISAFSKRFSDKAKKAEDFLRSAVTGGTLFNSLGFYYVGPIDGYDLDNLISVMENAKKLNHEGPIMIHIKTEKGKGYEFAEKSHDKYHGVTKFNVKTGIQEKSKSNSPSYTKVFAKTLIKHAEKDS

SEQ ID NO: 111600 - protein, 317 aa, Unknown
  Bacterial polypetide isolated from the Sargasso Sea
ALPESALPDVADEVRRFLLETVSRSGGHFASSLGAVELTIALHYLYNTPEDRIVWDVGHQAYPHKILTGRKDKLQTIRKWKGLAPFPKREESEYDVFGVGHSSTSISAALGMAVAAKIIGTERRAVAVIGDGAMTAGVAFEGLNHAGDIGADVLVILNDNDMSISPNVGALSNRFAQILSGKFYTTVREGSKKVLSQMPSVWELARRAEEHVKGLIVPGTLFEEFGFNYIGPIDGHDLGAVLNTVKNVKQLKGPQLLHVITRKGKGYAPAEEDPVKYHGVTPFDPSKGIVSTGSKRNLNYSEVFGNWVCDMAARDNR

SEQ ID NO: 111601 - protein, 233 aa, Unknown
  Bacterial polypetide isolated from the Sargasso Sea
MVSLIESISQPQEIQNFNLKELTQLAQECRQRIIDVTSKCGGHLASSLGAVEITVALLKHFDFSIDRLVWDVGHQGYAYKILTGRNKNFHTLGKLDGIKKFLSREESSYDHFGAGHASTSISAALGMAIGRDLQNQKHKVVSVIGDGALTGGLAFEALNHNGSLDKNMLVIYNDNGISIDPNVGAVSKLLTRFASSKFYNRFRDETLDLAEKAPFSERLGLKTTLQKMHDSAK

SEQ ID NO: 111602 - protein, 314 aa, Unknown
  Bacterial polypetide isolated from the Sargasso Sea
MTEKLLDKINYPADLRKLEKNQLEKVSQELRSELIDVVSETGGHLGAGLGVVELTVALHYVFNTPKDKLVWDVGHQCYPHKIITGRKDRIRTLRKGGGLSGFTKRAESEYDPFGAAHSSTSISSTLGMATAKRLSNDNNNVVAVIGDGAMSAGMAYEAMNNAGAMKSKLIVILNDNDMSIAPPVGAMSKYLARLLSGKIYFSLRETIKLILSAFSKRFSKSAGKAEDMFRSMVTGGTLFNQLGFYYIGPIDGHDVNNLVTILENVKNSRHEGPILIHAITKKGKGYKPAEESGDKYHGVSKINVFTGETSKGKS

SEQ ID NO: 111603 - protein, 253 aa, Unknown
  Bacterial polypetide isolated from the Sargasso Sea
KNKIETLRKKNGLYGFVRRSESEYDPFGTAHSSTSISAGLGIKIAKDINKDNANVVCVIGDGALSAGLAYEALNNAGAMNKRLIVILNDNKMSIDQPVGAMSSYLTKLLSSRSYSSIRGIIKNLSKNLHQGLSNTLSKAEEYSKGFITGGTMFEELGFYYLGPIDGHNFDHLIPVLENIRDNEIDKPIFLHCITKKGKGYKPAEESIDKFHGVNKFNVLTGQSISKTNQKSYSQIFGETLSKLAKEDEKIVAI

SEQ ID NO: 111604 - protein, 294 aa, Unknown
  Bacterial polypetide isolated from the Sargasso Sea
MRKGNGLSGFTKRAESEYDPFGAAHSSTSISSALGIAMANKLSNKSDNVIAVIGDGAISAGMAYEAMNNAGSSKTKLIVILNDNDMSIAKPVGAMRAYLAKIFTGKIYFSFRETVKLIISAFSKRFSKKAGKAEDFLRSAVTGGTLFSSMGFYYVGPIDGHDIDALVSVLKNAREINYEGPIMIHIKTKKGKGYSFAEKSEDKYHGVTKFNVNTGVQEKSKSNALSYTKVFANTLVKHAEKDSKIIGITAAMPSGTGMDIFGKKFPSRMFDVGIAEQHAVTFAAGLATEGFKPY

SEQ ID NO: 111605 - protein, 273 aa, Unknown
  Bacterial polypetide isolated from the Sargasso Sea
LFAKKFPNRMFDVGIAEQHAVTFSAGLATEGFKPYAAIYSTFLQRAYDQVVHDVAIQSLPVRFAIDRAGLVGADGPTHAGSFDITYLSTLPNFVVMAPSDESELVKMINTSVDINDKPSAFRYPRGTGIGIKLPEINEKIEIGKGRVIKEGKEIALINFGARLQECQKALNNLEKKGLNLTLIDARFCKPLDENLMWNTAKNHEVVISIEEGSIGGFGSHLSKFLSEKGLLEKIKFRSMTFPDKFIDQDKPDLMYQIAGLDSKAIEEKVYEVL

SEQ ID NO: 111606 - protein, 282 aa, Unknown
  Bacterial polypetide isolated from the Sargasso Sea
ANQDEDLVAITPAMGEGSGMNEFSKAFPERYYDVAIAEQHSVSFAAGLACEGLKPVVAIYSTFLQRAYDQLIHDVALQNLDVLFAIDRAGLVGLDGATHQGAFDLSYLRCIPNITIMAPSDEDLAWKMLNTGYEISGPAAVRYPRGIGRGIEYHESDEIIEIGKSKTILESETSEVVILSFGSLLDSAINAGKEIKARVVDMRFIKPIDITLINEVSDKFKLIVTLEDNVIAGGAGSAVNEKLFELNSSSKVLNLGLPDGFIEHGDQEQQKIMNNLDGTGVR

SEQ ID NO: 111607 - protein, 289 aa, Unknown
  Bacterial polypetide isolated from the Sargasso Sea
VVTKKGKGYLPAESDPVKYHAVPKFNKDEGVLKGNNKKYIYSDVFDAWLCKIAKNDKRVFAITPAMREGSSLVNFSKSFPERYIDVGIAEQHAVTLAAGLACENQKPIVCIYSTFLQRAYDQLIHDIALQDLDVLFAVDRSGFSGNDGETHTGVFDLSFSRCIPNLIIMAPSCPEICQDMLHTGYLYPGPAIVRYPKESVKELPNKTEFQKIEIGKAKEIIKGKNIVFLCFGTLLEKAKRIAKKYNCSCIDMRFVKPLDTQLIKKYARDNSLIISLEDNMLAGGAGSAV

SEQ ID NO: 111608 - protein, 118 aa, Unknown
  Bacterial polypetide isolated from the Sargasso Sea
MKQKLLDKINYPSDLRLLKKNQLEQVSNELRSEVIDVVSETGGHLGAGLGVVELTVALHYVFNTPKDKLVWDVGHQCYPHKIITGRKEKIRTLRKGDGLSGFTKRSESEYDPFGAAHS

SEQ ID NO: 111609 - protein, 292 aa, Unknown
  Bacterial polypetide isolated from the Sargasso Sea
MRTPLLDQITHIDDLRRFSESDLTQLADELRIATISAVSKTGGHLGAGLGVVELTVALHHVFATPEDRLIWDVGHQAYPHKILTGRRDRISSLRQKDGLSGFTKRSESEFDPFGAGHSSTSISAALGMAVASEMQGIFRNVIAVIGDGAMSAGMAYEAMNNAGATNSRLIVILNDNDMSISQPVGAMSAYLSRLITSRPYHSIRDLMREVASHFPVGIERTARRAKDAARDLMGGNSVFSQLGFTHIGPIDGHDMDHLLPVLKNLRDSSSHGPVLVHVVTEKGHGHPFASPS

SEQ ID NO: 111610 - protein, 287 aa, Unknown
  Bacterial polypetide isolated from the Sargasso Sea
MNYKHLDKINFPSDMRKLSIVDLENLSTELRDKTIETVSKTGGHLGAGLGVVELTIALHYVFNTPRDRLIWDVGHQSYPHKILTGRKHKIETLRQKNGLYGFVKRSESEYDPFGTAHSSTSISAGMGMKVAKDLNNDDAKIICVIGDGALSAGMAYEALNNVGASNKQIIVILNDNEMSIDRPVGAMSNYLTKLLSSKQYTNVRTLLKKISSKLSNSVSKTLYKAEEFSKSLVTGGTLFEELGFYYLGPIDGHDIKTLVPVLENIKNLSIEKPIFLHCVTKKGKGYE

SEQ ID NO: 111611 - protein, 270 aa, Unknown
  Bacterial polypetide isolated from the Sargasso Sea
MSEYKILNKVNFPADIKNLSNQDLKILSKELRQEMIEAVSQTGGHLGAGLGVVELTVALHHIFNTPNDKIIWDVGHQSYPHKILTGRKDRIKTLRQGNGLSGFTKRSESEFDPFGAAHSSTSISAALGIATANKLSNKNDEVVAIIGDGAISAGMAYEAMNNAGDAKTKMIVILNDNNMSIAKPVGAMKSYLAKIFSGKIYFNLRETIKLIISSFSKRFSKKAGKAEDFLRSMVTGGTLFSSLGFYYIGPIDGHDLEVLLPILKNARDSR

SEQ ID NO: 111612 - protein, 287 aa, Unknown
  Bacterial polypetide isolated from the Sargasso Sea
MAYEAMNNAGASKTKMIVILNDNDMSIAKPVGAMGKYLAKLLSTKLYFSFRETIKLIISAFSKRFSDKAGKAEDFLRSAVTGGTLFNSMGFYYVGPIDGHDIDDLIPVLQNAKNLNHDGPIMIHIKTKKGKGYEFAERSNDKFHGVSKFDVKTGIQKKSKSKAPSYTKVFANTLIKHAEKDSKIVGITAAMPSGTGMDLFGDRFPSRMFDVGIAEQHAVTFAAGLATEGYKPYAAIYSTFLQRAYDQVVHDVAIQSLPVRFAIDRAGLVGADGPTHAGSFDITYLST

SEQ ID NO: 111613 - protein, 250 aa, Unknown
  Bacterial polypetide isolated from the Sargasso Sea
EESGDKYHGVSKFDVLTGKQAKGKSAGPSYTKVFANTLIKHAQNDTKIVAITGAMPSGTGLDLFQKKFPDRMFDVGIAEQHGVTFAAGLATEGYKPYAAIYSTFLQRAYDQVVHDVAIQSLPVRFAIDRAGLVGSDGATHAGSFDTTYLSTLPNFVVMAASDEAELVRMINTSVNINDRPSAFRYPRGSGFGVVLPDINETIEIGKGRIISSGKHLAILNFGARMNECKKAAATLNKKGIFVTIFDARFA

SEQ ID NO: 111614 - protein, 270 aa, Unknown
  Bacterial polypetide isolated from the Sargasso Sea
RAYPHKILTGRREQMHSIRQKDGLHPFPWREESEYDTLSVGHSSTSISAALGMAIAARAEQKNRKVVAVIGDGAITAGMAFEALNHAGEVKPDMLVILNDNEMSISENVGALNRYFARILSGNFYTSLREGGKKILSGVPPLHQLASRAEEHFKGMVTPGTFFEELGFNYIGPIDGHDVKSLVDTIRNMRNLKGPQLLHVVTKKGKGYLPAEQDPIGYHAVSKFDPTAQCQPAKKAGKATFSNIFGQWICDMAAVDPKLQGITPAMREGS

SEQ ID NO: 111615 - protein, 324 aa, Unknown
  Bacterial polypetide isolated from the Sargasso Sea
NNAGTSKTKMIVILNDNDMSIAEPVGAMRSYLAKLLTGKIYFSLRETFKLIISAFSKRFSKKAGKAEDFLRSAVTGGTLFNSLGFYYVGPIDGHDIDTLVSVLKNAKDTNFEGPIMIHIKTEKGKGYQFAENSKDKYHGVSKFNIQTGVQEKSSSKIPSYTSVFANTLIKHAERDSKIIGITAAMPSGTGMDLFAKKFPNRMFDVGIAEQHAVTFSAGLATEGYKPYAAIYSTFLQRAYDQVVHDVAIQSLPVRFAIDRAGLVGADGPTHAGSFDITYLSTLPNFVVMAPSDESELVKMINTSVDINDKPSAFRYPRGSGIGIK

SEQ ID NO: 111616 - protein, 240 aa, Unknown
  Bacterial polypetide isolated from the Sargasso Sea
GGHLGGGLGVVELTIILHHVYNTPYDNLVWDVGHQAYPHKILTGRKEKIMSIRKKDGLAPFPSRSESEYDTFGVGHSSTSLSALVGMAEATKNSNPDKKHVAVIGDGAMTAGMAFEALSHIGHLKPNLLVILNDNDMSISENVGGLSNYFSRIWASKTYKGIKKSGSSFLKPLPQAYHLARKVETQMKAMVAPGTIFEELGLNYIGPIDGHNLKELKDVISNLKEFEGPQFLHVITKKGA

SEQ ID NO: 111617 - protein, 292 aa, Unknown
  Bacterial polypetide isolated from the Sargasso Sea
IKTKKGKGYSFAEKAEDHYHGVSKFDVKTGKQVKNQSKIPSYTKVFSDTLIKHAKKDSKIVAVTAAMPDGTGLDNFRKEFPDRTFDVGIAEQHAVTFAAGLATENYKPYAAIYSTFLQRAYDQVVHDVAIQSLPVRFAIDRAGLVGADGSTHAGSFDVTYLSTLPNFIVMAPSDEAELVKMINTSIDINDKPCAFRYPRGTGLGSILPSINEKIEIGKSKIIKEGKKLVILNFGARLNETLKAEEYLSKKGIPITVVDARFAKPLDENLIWQLATTHEAIMTIEEGSIGGFG

SEQ ID NO: 111618 - protein, 309 aa, Unknown
  Bacterial polypetide isolated from the Sargasso Sea
MSKYLANLLSGKLYFSLRETIKMIISAFSKRFSQKAGKAEDMLRNIVTGGTLFSELGFYYVGPIDGHDVENLVQIFENVKKSNHQGPVLIHVRTQKGKGYKPAEDSGDKYHGVSKFNISTGEQSKSKSNTPSYTKVFAETLIKHAEQDTKIVGITGAMPSGTGLNLFEKKFPDRTFDVGIAEQHAVTFAAGLATEGYKPYAAIYSTFLQRAYDQVVHDVALQSLPVRFAIDRAGLVGADGPTHAGSFDITYLSTLPNFIVMAASDEAELVKMINTSVDINDRPSAFRYPRGNGVGVELPSIKEKLVIGK

SEQ ID NO: 111619 - protein, 276 aa, Unknown
  Bacterial polypetide isolated from the Sargasso Sea
MFDVGIAEQHAVTFAAGLATEGYKPYAAIYSTFLQRAYDQVVHDVAIQSLPVRFAIDRAGLVGADGSTHAGSFDITYLSTLPNFIVMAASDEAELVKMINTSIDINNKPCAIRYPRGTGIGLELPSIDEKIEIGKGRIIQEGKQVCILSLGTRLEECKLAAEELKNKGILTTIIDARFAKPLDKELILKCAREHEVMITIEEGSIGGFGSHVKNLLAEKGIFDKGLKFRSMTLPDTFIEQDNPKKMYDLAGLNSSQITKKILDVLFTKESIKIIKN

SEQ ID NO: 111620 - protein, 246 aa, Unknown
  Bacterial polypetide isolated from the Sargasso Sea
PHKILTGRKEKIMSIRKKGGLAPFPSRSESEYDTFGVGHSSTSLSALVGMAEATKNSSPDKKHVAVIGDGAMTAGMAFEALSHIGHLKPNLLVILNDNDMSISENIGGLSNYFSRIWASKTYKGIKKSGSSFLKPLPQAYHLARKVETQMKAMVAPGTIFEELGLNYIGPIDGHNLKELKDVISNLKEFEGPQFLHVITKKGAGLDSAEADRIGFHAIGKINAIKDKKITQKKYQDIFGEWIIDMA

SEQ ID NO: 111621 - protein, 283 aa, Unknown
  Bacterial polypetide isolated from the Sargasso Sea
LKNQQHHWLDTVDFFSDIRSFSINELEVLANELREFLLYSVGQSGGHLGGGLGVIELTIVLHHIFNTPYDNLVWDVGHQAYPHKILTGRKNKIQTIRKKDGLAPFPSRKESEYDTFGVGHSSTSLSAMLGMAIASKESNPDKKHVAIIGDGAMTAGMAFEALSHTGHLKPNVLIILNDNDMSISENIGGLSNYFSRIWASKIYKGIKKSGASFLKPLPQAFHLARKVETQMKAMVAPGTIFEELGLNYIGPIDGHNIKELINVISNLKEFDGPQFLHVITKKG

SEQ ID NO: 111622 - protein, 285 aa, Unknown
  Bacterial polypetide isolated from the Sargasso Sea
EKRFPDRMFDVGIAEQHAVTFAAGLTTEGYKPYAAIYSTFLQRAYDQVVHDVSLQSLPVRFAIDRAGLVGADGPTHAGSFDITYLSTLPNFIVMAASDESELVKMINTSVSINDKPSAFRYPRGNGTGVKLPTLEEKLEIGKGRILFEGKKIAILNFGSRLEECKIAREILLKKGINLTIADARFAKPLDEKLVIDLATNNELIVTIEEGSIGGFGSHVMHLLSERGIFDKGLKFRSMILPDIFIDQDTPELMYKVAGLDAKSIVEKIENALKSNVVIAKNNFKS

SEQ ID NO: 111623 - protein, 186 aa, Unknown
  Bacterial polypetide isolated from the Sargasso Sea
MSYNLLDKINFPSDLRNLSLIELENLSNELRNKTIETVSKTGGHLGAGLGVVELTIAIHFVFNTPRDRLIWDVGHQSYPHKILTGRKNKIETLRQKNGLYGFVKRSESEYDPFGTAHSSTSISAGMGMKIAKDLNKDDAKIICVIGDGSLSAGMAYEALNNVGASNKQIIVILNDNEMSIDRPVAQ

SEQ ID NO: 111624 - protein, 217 aa, Unknown
  Bacterial polypetide isolated from the Sargasso Sea
MTKPPETPLLDQVPMPDELRQLKPEQLRQLSDELRAEMIDAVSVSGGHLGSGLGVVELTVAIHYVFNTPDDRLIWDVGHQCYPHKILTGRRDRIRTLRQGGGLSGFTKRSESEYDPFGAAHSSTSISAALGFAVANKLNNKPGRGIAVIGDGAMSAGMAYEAMNNAAQAGNRLVVILNDNDMSIAPPVGGLSAYLARMVSSSEYLGIRSLASRAVKK

SEQ ID NO: 111625 - protein, 140 aa, Unknown
  Bacterial polypetide isolated from the Sargasso Sea
MKKNYQFLNNINFPSDLRKVSEKNLQKVADEVREEMISAVSETGGHLGAGLGVVELTVALHYVFDTPNDKLIWDVGHQSYPHKILTGRKDKIRTLRQGDGLSGFTKRSESEYDPFGAAHSSTSISSALGIAEANKLENKS

SEQ ID NO: 111626 - protein, 244 aa, Unknown
  Bacterial polypetide isolated from the Sargasso Sea
MPSGTGLNFFGKKFPDRTFDVGIAEQHAVTFAAGLATEGYKPYAAIYSTFLQRAYDQVVHDVALQSLPVRFAIDRAGLVGADGPTHAGSFDITYLSTLPNFVVMAASDEAELVKMINTSVEINDRPSAFRYPRGNGVGVQLPSIKEVLEIGKAKIIKEGKKVALLNFGTRLEECKKASEKLSSKGINCTIIDARFAKPLDEKLIMEVATNHEVLITIEEGSIGGFGSHVMQLLSDRGIFDTGLK

SEQ ID NO: 111627 - protein, 163 aa, Unknown
  Bacterial polypetide isolated from the Sargasso Sea
MFLTHLRDKLIWDVGHQSYPHKILTGRKDKIRTLRQGSGLSGFTKRSESEFDPFGAAHSSTSISAGLGIATANKLSNKSDQVIAVIGDGAMSAGMAYEAMNNAGDSKTKMIVILNDNDMSIAKPVGAMKSYLAKIFSGKIYFSFRETVKMIISSFSKRFSKKS

SEQ ID NO: 111628 - protein, 290 aa, Unknown
  Bacterial polypetide isolated from the Sargasso Sea
AEEFIRDIVSGGTLFNELGFYYVGPIDGHNLDSLIPVLNNVKNSKYEGPILIHAVTKKGKGYKPAEDSRDKYHGVSKFNVVTGEQSKPKSTTESYTKVFANTLIKHAEKDTKIIGITGAMPSGTGMDIFGKKFPDRMFDVGIAEQHAVTFAAGLAIEGYKPFAAIYSTFLQRAYDQVVHDVAVQNIPVRFAIDRAGLVGADGPTHAGSFDITYLSTLPNFVVMAASDEAELVRMVNTAVKINDRPSAFRYPRGNGLGIKLPDINEILELGRGKIVKEGNKVAILSFGARL

SEQ ID NO: 111629 - protein, 256 aa, Unknown
  Bacterial polypetide isolated from the Sargasso Sea
STFLQRAYDQVVHDVAIQNLPVRFAIDRAGLVGADGPTHAGSFDITYLSTLPNFVVMAASDEAELVRMINTSVDINSNPSALRYPRGNGVGVELPGIDEKIEIGKGRIILEGKKVAIINFGARLNECLLANEILNKKGIRITLVDARFAKPLDENLIWEISTNHETLITIEEGSLGGFGSHVGQFLSEKKLLDNNLKFRSMILPDKFIDHNKPEIMYKEAGLDAEAIVSKVKDTLNSKIIVQKKKKNLFTTLSFNH

SEQ ID NO: 111630 - protein, 267 aa, Unknown
  Bacterial polypetide isolated from the Sargasso Sea
MKKNYQYLDKVNFPSDIKNLKRSELKILTEEVRQELIDTVSETGGHLGAGLGVIELTIALHYVFDTPNDKLIWDVGHQSYPHKILTGRKEKIKTLRQGGGLSGFTKRSESEYDPFGAAHSSTSISSALGISVANKLSKKSDQVVAVIGDGAISAGMAYEAMNNAGVSKTKLIVILNDNDMSIAKPVGAMSTYLAKLLSTKLYFSLRETVKLVISAFSKRFSYKAGKAEDFLRSAVTGGTLFNSLGFYYVGPIDGHDIDDLIPVLQNA

SEQ ID NO: 111631 - protein, 293 aa, Unknown
  Bacterial polypetide isolated from the Sargasso Sea
GAEKSKLIVILNDNDMSIAPPAGAMSAYLAKLISGGTYLGLRNFAKQVIEKLPKSLEKGAKKAEEITRLIAGNGTLFEALGFYYVGPLDGHNFDHLLPVIRNVKNANNGPVIIHVVTQKGKGYKPAEDSDEKFHGVTKFNIATGEQEKPKKKNISFTKVYSNSLIEFAKNDKDIVAITAAMPSGTGLDKFKEIYPKRFFDVGIAEQHAVTFSAGLAIEGLKPFTTIYSTFLQRAYDQIIHDIAIQNLPVKFAIDRAGLVGADGPTHAGSFDLAYLSILPNFVVMAASNEIELA

SEQ ID NO: 111632 - protein, 260 aa, Unknown
  Bacterial polypetide isolated from the Sargasso Sea
MKKKLLDEINYPSDLKKFKKTDLKQIAVELREELIDAVSVTGGHLGAGLGVVELTIALHYVFDTPKDRLVWDVGHQAYPHKIITGRKQKIRTLRKGGGLSGFTKRSESEYDPFGAAHSSTSISATLGMAVAKSLSKNSNKVVAVIGDGAMSAGMAYEAMNNAGAMKSNLIVILNDNDMSIARPVGAMSSYLARLLSGKTYFSFRETVKLITSAFSKRFKDKAGKAEEFIRDIVSGGTLFNELGFHYIGPIDGHDFDVLVP

SEQ ID NO: 111633 - protein, 269 aa, Unknown
  Bacterial polypetide isolated from the Sargasso Sea
PPVGAMSKYLARLLSGKIYFSLRETIKLILSAFSRRFSRTAGKAEDMLRSIVTGGTLFSQLGFYYIGPIDGHDVNNLVTILENAKNSKHEGPILIHAITQKGKGYKPAEQSGDKYHGVSKFNVLTGEQSKGKSKTPSYTKVFANTLVKHAENDTKIVGITGAMPSGTGLDLFQKKFPERMFDVGIAEQHGVTFAAGLATEGYKPFAAIYSTFLQRAYDQVVHDVAIQSLPVRFAIDRAGLVGADGPTHAGSFDITYLSTLPNFVVMAAK

SEQ ID NO: 111634 - protein, 249 aa, Unknown
  Bacterial polypetide isolated from the Sargasso Sea
AVTFAAGLATEGYKPYAAIYSTFLQRAYDQVVHDVAIQSLPVRFAIDRAGLVGADGPTHAGSFDITYLATLPNFVVMAASDESELVKMINTSVHINDRPSAFRYPRGNGTGVTLPSINELLEIGKGRVVLEGKKAAILNFGTRLEECRKASDILIKKGINITIIDARFAKPLDEKLIMEAANNHEALITIEEGSVGGFGSHVMQFLSDRGVFDKGLKFRSMILPDIFIDQDTPEKMYEKAGLDSLSIAS

SEQ ID NO: 111635 - protein, 324 aa, Unknown
  Bacterial polypetide isolated from the Sargasso Sea
ALGIVTANKLSNKSDDVVAVIGDGALSAGMAYEAMNNAGSSKTKMIVVLNDNDMSIAKPVGALRTYLAKILSGKIYFSLRETIKLIISSFSKRFMKKAGKAEDFLRSAVTGGTLFNSLGFYYVGPIDGHDIDVLTSVLENAKKMNYDRPILIHVKTEKGKGYKFAEKSLDKYHGVSKFNVLTGQQEKTNNIAPSYTKVFANSLIKHAQNDSKIVGITAAMPSGTGMDLFAEKFPDRMYDVGIAEQHAVTFSGGLATQGFKPFAAIYSTFLQRAYDQVVHDIAIQSLPVRFAIDRAGLVGADGPTHAGSFDITYLSTLPNFVVMA

SEQ ID NO: 111636 - protein, 205 aa, Unknown
  Bacterial polypetide isolated from the Sargasso Sea
MKIFESIPTEEPLSKFLGGINSPEDLRKLDKTEIPLIADELREFLLYTVGKTGGHFGAGLGVIELTLALHYAFETPHDRLVWDVGHQTYPHKILTGRKNDMESMRQTNGLAPFPVRTESEYDTFGVGHSSTSISAALGMITGADSKNINRHVTAVIGDGAMTAGMAYEALAHAGSLDKNLLVILNDNQMSISENIGGLRNYLARV

SEQ ID NO: 111637 - protein, 208 aa, Unknown
  Bacterial polypetide isolated from the Sargasso Sea
DVAIQSLPVRFAIDRAGLVGADGSTHAGSFDITYLSTLPNFIVMAASNEEELVKMINTSIDINDRPSAFRYPRGNGLGMKLPDITEKIEIGKGKIIQEGKKVAILNFGTRLKECLIANENLKKKGINISIVDARFSKPLDENLIWQLATNHEVLITIEEGSIGGFGSHVNHFLNEKNLLEGKVKLRSMILPDKFIDQNKPEEMYKEAG

SEQ ID NO: 111638 - protein, 228 aa, Unknown
  Bacterial polypetide isolated from the Sargasso Sea
ITGRRDKIKTLRKGGGLSGFTKRSESEYDPFGAAHSSTSISSTLGMAVAKNLSNNNNNVIAVIGDGAMSAGMAYEAMNNAGALKSKLIVVLNDNDMSIAKPVGAMSKYLAKLLSGKLYFSFRETVKMVISAFSKRFSQKAGKAEDILRGLVTGGTLFSELGFYYIGPVDGHDVDNLVQIFENVKNSTHQGPILIHIRTQKGKGYKPAEESGDKYHGVSKFNIATGEQT

SEQ ID NO: 111639 - protein, 289 aa, Unknown
  Bacterial polypetide isolated from the Sargasso Sea
GHLGASLGVVELTVALHYIFNTPNDKLIWDVGHQCYPHKIITGRKDKIRTLRQGGGLSGFTKRLESEYDPFGAAHSSTSISSALGIAEANKLSNKLDNVIAVIGDGAISAGMAYEAMNNAGASKTKMIVILNDNDMSIARPVGAMGTYLAKIFSGKIYFSLRETIKLITSAFSKRFSAKAGKAEDLLRSAVTGGTLFNSLGFYYIGPIDGHDLTSLIPILKNARDSKHEGPILIHIKTKKGKGYSFAEKAKDHYHGVSKFNVKTGEQSKSSSKFPSYTKVFANTLVEHA

SEQ ID NO: 111640 - protein, 146 aa, Unknown
  Bacterial polypetide isolated from the Sargasso Sea
MKIFKKIPNKKPSTPLLDKIEFPKDIKEFSNSELEMLANELREFLLYSVGQSGGHLGAGLGVIELTVVLHYLFDTPNDNLVWDVGHQAYPHKILTGRKNKIQTIRKKNGLAPFPNINESAFDAFGVGHSSTSISAALGDVYCKSSG

SEQ ID NO: 111641 - protein, 288 aa, Unknown
  Bacterial polypetide isolated from the Sargasso Sea
HYVFNTPRDRLIWDVGHQSYPHKILTGRKNKIETLRQKDGLYGFVKRSESEYDPFGTAHSSTSISAGMGMKIAKDLNKDNANIICVIGDGALSAGMAYEALNNVGATNKQMIVILNDNKMSIDRPVGAMSNYLTKLLSSKQYTSVRSLLKKISAKLPKTVSQTLYKAEEYSKGLVTGGTLFEELGFYYLGPIDGHDINTLVPILENIKNLSVGKPIFLHCITKKGKGYKPAEKANDKFHGVNKFDVKTGQSLKSSNKKTYSTVFGETLSKAAENDEKIIGITAAMMSG

SEQ ID NO: 111642 - protein, 335 aa, Unknown
  Bacterial polypetide isolated from the Sargasso Sea
TLRKGNGLSGFTKRSESEYDPFGAAHSSTSISSALGIAVANKLSNKADNVIAVIGDGAMSAGMAYEAMNNAGASKTKLIVILNDNDMSIAKPVGAMRSYLAKIFSGKIYFSLRDTVKLIISAFSKRFSKKAGQAEDFLRSAVTGGTLFNSLGFYYVGPIDGHNLDDLLPVLKYARDSNYDGPIMIHIKTKKGKGYEFAEKSNDKFHGVSKFNIKTGEQEKSKTKIPSYTKVFANTLIKHAEKDSKIIGITAAMPSGTGMDIFGQKFPKRMFDVGIAEQHAVTFAAGMATEGFKPYAAIYSTFFTRAYDPVVHDVCDTSLPCRFAIDRAGLVGADG

SEQ ID NO: 111643 - protein, 187 aa, Unknown
  Bacterial polypetide isolated from the Sargasso Sea
MKIFSEIPSEVPSTKLLDKINYPRDLKELSPPDLKILADELREFLLYSVGKSGGHLGAGLGVVELTIVLHYLYDSPSDNIVWDVGHQAYPHKILTGRKNQIGSIRSKDGLAPFPSRNESDYDVFGAGHSSTSVSSAVGMAIANKLNEGEKKTVAVIGDGAMTAGMAFEAMQHAGGIKPDMLIILNDN

SEQ ID NO: 111644 - protein, 295 aa, Unknown
  Bacterial polypetide isolated from the Sargasso Sea
FGTGLNLFEKKFPDRTFDVGIAEQHAVTFAAGLATEGYKPYAAIYSTFLQRAYDQVVHDVAIQSLPVRFAIDRAGLVGADGPTHAGSFDITYLSTLPNFVVMAASDESELVKMINTSVNINDRPSAFRYPRGNGVGVTMPSINEFLEIGKGRIIKEGKKVAILNFGTRLEECKKASEILSKKGEDITIIDARFVKPLDKKLIMEVANNHEVLITIEEGSIGGFGSHVMQFLSERGAFDNGLKFRSMILPDVFIDQDTPEKMYEKAGLDSLSIANKIQETLNSNILLAKNKNKISN

SEQ ID NO: 111645 - protein, 274 aa, Unknown
  Bacterial polypetide isolated from the Sargasso Sea
IAKDINKDNANVICVVGDGALSAGLAYEGLNNAGALKKRLIVILNDNKMSIDKPVGAMSTYLTRLLSSKSYSSIRNLVKKFTKNLPLNLSTTLYRTEEYSKGMISGGTLFEELGFYYLGPIDGHSINDLVKVLENVRDNKFNKPVFLHCITKKGKGYWPAEKSDDKFHGVEKFNINTGISLKKTNQRSYSQVFGETLSELAENDEKIIAITAAMMSGTGLKIFKNKYENRFFDVGIAEQHAVTMAAGMATEGFKPYVAIYSTFLQRAYDQMFMM

SEQ ID NO: 111646 - protein, 272 aa, Unknown
  Bacterial polypetide isolated from the Sargasso Sea
TPNDKLIWDVGHQCYPHKILTGRKDKIRTLRQGGGLSGFTKRLESEYDPFGAAHSSTSISSALGIAEANKLSNKSDNVVAVIGDGAISAGMAYEAMNNAGASKTKMIVILNDNDMSIARPVGAMGTYLAKIFSGKIYFSLRETIKLITSAFSKRFSAKAGKAEDLFRSAVTGGTLFSSLGFYYVGPIDGHDLNSLIPILKNARDSIHQGPILIHIKTKKGKGYSFAEEAKDNYHGVSKFNVKTGEQLKSTSNIPSYTKVFANTLIQHAKKDS

SEQ ID NO: 111647 - protein, 275 aa, Unknown
  Bacterial polypetide isolated from the Sargasso Sea
NDNDMSIAPPVGAMSKYLARLLSGKIYFSLRETIKLILSAFSKRFSKSAGKAEDMFRSMVTGGTLFNQLGFYYIGPIDGHDVNNLVTILENAKNSRHEGPILIHAITKKGKGYKPAEESGDKYHGVSKFNVLTGEQSKGKSKAPSYTKVFANTLIKHAENDTKIVAITGAMPSGTGLDLFQKKFPERMFDVGIAEQHGVTFAAGLATEGYKPFAAIYSTFLQRAYDQVVHDVAIQSLPVRFAIDRAGLVGADGPTHAGSFDVTYLSTLPNFIVMA

SEQ ID NO: 111648 - protein, 245 aa, Unknown
  Bacterial polypetide isolated from the Sargasso Sea
EKVKPFVAIYSTFLQRAYDQIIHDIAIQSLPVRFLIDRSGFVGADGATHAGSFDLSYLCCLPNFIVMAPSSGEELKNMIKLSLTINGKPSAIRYPRNLANDYDEKAKFSKIKLGEAKLVKKGKRIALLSLGTRLQKILEVSQLIKKNHKFQCSVLDMRFAKPIDRKSINSLIKNHEIFVTIEENAIGGFSSQVNNYLLNELSKTPKILNFFMKDKFIDQSDIEDQYTLSGISSKKIYEKLNKFLK

SEQ ID NO: 111649 - protein, 226 aa, Unknown
  Bacterial polypetide isolated from the Sargasso Sea
TALHYVFNTPVDKIVWDVGHQAYPHKLITGRKEAMDTIRQTNGLAPFPSRLESEYDTYGVGHSSTSISAALGMASAAKLKGEDKEIIAVIGDGAMTAGMAYEALSHAGSIDENILVVLNDNQMSISENIGGLKNYLAKIWASPLYNQIREGGKTVLRFIPAASRIARKAEIQAKGLLAPGTLFEELGLSYIGPVNGHDTVGMVKILNDLKSMEGPRLLHVITQKGK

SEQ ID NO: 111650 - protein, 262 aa, Unknown
  Bacterial polypetide isolated from the Sargasso Sea
SELKSLAGEVREEMIDAVSETGGHLGAGLGVVELSVALHYIFNTPNDKLIWDVGHQTYPHKILTGRKDRIRTLRKGKGLSGFTKRSESEYDPFGAAHSSTSISSALGIAVANRLSNKSDNVVAVIGDGAMSAGMAYEAMNNAGTSKTKMIVILNDNDMSIAKPVGAMRSYLAKILSGKMYFSLRETFKLIISAFSKRFSKKAGEAEDFLRSAVTGGTLFNSLGFYYVGPIDGHDMDSLISVLKNVKEVNYNGPVLVHLKTEK

SEQ ID NO: 111651 - protein, 308 aa, Unknown
  Bacterial polypetide isolated from the Sargasso Sea
AQKKGLIVILNDNKMSIDKPVGAMSTYLTRLLSSKSYSSLRNIIKKISKNLPSNLSNTLYRTEEYSKGLLSGGTLFEELGFYYLGPIDGHNVDEVVSVLENIRDNKFDKPVFLHCVTKKGKGYSPAEKSEDKFHGVEKFDINTGNSLKKTNLKSYSNVFGEKLTKLAKNDEKIVAITAAMMSGTGLKFFQQNFEKRFFDVGIAEQHAVTMAAGLATEGFKPFVAIYSTFLQRAYDQIVHDVAIQKLPVRFAIDRAGLVGSDGPTHAGSFDITYLATLPNFIVMAPSNQRDLSNMIELSCEINDTPSAF

SEQ ID NO: 111652 - protein, 298 aa, Unknown
  Bacterial polypetide isolated from the Sargasso Sea
SKLLTGKIYFSLRETFKLIISAFSKRFSKKAGKAEDFLRSAVTGGTLFNSLGFYYVGPIDGHDIDTLISVLKNAKDTNFEGPIMIHIKTEKGKGYQFAENSKDKYHGVSKFNIKTGVQEKSSSKIPSYTSVFANTLIKHAERDSKIIGITAAMPSGTGMDLFAKKFPNRMFDVGIAEQHAVTFSAGLATEGYKPYAAIYSTFLQRAYDQVVHDVAIQSLPVRFAIDRAGLVGADGPTHAGSFDITYLSTLPNFVVMAPSDESELVKMINTSVDINDKPSAFRYPRGSGIGIKLPEINE

SEQ ID NO: 111653 - protein, 279 aa, Unknown
  Bacterial polypetide isolated from the Sargasso Sea
DEINFPSDLRKIPESKLQKVADELREEMIDAVSVTGGHLGASLGVVELTVALHYIFNTPNDKLIWDVGHQCYPHKILTGRKDRIRTLRQGNGLSGFTKRSESEYDTFGAAHSSTSISSALGIAEANKLSNKSDNVIAVIGDGAISAGMAYEAMNNAGASKTKMIVILNDNDMSIARPVGAMSTYLAKIFSGRIYFSLRETLKLIMSAFSKRFSVKAGKAEDLLRSAVTGGTLFSSLGFYYIGPIDGHDLNSLIPILKNAKDSKHKGPILIHIKTKKGKG

SEQ ID NO: 111654 - protein, 318 aa, Unknown
  Bacterial polypetide isolated from the Sargasso Sea
MVYLGFTKRSESEYDPFGAAHSSTSISSALGIAEANKLESKSSNVIAVIGDGAISAGMAYEAMNNAGASRTKMIVILNDNDMSIAKPVGAMRTYLAKLFTGKIYFSLRETLKLITSAFSKRFSAKAGKAEDFLRSVVTGGTLFNSLGFYYAGPINGHDLSTLVPILKNARDSRHNGPILIHIKTQKGKGYSYAEKANDNYHGVSKFNVETGEQIKSGTDLPAYTKVFANTLVKHAKKDSKIVGITAAMPSGTGMDIFGKEFPNRMFDVGIAEQHAVTFAAGLATEGYKPYAAIYSTFLQRAYDQVVHDVAIQSLPVRF

SEQ ID NO: 111655 - protein, 272 aa, Unknown
  Bacterial polypetide isolated from the Sargasso Sea
MFDVGIAEQHGVTFAAGLATEGYKPFAAIYSTFLQRAYDQVVHDVAIQSLPVRFAIDRAGLVGADGPTHAGSFDITYLSTLPNFVVMAASDEAELVRMINTSVHINNRPSAFRYPRGNGIGVELPDIKEILKVGEGKIITQGKHIAILNFGARLNQCKKASEILEKKGITSTIFDARFAKPLDEKAIIELASSHEVILTIEEGSIGGFGSHVSKLLSERGFFDKGLKFRSMFLPDKFLDQDTPEKMYKSAGLDFESIAQKIESTLNSNIVIA

SEQ ID NO: 111656 - protein, 284 aa, Unknown
  Bacterial polypetide isolated from the Sargasso Sea
FEELGFFYLGPIDGHNFNHLIPIMTNIKNNKIRKPIFLHVITKKGKGYKPAEDSSDKFHGVNKFNIKTGHSLSSSNKQTFSEIFGKTLENEALQDEKIIGITAAMASGTGLNSFSKKFPKRFFDVGIAEQHAVTMAAGLATEGFKPFVAIYSTFLQRAYDQVVHDVAIQKLPVRFAIDRAGQVGADGPTHAGSFDISFLNSLPNFIIMAASDENELIRMIKTSLLINDRPSSFRFPRGSGSGVSEEINLNPLEIGKGKIVNEGNKIAIINFGARLEACKEAIDI

SEQ ID NO: 111657 - protein, 250 aa, Unknown
  Bacterial polypetide isolated from the Sargasso Sea
MARDLISGNSVFSQLGFLHIGPIDGHEMGHLLPVLKNLRDGDVTGPVLVHVVTEKGKGHPFSGPSAEKYHAVPKFDVITGTQQKAAANVPSYTSVFAKALIDAAQQDDRIVAITAAMPSGTGLDKVKERFPTRVFDVGIAEQHAVTFAAGLASEGMKPFCALYSTFLQRGYDQLVHDVAIQRLPVRFAIDRAGLVGADGATHAGIFDIAYMSCLPGMVIMCPSDEAELTHMVATAASHDEGPSAVRYPRG

SEQ ID NO: 111658 - protein, 276 aa, Unknown
  Bacterial polypetide isolated from the Sargasso Sea
IIVILNDNDMSIAKPVGAMRAYLAKILSGKLYFNFRETIKLIISAFSKRFSNKAGKAEDFLRSAVSGGTLFSSMGFYYMGPIDGHDINDLVSLLRNAKDINHDGPIMIHIKTEKGKGYKFAEKSEDKFHGVAKFNVNTGVQEKTKSNVPAYTKVFANTLLKHAEKDSKIIGITAAMPSGTGMDIFGKKFPSRMFDVGIAEQHAVTFAAGLATEGYKPYAAIYSTFLQRAYDQVVHDVAIQSLPVRFAIDRAGLVGADGPTHAGSFDITYLTTLPNF

SEQ ID NO: 111659 - protein, 242 aa, Unknown
  Bacterial polypetide isolated from the Sargasso Sea
GYDQIVHDVALQNLPVRFAIDRAGLVGADGATHAGSFDLVYLASLPNFTVMAAADELELMHMVATAAEHDLGPISFRYPRGEGVGIDLPEKGTPLEIGKGRVLREGKKVALASLGTRLEEALKAAEILDSKGISTTVADMRFAKPLDEKLLMELADNHEVLVTIEEGARGGFGAHVLHYFSDIGALEKGIKVRTMTLPDLFIDQANPSDMYKQALLQAENIVEKVLGSLGVSVGRFSADSSA

SEQ ID NO: 111660 - protein, 283 aa, Unknown
  Bacterial polypetide isolated from the Sargasso Sea
GMLFEQLGWRYMGPVNGHSLKDLIELIGQVRDLEGPIVIHALTQKGKGYSFAEEDAFKYHGVSPFVPEDGSFLKKSKRSDNSVSYSKVFSEKLGELMGKDSKVVGVSAAMLSGTGLIGLQKKYPERIFDVGIAEGHAVTCSAGMATEGLKPYVAIYSTFLQRALDHIIHDVAIQKLPVRFMIDRAGLVGADGPTHQGVYDLTYLRMIPGMTILVPRDGAELRMMIDFSYHYESGPIAVRYPRGNTVLTEENEIPPIELGRAHLLQDGADIVLLAVGVMVKMPS

SEQ ID NO: 111661 - protein, 299 aa, Unknown
  Bacterial polypetide isolated from the Sargasso Sea
QVKSKNNLPSYTNVFANTLIKHAKKDSKIVAITAAMPDGTGLDIFRKEFPERTFDVGIAEQHAVTFAAGLATENYKPYAAIYSTFLQRAYDQVVHDVAIQSLPVRFAIDRAGLVGADGPTHAGSFDITYLSTLPNFVVMAASDEAELVRMINTSTEINDRPCAFRYPRGTGLGSVLPSIDEKIEIGKSRIIQEGKKLAILNFGARLNETIKAAENLKKKGINITIVDSRFAKPLDENLIWQLATTHECIMTIEEGSIGGFGSHVIDFLTKKGLMDNNLKFRSMILPDFFIDQDTPENMY

SEQ ID NO: 111662 - protein, 255 aa, Unknown
  Bacterial polypetide isolated from the Sargasso Sea
AIAEQHSVTLAAGMAIEGLKPIVAIYSTFLQRAYDQLIHDVSLQNLNVTFAIDRAGAVGSDGPTHQGAFDLAFLRCIPNMTIMTPSSKEKLWKMLNTGFNHDGPVAIRYPRGEAKGDKFEKDKSCIDFGKSDLIKEAQSEEVVILSFGSCLELALEISNDIEATIIDMNFVKPLDEKRILQCSSYKIIVTLEENSLKGGAGSSVNEVLTSNNIKTDILSFGFPDQFIPHGDQDNQKLNAGLDKDQIIKKIKDRLN

SEQ ID NO: 111663 - protein, 222 aa, Unknown
  Bacterial polypetide isolated from the Sargasso Sea
MSLKYLPKITCPDDIKDFTREELVELCSELRHFTINTITEVGGHLAPTLGVIELTVALHYVYNTPKDKLVWDVGHQGYAHKLLTGRYKEFSTIRQYNGLSGFLKRSESEYDVIGAGHASTSISAALGLAEARMQKNQDYRVAAIIGDGSMTGGLAFEGINNAGHLGRQLLVILNDNEMSISPNVGAISSYFTRLISNPLYNRVRNEFWDLTGKLPIAKSKTR

SEQ ID NO: 111664 - protein, 97 aa, Unknown
  Bacterial polypetide isolated from the Sargasso Sea
SELINVVSETGGHLGAGLGVVELTVALHYVFNTPKDKLVWDVGHQCYPHKLITGRRDRIRTLRKGGGLSGFTKRSESEYDPFGAAHSCTSISSTLGM

SEQ ID NO: 111665 - protein, 96 aa, Unknown
  Bacterial polypetide isolated from the Sargasso Sea
MKQNTSKQTILDQINSPDDLKKLNIDQLESLANELRLDLINVVSKTGGHLGAGLGVIELTIALHYVFNAPKDRLIWDVGHQAYPHKILTGRRKKMG

SEQ ID NO: 111666 - protein, 290 aa, Unknown
  Bacterial polypetide isolated from the Sargasso Sea
AYEAMNNAGASKTKMIVILNDNDMSIAKPVGAMRSYLAKLLSGKIYFSLRETIKLIVSAFSKRFSVKAGKAEDFLRSAVTGGTLFNSLGFYYIGPIDGHDMDVLLPILKNARDSKHDGPIMIHIKTQKGKGYSYAEKANDKYHGVSKFNIETGEQQKSKSNLPAYSKVFANTLIKHAERDSKIVGITAAMPDGTGLDIFGKEFPKRVFDVGIAEQHAVTFAAGLATEGYKPYAAIYSTFLQRAYDQIVHDVAIQSLPVRFAIDRAGLVGADGPTHAGSFDITYLSTLPNL

SEQ ID NO: 111667 - protein, 294 aa, Unknown
  Bacterial polypetide isolated from the Sargasso Sea
YPHKLITGRRDRIRTLRKGGGLSGFTKRSESEYDPFGAAHSSTSISSTLGMATAKKLSNDKNNVVAVIGDGAMSAGMAYEAMNNAGAMKSKLIVILNDNDMSIAPPVGAMSKYLARLLSGKIYFSFRETIKLILSAFSRRFSKKAGKAEDLLRSAVTGGTLFSQLGFYYIGPIDGHDVNNLVTILENAKNSNHQGPILIHAITKKGKGYKPAEESGDKYHGVSKFDVLTGKQVKGKSEGPSYTKVFANTLIKHAQNDTKIVAITGAMPSGTGLDLFQKKFPDRMFDVGIAEQHG

SEQ ID NO: 111668 - protein, 298 aa, Unknown
  Bacterial polypetide isolated from the Sargasso Sea
PILVHVKTEKGKGYKFAEKSEDKYHGVSKFNINTGIQEKSKSNIPSYTKVFANTLVKHAEKDSKIIGVTAAMPSGTGMDVFGDKFPSRMFDVGIAEQHAVTFSAGLATEGFKPFAAIYSTFLQRAYDQVVHDVAIQSLPVRFAIDRAGLVGADGPTHAGSFDITYLATLPNFVVMAASDEAELVRMINTAVDINDRPSAFRYPRGNGVGVDLPNINEKIEIGKARFISEGKKVALLNFGTRLNECIIARESLAKKGINITLVDARFVKPLDENLIWQISTDHEALITIEEGSVGGFGS

SEQ ID NO: 111669 - protein, 247 aa, Unknown
  Bacterial polypetide isolated from the Sargasso Sea
SAGLACEKKKPVVAIYSTFLKRAYDQLIHDVALQNLDVTFAIDRAGLVGEDGPTHSGNYDLVYLRCIPNMIVMTPSDENETRKLLTTGFFHNGPASIRYPRGSGPNVVVENDLSPVEIGKGRLIREGSKNLIVINFGALLDQAKEVASTLGLTLIDMRFVKPLDEDILRKYLSEAQAFISIEDGSIAGGAGSAVQEFCSDNNINIKSKLFGIPDIFIEHQSREEMIVESGLKASRIIEKIEELGLVK

SEQ ID NO: 111670 - protein, 226 aa, Unknown
  Bacterial polypetide isolated from the Sargasso Sea
NINFPDDVRKLSQSDIKILADEVRQELIEVVSETGGHLGAGLGVVELTVVLHYIFNTPHDKLIWDVGHQTYPHKILTGRKNRIRTLRKGEGLSGFTKRSESEYDPFGAAHSSTSISSALGIAVANKLSNKSGNVIAVIGDGAISAGMAYEAMNNAGENKTKMIVVLNDNDMSIAKPVGAMRRYLAKILSGKIYFSFRETLKLIISAFSKRFKNQAGKAEAFLRSAV

SEQ ID NO: 111671 - protein, 254 aa, Unknown
  Bacterial polypetide isolated from the Sargasso Sea
GIQEKSKSNIPAYTKVFANTLIKHAEKDSKIIGITAAMPSGTGMDIFGKKFPSRMFDVGIAEQHAVTFAAGLATEGYKPYAAIYSTFLQRAYDQVVHDVAIQSLPVRFAIDRAGLVGADGPTHAGSFDITYLSTLPNFVVMAASDESELVRMINTSVNINDRPSAFRYPRGNGVGVNLPNIDEKIQIGKGRIIKEGKKVAILNFGARLNECLIARENLIKKGINITIVDARFVKPLDENLIWQLAADHETIITI

SEQ ID NO: 111672 - protein, 291 aa, Unknown
  Bacterial polypetide isolated from the Sargasso Sea
TGLDIFNLKHPSRLFDVGIAEQHAVTMAAGLATEGFKPYVAIYSTFLQRAYDQIVHDVALQNLPVRFAIDRAGQVGADGPTHAGSFDITYLSTLPNFIIMAPSDQNELIRMINTSVLINDRPSAFRYPRGTGIMDENISDQDPIDIGKGIILLEGNEVAIINLGTRMQSCKDAIKILNDHNIYPTLADARFAKPIDNELIEKLLDNHKYLLTIEEGSSGGFSASILNYIHNNRPKQTLTKINNIFFPDKFINHQTPEQQYLEIGMDAKSIAEKVIKFYQDNVINFQSYNLN

SEQ ID NO: 111673 - protein, 295 aa, Unknown
  Bacterial polypetide isolated from the Sargasso Sea
MSGTGLKLFQKNFEKRFFDVGIAEQHAVTMAAGLATEGFKPFVAIYSTFLQRAYDQIVHDVAIQKLPVRFAIDRAGLVGSDGPTHAGSFDITYLATLPNFIIMAPSNQRELSNMIELSCEINDTPSAFRFPRGTGSDEFFNNQPIDIDIGKGYILIEGNDVAILNLGTRLEKCIEASNFLNKNNIYPTIADARFAKPLDTQLIDNLLNNHKYILTIEEGSIGGFSSHVLHYVHNIRSKKDNVLIKNLIFPDRFVEHMTPDEQYQDIKMDTESIIREINNFYENKIIDIKNFKFKV

SEQ ID NO: 111674 - protein, 301 aa, Unknown
  Bacterial polypetide isolated from the Sargasso Sea
YEGMNNVGILDSDMIIILNDNRMSIAPAVGALSNYLSKIVSSEPFNSVREIAKKMVEIFPQQISQTAKKAEDIARNILTQDNTFFSQMGMFYLGPIDGHDVETLVKVLKNLNDGSRHGPILLHVVTEKGKGHPFSKVSDEKYHAVSKFNVVTGNSIKSSSNVPTYTEVFADTLCNIAEDNEKITAITAAMPSGTGLNKFKEKFENRFFDVGIAEQHAVTFAAGLASQGMQPFVAIYSTFLQRAYDQVIHDVVIQKLPVKFMLDRAGLVGADGSTHAGAFDLAYLLCLPNVVVMAPSDENEL

SEQ ID NO: 111675 - protein, 148 aa, Unknown
  Bacterial polypetide isolated from the Sargasso Sea
MIDSARYPRLARIQSPDDLRRFEESELPAIADELRAYLIESVGKSGGHFGAGLGVIELTVALHYLYQTPVDQLVWDVGHQTYPHKILTGRRDQIHTVKQKDGVAPFPKREESEFDTFGVGHSSTSISAALGMAIARQREGDDRKVVAV

SEQ ID NO: 111676 - protein, 244 aa, Unknown
  Bacterial polypetide isolated from the Sargasso Sea
MTTILDQLQQPEQIQHLTQDELLQLAQECRERVIQVTSQTGGHLASSLGTVEITIALFNVFNFKYDRIIWDVGHQAYIHKLLTNRNEKFLSLGKKDGIKKFLSRSESEYDHFGAGHASTSISAGVGMSIARDLKQEDHRHVISIIGDGALTGGLAFEALNHNGYLNKNMIVILNDNGMSIDPNVGALSKIITRVISSKSYNSLREQTWKLSGKFPFAETSRMALHKINASLKSFLTPRHAFEQL

SEQ ID NO: 111677 - protein, 318 aa, Unknown
  Bacterial polypetide isolated from the Sargasso Sea
SVLKNAKEINHDGPIMIHFKTEKGKGYRFAEQSEDKYHGVTKFNVNTGVQEKSKSNIPSYTKVFANTLVKHAEKDSKIIGITAAMPSGTGMDIFANKFASRMFDVGIAEQHAVTFAAGLATEGYKPYAAIYSTFLQRAYDQVVHDVAIQSLPVRFAIDRAGLVGADGSTHAGSFDITYLSTLPNFVVMAASDESELVKMINTSVDINDRPSAFRYPRGNGMGVELPNIGEKIEIGKGRVIKEGKKIALINFGARLKECLIVEESLKKKGINISLIDARFCKPLDENLMWQIANDHEIVISIERGSIGGFWFTLRTVFK

SEQ ID NO: 111678 - protein, 229 aa, Unknown
  Bacterial polypetide isolated from the Sargasso Sea
MTKYKFLDNVNFPSDIKNLKSSELITLSKELREELIEAVSFTGGHLGAGLGVVELTVALHYVFDTPNDKIVWDVGHQSYPHKILTGRKNRIKTLRQGNGLSGFTKRSESEYDPFGAAHSSTSISAALGIATANKLSKKSENVVAVIGDGAISAGMAYEAMNNAGTSKTKMIVILNDNDMSIAEPVGAMRSYLAKLLTGKIYFSLRETFKLIISAFSKRFSKKAGKAEDF

SEQ ID NO: 111679 - protein, 139 aa, Unknown
  Bacterial polypetide isolated from the Sargasso Sea
MEWRRLQKIQIQIKNIVAVIGDGAMTAGMAFEALSHIGHLKPNLLVILNDNDMSISENVGGLSNYFSRIWASKTYKGIKKSGSSFLKPLPQAYHLARKVETQMKAMVAPGTIFEELGLNYIGPIDGHNLKELKDVIFKF

SEQ ID NO: 111680 - protein, 280 aa, Unknown
  Bacterial polypetide isolated from the Sargasso Sea
STLGMATAKRLSNDNNNVVAVIGDGAMSAGMAYEAMNNAGAMKSKLIVVLNDNDMSIARPVGAMSKYLARLLSGKIYFSLRETIKLILSAFSKRFSKSAGKAEDMLRSFVTGGTLFNELGFYYIGPIDGHDVNNLVTILENVKNSKYEGPILIHAITKKGKGYKPAEESGDKYHGVSKFNIATGEQFKGKSKASSYTKVFANTLIKHAENDTKIVAITGAMPSGTGLDLFEKKFPERMFDVGIAEQHGVTFAAGLATEGYKPFAAIYSTFLQRAYDQVVH

SEQ ID NO: 111681 - protein, 278 aa, Unknown
  Bacterial polypetide isolated from the Sargasso Sea
MAYEAMNNAGSSKTKMIVVLNDNDMSIAKPVGAMRSYLAKILSGKIYFSFRETLKLIISAFSKRFTKKAGKAEDFLRSAVTGGTLFSSMGFYYIGPIDGHDIDTLVSVFNNTNKIDFNGPIMIHVKTQKGKGYKFAENSIDKFHGVSKFNITTGEQIKTKSNLPSYTKVFANTLVKHAEKDSKIIGITAAMPSGTGMDIFAKNFPDRMFDVGIAEQHAVTFAAGLATEGYKPFAAIYSTFLQRAYDQVVHDVAIQSLPVRFAIDRAGLVGADGPTHAG

SEQ ID NO: 111682 - protein, 281 aa, Unknown
  Bacterial polypetide isolated from the Sargasso Sea
DKFKEIYPKRFFDVGIAEQHAVTFSAGLAIEGLKPFTTIYSTFLQRAYDQIIHDIAIQNLPVKFAIDRAGLVGADGPTHAGSFDLAYLSILPNFVVMAASNEIELARMVKTAAEYNSGPISFRYPRGNVFGLDMPERIEALKIGKGKIIKNGEKIALLNLGTRIEEVKKASDILDSMGLSCTIADARFAKPLDTELIKDLSKNHELMITIEEGSSGGFGAHVLMHLAEQGILDDGFKIRNLYLPDTFIQQGDASDMYAQAGLNSENIVKTALKVFGINKSE

SEQ ID NO: 111683 - protein, 270 aa, Unknown
  Bacterial polypetide isolated from the Sargasso Sea
RPGGHLGAGLCVIELTVALHYIFDTPNDKLVWDVGHQTYPHKLLTGRKDKIRTIRQGNGLSGFTKRTESEYDPFGAAHSSTSISSALGIATANKLSKKSNDVVAVIGDGAISGGMAYEAMNNAGASKTKLIVILNDNDMSIAKPVGAMRSYLAKLLSGKLYFSLRETIKLIISSFSKRFSAKAGKAEDFLRTAVTGGTLFSSLGFYYIGPIDGHDLEALIPVLKNAKESKHEGPIMIHIKTKKGKGYSFAEEASDKFHGVSKFNIQTGVQ

SEQ ID NO: 111684 - protein, 265 aa, Unknown
  Bacterial polypetide isolated from the Sargasso Sea
LTGRFEEFPSIRQYGGLSGFLKRSESEYDVFGAGHASTAISAALGVAEARYQKKEKHRAVAIIGDGAMTGGLAFEAINNAGHLGRQITVILNDNEMSISPNVGAISKYFTRLISNPTYNRLKTEAWEITKKLPLARGTIQAFLSRLDKSIKNIIVPGMLFEEMGFRYFGPIDGHDLDELIKTLDTIKDIEKPVLLHVITKKGKGMSVAEDDPVKYHGVKANGKSNGSAKKIIKQSEVPSFQDAFGYLSCEIAENRKDTVCITAAM

SEQ ID NO: 111685 - protein, 276 aa, Unknown
  Bacterial polypetide isolated from the Sargasso Sea
MREGSGLVKFSQQYPDRYFDVAIAEQHAVTFAAGLAIADQKPVVAIYSSFLQRAYDQLIHDVALQELPVLFAIDRAGLVGADGPTHQGAFDISFLRTVPNMVIMTPSDENECRQMLYTGYQCNGPAAVRYPRGSGTGIQVESEMQALALGKGRIVRQGKGTAILAFGTLLQQAKAAAEALDATLVDMRFVKPMDEALVLSLAATHDQFVTLEDNAIMGGAGSAVNELLMRSKQCKPVLNLGLPDRFVEQGTQEEIYALLGLDGAGIQRSIEQWLLA

SEQ ID NO: 111686 - protein, 255 aa, Unknown
  Bacterial polypetide isolated from the Sargasso Sea
QTLVKLCEQDPRIVGITAAMATGTGLDLLQKALPEQYIDVGIAEQHAVTLAAGMACDGLRPVVAIYSTFLQRAFDQLIHDVGIQKLPVTFVLDRAGIVGADGPTHQGQYDISYLRCVPNFTVMAPKDEAELQRMLVTSLQHDGPIAMRIPRGSGEGVPLLEEGWEPLEIGRGELLADGDDLMIVAYGSMVAPAMATAGLLQEHGIRASVVNARFLRPLDESLLVPMARRIGRVVTMEEGCLAGGFGTAVLEALQE

SEQ ID NO: 111687 - protein, 174 aa, Unknown
  Bacterial polypetide isolated from the Sargasso Sea
DIFGKEFPKRMFDVGIAEQHAVTFAAGMATEGYKPYAAIYSTFLQRAYDQVVHDVAIQSLPVRFAIDRAGLVGADGSTHAGSFDITYLSTLPNFIVMAASDESELVKMINTSVDIDNRPSAIRYPRGVGVGVELPSIEEKIEIGKGRIIQSGSQVCLLSLGTRLEECKLAAEDL

SEQ ID NO: 111688 - protein, 226 aa, Unknown
  Bacterial polypetide isolated from the Sargasso Sea
YVFNTPKDRLVWDVGHQAYPHKILTGRRDRIRTLRQKNGLYGFTKRTESEYDPFGAAHASTAMSSGLGMAIARDLMKKKNNVICVVGDGAMSGGMAYEAMNNAGSQKSRLVVILNDNDMSIAPPVGALSNYLSKLISSGTYQSVKDLGGKIVSKTFPDRIGKAAKKAEEFARGIVTGGTLFEELGFFYVGPVDGHNLNTLIPVLENAKKYKKGPILIHCVQKKVKD

SEQ ID NO: 111689 - protein, 266 aa, Unknown
  Bacterial polypetide isolated from the Sargasso Sea
SVDISSTSISAALGMDEASKHQKNNKNIFSVIGDGAMTAGIAFEAMMHAGHLNNNLKIILNDNDMSISKNKGGLSDYLAKIWASKSYKKLKSSGKKVLKNLPYGLHITRNLKDGIKSAVMPGNLFEDLGLHYVGPIDGHDIPLLIKTINRMMEKNEPYLLHVITKKGAGFEPAENERIKFHAISKIENTPAPKKTKFQDIFGDWLCYKAKQDSKLVGITPAMKEGSGMVNFEREFPERFYDVAIAEQHAVTFSAGMSLEGMKPVVA

SEQ ID NO: 111690 - protein, 198 aa, Unknown
  Bacterial polypetide isolated from the Sargasso Sea
MSLDLQHYPTLALAQTPDKLRQLPQDKLRELADELREYLLNCVSQTSGHFASGLGTVELTVALHYVYNTPFDRLLWDVGHQAYPHKILTGRAERMSTIRQKNGLHPFPWPPESDYDTFAVGHSSTSISAALGMAVASEKEGKDRKVVAVIGDGAMTAGMAFEALNHAGDIKKDMVVVLNDNEMSISENVGALNSHLAR

SEQ ID NO: 111691 - protein, 272 aa, Unknown
  Bacterial polypetide isolated from the Sargasso Sea
VGIAEQHAVTFAAGLATEGYKPYAAIYSTFLQRAYDQVVHDVAIQSLPVRFAIDRAGLVGADGPTHAGSFDVTYLSTLPNFIVMAPSDEGELIKMINTSIDINNNPSAIRYPRGNGFGVEIPSIDEKIKIGKGRVIFEGKNIAILNFGARLQECILAKENLNKKGINPTIIDARFAKPLDENLIWQIAADHQYLITIEEGSIGGFGSHVTNFLTEKNLLDSNLKIRTMILPDQFLDHDTPLEMYKQAGLDSNSIEQKVLDLLNSKIIVQKQN

SEQ ID NO: 111692 - protein, 289 aa, Unknown
  Bacterial polypetide isolated from the Sargasso Sea
IVILNDNDMSIARPVGAMGTYLAKIFSGKIYFSLRETIKLITSAFSKRFSAKAGKAEDLFRSAVTGGTLFSSLGFYYIGPIDGHDLSSLIPILRNAKDSKHEGPILIHIKTKKGKGYSFAEQAKDNYHGVSKFNVETGEQIKSINNTPSYTKVFADTLIQHAKKDSKIVAITAAMPDGTGLNSFRKEFPERTFDVGIAEQHAVTFAAGLATENFKPYAAIYSTFLQRAYDQVVHDVAIQSLPVRFAIDRAGLVGADGPTHAGSFDTTYLSTLPNFVVMAASDEAELVRM

SEQ ID NO: 111693 - protein, 279 aa, Unknown
  Bacterial polypetide isolated from the Sargasso Sea
GPVDGHNLKLLVQLFKKYKKKELHGPVFLHLITQKGRGYKPAEQSKDKFHGVSSFDVKTGIQNKSKVVTYTNVVSDTLLKLAKKDKKIVAITAAMPSGTGLNKFQEKYPLRFYDVGIAEQHAVTFAGGMTTESIKPFVAIYSTFLQRAYDQVVHDIAIQSLPVRFLIDRSGFVGADGATHAGSFDLSYLCCLPNFIVMAPSNGEELKNMIKLAQSINNKPSAIRYPRDFAYEYNNNNNFQKIFIGKGKILKKGKRIAFLNLGTRLKKVLEINEMIKNHH

SEQ ID NO: 111694 - protein, 291 aa, Unknown
  Bacterial polypetide isolated from the Sargasso Sea
LIELIGQVRDLEGPIVIHALTQKGKGYSFAEEDAFKYHGVSPFVPEDGSFLKKSKSSDNTISYSKVFSEKLGELMKKDSKVVGVSAAMLSGTGLIGLQKKYPDRIFDVGIAEGHAVTCSAGMATEGLKPYVAIYSTFLQRALDHIIHDVAIQKLPVRFMLDRAGLVGADGPTHQGVYDLTYLRMIPGMTIMVPRDGAELRKMIDFSYHYESGPIAVRYPRGNTFLTDENEIPPIEMGRAHLLQDGADIMLLAVGIMVEKAIQTANILEQEGFSVAVVNARFVKPLDQEMIL

SEQ ID NO: 111695 - protein, 297 aa, Unknown
  Bacterial polypetide isolated from the Sargasso Sea
KNARDSKHEGPILIHIKSQKGKGYTFAEEAKDNYHGVSKFNVETGQQLKSTSKLPSYTKVFANTLIQHAKKDSKIVAITAAMPDGTGLDIFRKEFPDRTFDVGIAEQHAVTFAAGLATENFKPYAAIYSTFLQRAYDQVVHDVAIQSLPVRFAIDRAGLVGADGPTHAGSFDTTYLTTLPNFIVMAASDEAELVRIINTSTEINDRPCAFRYPRGTGLGSALPSINEKIEIGKSKIIKEGKKLAILNFGARLSETLKAAENLLKKGVQITVVDARFAKPLDENLIWQLATTHEAIMT

SEQ ID NO: 111696 - protein, 221 aa, Unknown
  Bacterial polypetide isolated from the Sargasso Sea
AIDRAGLVGADGPTHAGSFDTTYLSTLPNFVVMAASDEAELVRMINTSTEINDRPCAFRYPRGTGLGSELPSINEKIEIGKSKIIQEGKKLAILNFGARLNETLKASTNLKKKGVSVTVVDARFAKPLDENLIWQLATTHEAIMTIEEGSIGGFGSHVVDFLTKKGLMDSSLKFRSMILPDVFIDQDTPENMYKIANLDSSSIEEKILDLLNSNIILQKQK

SEQ ID NO: 111697 - protein, 220 aa, Unknown
  Bacterial polypetide isolated from the Sargasso Sea
IHDVALQNLDVTFAIDRAGLVGEDGPTHSGNYDLVYLRCIPNMIVMTPSDENETRKLLTTGFFHNGPASIRYPRGSGPNVDVENDLTPVEIGKGRLIKERSKDLIVINFGALIDQAKEVANTLGLTLIDMRFVKPLDEDILKKYLSKAQAFVSIEDGSVAGGAGSAVQEFCSDNNINIKSKLFGIPDVFIEHQSREEMIEESGLKASKIIKEIEELRLVK

SEQ ID NO: 111698 - protein, 282 aa, Unknown
  Bacterial polypetide isolated from the Sargasso Sea
IEELKILSEEIRKEMIEAVSVTGGHLGAGLGVVELTVALHYIFDTPNDKLIWDVGHQSYPHKIITGRKDKIRTLRQGKGLSGFTKRSESEYDPFGAAHSSTSISSALGIAVANKLSNKSNDVVAVIGDGAISAGMAYEAMNNAGISKTKMIVVLNDNDMSIAKPVGAMRLYLAKLLSGKLYFSVREILKLIISAFSKRFSAKAGKAEDFLRSAFTGGTLFNSLGFYYVGPIDGYDLDSLIQVLKNAKESNHEGPIMIHIKTEKGKGYSFAENALDKYHGVSK

SEQ ID NO: 111699 - protein, 300 aa, Unknown
  Bacterial polypetide isolated from the Sargasso Sea
ARPVGAMSTYLAKIFSGKIYFSLRETIKLIMSAFSKRFSAKAGKAEDLLRSAVTGGTLFSSLGFYYIGPIDGHDLNSLIPILKNAKDSKYEGPILIHIKTKKGKGYTFAEEAKDHYHGVSKFNVKTGEQHKSTSKLPSYTKVFANTLIQHAKKDSKIVAITAAMPDGTGLDIFRKEFPDRTFDVGIAEQHAVTFAAGLATENFKPYAAIYSTFLQRAYDQVVHDVAIQSLPVRFAIDRAGLVGADGPTHAGSFDTTYLTTLPNFIVMAASDEAELVRMINTSTEINDRPCAFRYPRGTGL

SEQ ID NO: 111700 - protein, 266 aa, Unknown
  Bacterial polypetide isolated from the Sargasso Sea
IHIKTEKGKGYEFAEKSKDKFHGVSKFNVNTGIQEKSTSSSPAYTKVFANTLIKHAEKDSKIIGITAAMPSGTGMDLFGEKFPSRMFDVGIAEQHAVTFAAGLSTEGYKPYAAIYSTFLQRAYDQVVHDVAIQNLPVRFAIDRAGLVGADGPTHAGAFDITYLSTLPNFVVMAASDEAELVRMVNTSIDINDRPSAFRYPRGNGVGVDLPSIDEKIEIGKGRVIKEGKKIAIINFGARLSECLMASENLSKKGVNPTIVDARFAKP

SEQ ID NO: 111701 - protein, 253 aa, Unknown
  Bacterial polypetide isolated from the Sargasso Sea
NHLADELRSDLISFVSKTGGHLGAGLGVVELTIALHYVFDAPKDKIIWDVGHQAYPHKMLTGRRDLMQSLRKEKGLSGFTNRAESKYDVFGAGHSSTSISAGLGMAVARDLKGENNTIISVIGDGAMSAGMAWEALNNLGSQNKKMIVILNDNDMSIAPAVGAVSSYLSKLISSKPLTSMRELAKQVASHLPVEIEKAAKRADELARTMMGGGTIFNNLGMYYIGPVDGHNVIDLVHLLKNLNNNSSDGPVLL

SEQ ID NO: 111702 - protein, 319 aa, Unknown
  Bacterial polypetide isolated from the Sargasso Sea
DLNQLSNELRKELIDAVSETGGHLGAGLGVVELTVALHYIFDTPKDKIVWDVGHQAYPHKIITGRRNKIRTLRKGGGLSGFTKRSESEYDPFGAAHSSTSISSTLGMAVAKRLSKNSNHVVAVIGDGAMSAGMAYEAMNNAGAMKSKLIVILNDNDMSIARPVGAMSSYLARLLSGKTYFSLRETLKLITSAFSKRFKDRAGKAEEFIRDIVSGGTLFNELGFYYVGPIDGHDLNVLLPVLKNVKNSKYNGPILIHAVTKKGKGYKPAENSRDKFHGVSKFNVITGEQSKSKTNLPTYTKVFADTFSKHAENDTKIVGI

SEQ ID NO: 111703 - protein, 291 aa, Unknown
  Bacterial polypetide isolated from the Sargasso Sea
MAGSSKTKMIVILNDNDMSIAKPVGAMSTYLAKLLSGKMYFSLRETIKLIISAFSKRFSDKAGKAEDFLRSAVTGGTLFNSLGFYYVGPIDGYDLDGLILVLKNAKKLNHEGPIMIHIKTQKGKGYEFAEKSHDKYHGVTKFNVKTGIQEKSKSKIPSYTKVFANTLVKHAENDSKIIGITAAMPSGTGMDIFSKKFPNRMFDVGIAEQHAVTFAAGLATEGYKPYAAIYSTFLQRAYDQVVHDVAIQSLPVRFAIDRAGLVGADGPTHAGSFDITYLSTLPNFIVMAASG

SEQ ID NO: 111704 - protein, 278 aa, Unknown
  Bacterial polypetide isolated from the Sargasso Sea
KFPDRYYDVGIAEGHAVTFSAGLATQGIRPIVAIYSTFLQRAFDHIVHDVSVQNLPVIFCMDRSGIAGEDGPTHHGALDIPYFRCIQGMILAAPKNGNELRNLLYTALNQKGPFGIRYPKFSSVEFDRNGQADLLPIGSWEVEKKGDDLMILAVGPMVYNALSVASELDKENISCEVVNCRFIKPMDTAYLNSIIKRGFDKIITIEEGVINGGFGDAVCSYLLENGYRGAIKRLGLPDSYVEHGSRNQILNSLSLGNDGIKNKIIELYASAKEEVLEK

SEQ ID NO: 111705 - protein, 287 aa, Unknown
  Bacterial polypetide isolated from the Sargasso Sea
MTKEYEYLNQINFPSDLKKIPESKLQKVADELREEMIDAVSVTGGHLGASLGVVELCVALHFIFNTPNDKLIWDVGHQCYPHKILTGRKDKIRTLRQGGGLSGFTKRLESEYDPFGAAHSSTSISSALGIAEANRLSNKSDNVIAVIGDGAISAGMAYEAMNNAGASKTKMIVILNDNDMSIARPVGAMGTYLAKIFSGKIYFSLRETIKLITSAFSKRFSAKAGKAEDLLRSAVTGGTLFSSLGFYYIGPIDGHDLSSLVPILRNAKDSKHEGPILIHIKTKKGKG

SEQ ID NO: 111706 - protein, 307 aa, Unknown
  Bacterial polypetide isolated from the Sargasso Sea
CFKTGGHLGAGLGVVELTVALHYVFNTPRDKLIWDVGHQAYPHKIITGRKKRIESLRKKNGLYGFVKRKESEYDPFGTAHSSTAVSAGLGIKIAKDINKDNANVICVVGDGALSAGLAYEGLNNAGALKKRLIVILNDNKMSIDKPVGAMSTYLTRLLSSKSYSSLRNLITKFSRTLPNKLSKTLYRTEEFSKGMLSGGTLFEELGFYYLGPIDGHNVNELVSVLENIRDNKFNKPIFLHCITKKGKGYKPAEKSDDKFHGVEKFDIDTGASIKKSNQKSYSQVFGETLSKLAENDEKIVAITAAMM

SEQ ID NO: 111707 - protein, 308 aa, Unknown
  Bacterial polypetide isolated from the Sargasso Sea
SSNVIAVIGDGAISAGMAYEAMNNAGASKTKMIVILNDNDMSIAKPVGAMRTYLAKLFTGKIYFSLRETLKLITSAFSKRFSAKAGKAEDFFRSAVTGGTLFSSLGFYYAGPIDGHDLSSLVPILKNAKESRHEGPIMIHIKTQKGKGYSYAEKANDHYHGVSKFNVETGEQVKSKSNLPAYTKVFANTLIKHAKKDSKIIGITAAMPGGTGMDIFGKEFPSRMFDVGIAEQHAVTFAAGLATEGYKPYAAIYSTFLQRAYDQVVHDVAIQSLPVRFAIDRAGLVGADGSTHAGSFDITYLSTLPNFI

SEQ ID NO: 111708 - protein, 201 aa, Unknown
  Bacterial polypetide isolated from the Sargasso Sea
MTKLIKQINFPSDLRKLKKENLKQVSDELRNELIDVVSETGGHLGAGLGVVELTVALHYVFDTPKDKLVWDVSHQCYPHKIITGRRDRIKTLRKGGGLSGFTKRTESEYDPFGAAHSSTSISATLGMSVAKKLSNNNNNVIAVIGDGAMSAGMAYEAMNNAGALKSNLIVVLNDNDMSIARPVGAMSKYLANLLSGKLYFS

SEQ ID NO: 111709 - protein, 247 aa, Unknown
  Bacterial polypetide isolated from the Sargasso Sea
AALGFAVSRDLGGACDTGHGDAIAVIGDGAMSAGMAFEALNNAGHLKKRLIVILNDNEMSIAPPVGALSSYLSRLYAGEPFQEFKAAAKGAVSLLPPPFQEGAKRAKEMLKGMTVGGTLFEELGFSYVGPIDGHDMDQLLPVMRTVRQRANGPILIHVCTRKGKGYAPAETRSDGGHATAKFDVATGEQKKAASNAPSYTKVFAEALLQEAAQDDKICAITAAMPDGTGLDLFEKRYPSRCFDVGIA

SEQ ID NO: 111710 - protein, 302 aa, Unknown
  Bacterial polypetide isolated from the Sargasso Sea
SQINFPSDLNKIPESKLQNVADELREELIDVVSVTGGHLGASLGVVELSVALHFIFNTPNDKLIWDVGHQCYPHKILTGRKDRIRTLRQGGGISGFTKRSESEYDTFGAAHSSTSISSALGIAEANKLSNKSDNVVAVIGDGAISAGMAYEAMNNAGASKTKMIVILNDNDMSIARPVGAMSTYLAKIFSGKIYFSLRETIKLIMSAFSKRFSAKAGKAEDLLRSAVTGGTLFSSLGFYYIGPIDGHDLNSLIPILKNARDSKHEGPILIHIKTKKGKGYTFAEDAKDNFHGVSKFNIKTGK

SEQ ID NO: 111711 - protein, 331 aa, Unknown
  Bacterial polypetide isolated from the Sargasso Sea
IFYTPYDNLVWDVGHQAYLHKILTGRKNKIQTIRKKEGLAPFPSRKESEYDTFGVGHSSTSLSAMLGMAIASKESNPDKKHVAIIGDGAMTAGIAFEALSHTGHLKPNVLIILNDNDMSISENIGGLSNYFSRIWASKIYKGIKKSGASFLKPLPQAYHLARKVETQMKAMVAPGTIFEELGLNYIGPIDGHNLKELINVISNLKEFDGPQFLHVITKKGAGLDPAEADRIGFHAIGKINSIKDEKTKQKKYQDIFGEWIVDMASQDNDLIGITPAMKEGSGLVMFSKKYPERYFDVAIAEQHSVTFAAGLAVENKKPRGCYIFNIFTKSL

SEQ ID NO: 111712 - protein, 278 aa, Unknown
  Bacterial polypetide isolated from the Sargasso Sea
KHEGPIMIHIKTQKGKGYSYAEKATDHYHGVSKFNVETGEQLKSGSNVPAYTKVFANTLVKHAQKDSKIVGITAAMPGGTGMDIFGKEFPKRMFDVGIAEQHAVTFAAGLATEGYKPYAAIYSTFLQRAYDQVVHDVAIQSLPVRFAIDRAGLVGADGSTHAGSFDITYLSTLPNFIVMAASDEAELVKMINTSIDINNKPCAIRYPRGTGIGVELPSIDEKIEIGKGRIIQEGKQVCILSLGTRLEECKLAAEELKNKGILTTIIDARFAKPLDEEL

SEQ ID NO: 111713 - protein, 277 aa, Unknown
  Bacterial polypetide isolated from the Sargasso Sea
TLRKGGGLSGFTKRAESEYDPFGAAHSSTSISSTLGMATAKKLSNDNNNVVAVIGDGAMSAGMAYEAMNNAGAMKSKLIVVLNDNDMSIARPVGAMSKYLARLLSGKIYFSFRETIKLILSAFSKRFSKTAGKAEDVLRGIVTGGTLFNQLGFYYIGPIDGHDVNNLVTILENVKNSKHQGPILIHAITKKGKGYKPAEESGDKYHGVSKFNILTGEQSKGKSKTPSYTKVFANTLIKHAENDTKIVAITGAMPSGTGLDLFEKKFPDRMFNVGIAE

SEQ ID NO: 111714 - protein, 198 aa, Unknown
  Bacterial polypetide isolated from the Sargasso Sea
MRIFKQIPTEKPNTPLLDGINSPSDLKTFSIKELETLSDELREFLLYSVGKSGGHLGGGLGVIELTIIIHHLFDTPYDNLIWDVGHQAYPHKILTGRKNHIETIRKKDGLAPFPSRDESEYDAFGVGHSSTSISALLGMAIGSKESNPNKKHIAVIGDGAMTAGMAFEALSNAGHLKANILIILNDNDMSISENIGGL

SEQ ID NO: 111715 - protein, 226 aa, Unknown
  Bacterial polypetide isolated from the Sargasso Sea
MRLSQLSHPNELHGLAISELEDVACQIRERHLQVVSTSGGHLGPGLGVVELTIALYQTLDLDLDKVIWDVGHQAYPHKLLTGRYNQFDSLRQQKGVAGYLKRTESKFDHFGAGHASTSISAALGMAIARDRKGEDYKCVAVIGDGALTGGMALEAINHAGHLPKTPLLVVLNDNDMSISPPVGALSTYLNRMRHSPPVQFISDSVQESVKNLPFMGDAIQEEFKSL

SEQ ID NO: 111716 - protein, 288 aa, Unknown
  Bacterial polypetide isolated from the Sargasso Sea
VFAKTLIKHAEKDSKIIGITAAMPSGTGMDLFSEKFPNRMFDVGIAEQHAVTFAAGLATEGYKPYAAIYSTFLQRAYDQVVHDVAIQNLPVRFAIDRAGLVGADGPTHAGSFDITYLTTLPNFVVMAPSDEAELIRMINTSVDINNRPSALRYPRGNGVGVELPNIDEKIEIGKGRIILEGKKVAIINFGARLNECLLANEILNKKGIGISIVDARFAKPLDENLIWEISTNHDVLITIEEGSLGGFGSHVSQFLAEKNLLDNNLKFRSMILPDKFIDHNKPEIMYKE

SEQ ID NO: 111717 - protein, 293 aa, Unknown
  Bacterial polypetide isolated from the Sargasso Sea
LHYVFNTPRDRLIWDVGHQSYPHKILTGRKHKIETLRQKNGLYGFVKRSESEYDPFGTAHSSTSISAGMGMKVAKDLNNDDAKIICVIGDGALSAGMAYEALNNVGASNKQIIVILNDNEMSIDRPVGAMSNYLTKLLSSKQYTNVRTLLKKISSKLSNSVSKTLYKAEEFSKSLVTGGTLFEELGFYYLGPIDGHDIKTLVPVLENIKNLSIEKPIFLHCVTKKGKGYEPAEKSDDKFHGVNKFDLKTGQSLSLSNKKSYSSVFGETLSNAALKDEKIVAITAAMMSGTGLD

SEQ ID NO: 111718 - protein, 89 aa, Unknown
  Bacterial polypetide isolated from the Sargasso Sea
MSNKFLDKINFPSDLKELSLGNLEDLAKELRNKTIDTVSKTGGHLGAGLGVVELTIALHYVFNTPRDRLIWDVGHQSYPHKILTGRKNK

SEQ ID NO: 111719 - protein, 314 aa, Unknown
  Bacterial polypetide isolated from the Sargasso Sea
DKIKKSDLSSSTTSKPKSPSYSKIFGDWLIHKANKDKNIVAITPAMGEGSGMNEFSKAFPERYYDVAIAEQHSVSFAAGLACEGLKPVVAIYSTFLQRAYDQLIHDVALQNLDVLFAIDRAGLVGLDGATHQGAFDLSYLRCIPNITIMAPSDEDLAWKMLNTGYELSGPAAVRYPRGSGRGIAYQKSEETIEIGKSKTILESESAEVVILSFGSLLDSAIEAGKEMKARVVDMRFVKPIDNNLINEISDKFKLVVTLEDNVIAGGAGSAVNEKLLELNSSSKVLNLGLPDGFIEHGDQEQQKIMNNLDGTGVR

SEQ ID NO: 111720 - protein, 312 aa, Unknown
  Bacterial polypetide isolated from the Sargasso Sea
MFLIPPNDKLIWDVGHQSYPHKILTGRKDKIRTLRQGDGLSGFTKRSESEYDPFGAAHSSTSISSALGIAEANKLENKSSNVIAVIGDGAISAGMAYEAMNNAGASKTKIIVILNDNDMSIAKPVGAMRTYLAKLFTGKIYFSLRETLKLITSAFSKRFSAKAGKAEDFFRSAVTGGTLFSSLGFYYAGPIDGHDLSSLVPILKNAKESRHEGPIMIHIKTQKGKGYSYAEKANDHYHGVSKFNVDTGEQLKSKSNLPAYTKVFANTLVKHAKKDSKIVGITAAMPGGTGMDIFGNEFPNRMFDVGIAEQHA

SEQ ID NO: 111721 - protein, 307 aa, Unknown
  Bacterial polypetide isolated from the Sargasso Sea
EYDPFGAAHSSTSISSTLGMAVAKKLSKNSNHVVAVIGDGAMSAGMAYEAMNNAGAMKSKLIVILNDNDMSIARPVGAMSSYLARLLSGKTYFSFRETLKLITSAFSKRFKDKAGKAEEFIRDIVSGGTLFNELGFYYVGPIDGHDLNILLPVLKNVKNSKYNGPILIHAVTKKGKGYKPAEDSRDKYHGVSKFNVVTGEQSKSKTNLPTYTKVFADTLVKHAENDTKIVGITGAMPSGTGMDIFGKKFPDRMFDVGIAEQHAVTFAAGLATEGYKPFAAIYSTFLQRAYDQVVHDVAIQNLPVRFA

SEQ ID NO: 111722 - protein, 283 aa, Unknown
  Bacterial polypetide isolated from the Sargasso Sea
HLGPGLGVVELTLALYQTLDLDIDKVVWDVGHQAYPHKLITGRFNEFDSLRQQKGIAGYLKRTESIFDHFGAGHASTSISAALGMAIARDRKGEDHKCVAVIGDGALTGGMALEAINHAGHLPNTPLVVVLNDNDMSISPPVGALSTYLNKVRLSPPLQFLSDSVQESVKNIPLIGKDIPEELKNIKGSVRRLAVPKVGAVFEELGFTYMGPIDGHDISNLINTFNAAHRLKKPVMVHVVTTKGKGYPYAEADQVGYHAQSSFDLTTGKSIPSSKPKPVSYSK

SEQ ID NO: 111723 - protein, 309 aa, Unknown
  Bacterial polypetide isolated from the Sargasso Sea
PNVGAMSKYLTRITTNPLYNKIRNEIWNITDSLPWGKKLSKKILQKIDESLKALLVPGVLFDELGFRYFGPIDGHDVNELVKTLNNIKNINQPVLLHIITKKGKGLVSTSEKNGEYHRDAVKYHAVKPSQNNGKLKKSSETKIPSFQDVFGYLSCEVARNRKDTICITAAMREGTGLVPYAKEFPNRYYDVGIAEGHGVTFSAGFATEGLRPIVAIYSTFLQRAFDHIVHDVAIQHLPVIFCMDRSGIAGEDGPTHHGSLDIPYLRCIQDMIVSAPRNGNEFRHLLYSALNQKESPFSIRYPKSSAVEF

SEQ ID NO: 111724 - protein, 203 aa, Unknown
  Bacterial polypetide isolated from the Sargasso Sea
MQLKILPKIKSPADIRELSDSELLQLSDEVRSFTIETITEIGGHLAPTLGVIELTVALHKVFDTPKDKIIWDVGHQGYAHKILTGRLNKFNTIRRMGGLSGFLKRSESEYDVFGAGHASTSISAAVGVAEAQKHNGDNFRVVSVIGDGSMTGGLAFEAMNNAGHLKSPMIVILNDNEMSISPNVGALNTYLTKIVTNPIYNQI

SEQ ID NO: 111725 - protein, 287 aa, Unknown
  Bacterial polypetide isolated from the Sargasso Sea
MTKNYKFLDDINFPSDLRKISEKDLQQVSDEVRKEMISAVSETGGHLGAGLGVVELTVALHYVFDTPNDKLIWDVGHQSYPHKIITGRKKKIRTLRQGDGLSGFTKRSESEYDPFGAAHSSTSISSALGIAEANKLANKTSNVIAVIGDGAISAGMAYEAMNNAGASKTKMIVILNDNDMSIAKPVGAMRTYLAKLFTGKIYFSLRETLKLITSAFSKRFSAKAGKAEDFLRSAVTGGTLFSSLGFYYAGPIDGHDLNDLIPILKNARDSNHEGPIMIHIKTQKGKG

SEQ ID NO: 111726 - protein, 280 aa, Unknown
  Bacterial polypetide isolated from the Sargasso Sea
KILQNLKDGPNHGPVLLHVVTEKGKGHPFSKVSEEKYHAVSKFSIVTGDTLKSATNTQTYTSVFSKTLCDLAEMDKKIVAITAAMPSGTGLSNFKDKFANRFFDVGIAEQHAVTFAAGMATEGLKPFVAIYSTFLQRAYDQVIHDVVIQKLPVKFMMDRAGLVGADGATHSGSFDLAYLLCLPNIVVMAPSNENELALMVYTASKYNEGPIFCRYPRGEAAGVQIQDKLVSLEIGKGKIIKKGKKIAILSLGSRLTDVIEVHDSLKKDGYDITIADARFA

SEQ ID NO: 111727 - protein, 305 aa, Unknown
  Bacterial polypetide isolated from the Sargasso Sea
LITGRFSQFDSLRQQNGVAGYLKRSESKFDHFGAGHASTSISAALGMAIARDRKGENYKCVAVIGDGALTGGMALEAINHAGHLPNTPLVVVLNDNDMSISPPVGALSSYLNKVRVSPPLQFLSDSVQESVKNIPLIGKDLPEELKNIKGSVRRLAVPKVGAVFEELGFTYMGPIDGHDIGNLVNTFNAAHKLKKPVLVHVVTTKGKGYPYAEADQVGYHAQSAFDLTTGKSIPSKKPKPVSYSKIFGQTLLKICEQDSKVVGITAAMATGTGLDILQRNIPDQYIDVGIAEQHAVTLAAGMSCD

SEQ ID NO: 111728 - protein, 289 aa, Unknown
  Bacterial polypetide isolated from the Sargasso Sea
RNWNGYFGEKFPSRMFDVGIAEQHAVTFAAGLATEGYKPYAAIYSTFLQRAYDQVVHDVAIQSLPVRFAIDRAGLVGADGPTHAGSFDITYLATLPNFVVMAASDEAELVRMINTSVDINDRPCAFRYPRGNGIGINLPSTDEKIEIGKGRIINEGKKIVLLNFGARLKECLIARENLIKKGLNITLVDARFVKPLDENLIWQLATDHEAMITIEEGSIGGFGSHVSQFLSDKNLLDSNFKFRSMILPDRFIDQDNLDLMYKYAGLDADSIENKILDILNSKIIIKKTN

SEQ ID NO: 111729 - protein, 266 aa, Unknown
  Bacterial polypetide isolated from the Sargasso Sea
ALHYIFNTPNDKLIWDVGHQCYPHKILTGRKDRIRTLRQGGGLSGFTKRLESEYDPFGAAHSSTSISSALGIAEANKLSNKSDNVIAVIGDGAISAGMAYEAMNNAGASKTKMIVILNDNDMSIARPVGAMSTYLAKIFSGKIYFSFRETIKLITSAFSKRFSAKAGKAEDLLRSAVTGGTLFSSLGFYYIGPIDGHDLNSLIPILKNARDSKYEGPILIHIKTKKGKGYTFAEEAKDNYHGVSKFNIKTGEQLKSASKSPSYTKV

SEQ ID NO: 111730 - protein, 309 aa, Unknown
  Bacterial polypetide isolated from the Sargasso Sea
VILNDNDMSIAKPVGALRTYLAKILSGKIYFSLRETIKLIISSFSKRFSKKAGKAEDFFRSAVTGGTLFNSLGFYYVGPIDGHDIDVLTSVLENAKKMKYDGPILIHIKTEKGKGYKFAEKSLDKYHGVSKFNILTGKQEKAKSIAPSYTKVFANTLIKHAQNDSKIIGITAAMPSGTGMDLFAEKFPDRMYDVGIAEQHAVTFSGGLATQGYKPFAAIYSTFLQRAYDQVVHDIAIQSLPVRFAIDRAGLVGADGPTHAGSFDITYLSTLPNFVVMAASDESELVKMINTSVQINDRPSAFRYPRGNG

SEQ ID NO: 111731 - protein, 277 aa, Unknown
  Bacterial polypetide isolated from the Sargasso Sea
MATGTGLDILQKNIPDQYIDVGIAEQHAVTLAAGMSCDGLKPVVAIYSTFLQRAFDQLIHDVGIQNLPVSFVLDRAGIVGADGPTHQGQYDISYMRSIPNFVLMAPKDESELQRMLITSINHNGPTALRIPRGSGLGVAVMDEGWEPLNIGEAEILEEGEDILIIAYGSMVASAIETAKILKNMSINVCIVNARFVKPLDKNLIMPLAKKIQKVVTMEEGTLIGGFGSAIVELFNDNEIKIPVYRIGIPDVLVDHASPDQSKEKLGLLPDQMADKIC

SEQ ID NO: 111732 - protein, 249 aa, Unknown
  Bacterial polypetide isolated from the Sargasso Sea
MARLIKKINFPSDLRKFKKDDLKQISEELREELIDVVSETGGHLGAGLGVVELTIALHYVFDTPKDKLVWDVSHQCYPHKIITGRRDRIKTLRKGGGLSGFTKRTESEYDPFGAAHSSTSISSTLGMAVAKKLSNNKNNVIAVIGDGAMSAGMAYEAMNNAGALKSNLIVVLNDNDMSIARPVGAMSKYLANILSGKLYFNFRETIKMIISAFSKRFTQKAGKAEDLLRNIVTGGTLFSELGFYYVGPN

SEQ ID NO: 111733 - protein, 187 aa, Unknown
  Bacterial polypetide isolated from the Sargasso Sea
MTYELLNTIDDPADLRRLDRRQLGPLADELRAFVLDSVSQTGGHLSSNLGTVELTIALHYVFNTPEDRIVWDVGHQSYPHKILTGRRDQMGSLRQLDGISGFPRRSESPYDTFGTAHSSTSISAALGMALGAKTNGEDRVAIAVIGDGAMSAGMAFEAMNNAGVYKDLPLVVVLNDNDMSISPPVGA

SEQ ID NO: 111734 - protein, 280 aa, Unknown
  Bacterial polypetide isolated from the Sargasso Sea
TGKIYFSLRETLKLITSAFSKRFSAKAGKAEDFFRSAVTGGTLFSSLGFYYAGPIDGHDLSSLVPILKNAKESRHEGPIMIHIKTQKGKGYSYAEKANDHYHGVSKFNVDTGEQVKSKSNLPAYTKVFANTLVKHAKKDSKIVGITAAMPGGTGMDIFGKEFPNRMFDVGIAEQHAVTFAAGIATEGYKPYAAIYSTFLQRAYDQVVHDVAIQSLPVRFAIDRAGLVGADGSTHAGSFDITYLSTLPNFIVMAASDEAELVKMINTSVDINDRPSAIRYP

SEQ ID NO: 111735 - protein, 283 aa, Unknown
  Bacterial polypetide isolated from the Sargasso Sea
LGFYYVGPIDGHDIDTLVSVLKNAKDTNFDGPIMIHIKTEKGKGYQFAENSKDKYHGVSKFNIKTGVQEKSSSKIPSYTSVFANTLIKHAERDSKIIGITAAMPSGTGMDLFAKKFPNRMFDVGIAEQHAVTFSAGLATEGFKPYAAIYSTFLQRAYDQVVHDVAIQSLPVRFAIDRAGLVGADGPTHAGSFDITYLSTLPNFVVMAPSDESELVKMINTSVDINDKPSAFRYPRGTGIGIKLPEIHEKIEIGKGRVIKEGKEIALINFGARLQECQKTLNNL

SEQ ID NO: 111736 - protein, 266 aa, Unknown
  Bacterial polypetide isolated from the Sargasso Sea
SIDPNVGALSKLLTRIASSRLYNIFREESLEIAERAPFSETLGLKRTLQMMHDSMKAFFKPPGMLFEQLGWRYMGPVNGHSLKDLIELIGQVRALEGPIVIHALTQKGKGYSFAEEDAFKYHGVSPFVPEDGSFLKKSKSSDNSVSYSKVFSEKLGELMEKDSKVVGVSAAMLSGTGLIGLQKKYPERIFDVGIAEGHAVTCSAGMATEGLKPYVAIYSTFLQRALDHIIHDVAIQKLPVRFMLDRAGLVGADGPTHQGVYDLTYL

SEQ ID NO: 111737 - protein, 270 aa, Unknown
  Bacterial polypetide isolated from the Sargasso Sea
NSVNDGPVLLHVVTEKGKGHPFSKDATEKYHAVPKFDIITGEHKKSASKKTYTQIFSEELIKQAKEDEKIVAVTAAMPSGTGLDKFSLEFPNRFFDVGIAEQHAVTFCAGMSLEGYKPFCAIYSTFLQRAYDQIVHDVAIQNLPVKFAIDRAGFVGADGATHQGSFDLSYLSCLPNFVIMAPSNEQELINMVKTSANYNDGPIAIRYPRGEIEGIEKLNTAKILKIGKGKIVLDGFCKDKKADLAFLSIGTRLSDTIKVAKNLKNKGYSV

SEQ ID NO: 111738 - protein, 302 aa, Unknown
  Bacterial polypetide isolated from the Sargasso Sea
LGFYYVGPIDGYDLDNLVSVLKNAKKLNHEGPIMIHIKTEKGKGYEFAEKSDDKYHGVTKFNVETGIQEKNKSNIPSYTKVFAKTLIKHAEKDSKIIGITAAMPSGTGMDLFSEKFPNRMFDVGIAEQHAVTFAAGLATEGYKPYAAIYSTFLQRAYDQVVHDVAIQNLPVRFAIDRAGLVGADGPTHAGSFDITYLSTLPNFIVMAASDEAELVRMINTSVDINNNPSALRYPRGNGVGVDLPDIDEKIEIGKGRLILEGKKIAIINFGARLNECLLANEILNKKGIGITLVDARFAKPLD

SEQ ID NO: 111739 - protein, 291 aa, Unknown
  Bacterial polypetide isolated from the Sargasso Sea
QKVADELREELIDAVSVTGGHLGASLGVVELSVALHYIFNTPNDKLIWDVGHQCYPHKILTGRKDKIRTLRQGNGLSGFTKRSESEYDPFGAAHSSTSISSALGIAEANKLANKSDNVVAVIGDGAISAGMAYEAMNNAGASKTKMIVILNDNDMSIARPVGAMSTYLAKIFSGKIYFSLRETIKLITSAFSKRFSAKAGKAEDLLRSAVTGGTLFSSLGFYYIGPIDGHDLNSLLPILKNARDSKHDGPILIHIKTKKGKGYSFAEEAKDNYHGVSKFNIKTGEQLKGSS

SEQ ID NO: 111740 - protein, 286 aa, Unknown
  Bacterial polypetide isolated from the Sargasso Sea
MFSSLGFYYIGPIDGHNLNSLLPILKNARDSKYEGPILIHIKTKKGKGYSFAEEAKDNYHGVSKFNVKTGEQIKSSSKLPSYTKVFADTLIQHAKKDTKIVAITAAMPDGTGLDSFSKEFPERTFDVGIAEQHAVTFAAGLATENYKPYAAIYSTFLQRAYDQVVHDVAVQSLPVRFAIDRAGLVGADGPTHAGSFDTTYLSTLPNFVVMAASNEAELVRMINTSTEINDRPCAFRYPRGTGLGSILPSINEKIEIGKSKVVLEGKKLAILNFGARLNETLKASEI

SEQ ID NO: 111741 - protein, 107 aa, Unknown
  Bacterial polypetide isolated from the Sargasso Sea
MNNNYKFLNNINFPDDVRKLSQSDIKILADEVRQELIDVVSETGGHLGAGLGVVELTVVLHYIFDTPHDKLVWDVGHQTYPHKILTGRKKQIRTLRKGEGLSGFTKR

SEQ ID NO: 111742 - protein, 245 aa, Unknown
  Bacterial polypetide isolated from the Sargasso Sea
MQPPFSGKLPHLFTPITIRLMPTTFHEIPRERPLTPLLDSANTPDELRRLAEADLETLADELRQYLLYSVGQSGGHFGAGLGVIELTIALHYVFDTPDDRLVWDVGHQAYPHKILTGRRERMGSLRQKDGLAAFPRRVESEYDTFGVGHSSTSISAALGMAIAARLKGEKRKSVAVIGDGALTAGMAFEALNHATDVGANMLVILNDNDMSISKNVGGLSNYLAKIISSRTYASMREGSKKILSR

SEQ ID NO: 111743 - protein, 295 aa, Unknown
  Bacterial polypetide isolated from the Sargasso Sea
MRSVVTGGTLFSSMGFYYIGPIDGHDLDSMVSVFKNARDIQYNGPILIHLKTQKGKGYEFAEKSDDKYHGVSKFNINTGVQEKSISNAPSYTKVFANTLIKHAEKDSKVVGITAAMPSGTGMDIFGKKFPSRMFDVGIAEQHAVTFAAGLATEGFKPYAAIYSTFLQRAYDQVIHDVAIQSLPVRFAIDRAGLVGADGPTHAGSFDITYLSTLPNFVVMAASDEAELVRMINTSVDINDKPSAFRYPRGNGVGIELPNINEKVQIGKGRVVLEGKKVALLNFGARMKECLSACEI

SEQ ID NO: 111744 - protein, 84 aa, Unknown
  Bacterial polypetide isolated from the Sargasso Sea
MSEKLLDKINYPADLRKLKKNQLEQVSKELRSEVIDVVSETGGHLGAGLGVVELTVALHYVFNTPKDKLVWDVGHQCYPHKIIT

SEQ ID NO: 111745 - protein, 307 aa, Unknown
  Bacterial polypetide isolated from the Sargasso Sea
FGDASLSGGMSFEALNNIGKLNSNFIGILNDNNMSISKPVGNMAALLTNIRTNPLYDQARKILDQFVTSLPKSEPLKRRIDKSIESVKNIILDSKAGVIFEEFGFKYLGPIDGHNIPMMMAALKYAKTYPWPILIHVITQKGKGHDPAEKDPIKYHGVSPQSSTSSSLKKRSHSEVFGDTMIDICNKQNNVAVITPAMVGGSGLTKFSQEHPSKLFDVGIAEEHAVTFAAGMSRAGTMPVLAIYSTFLQRGYDQLIHDVCLQKLPMVLALDRAGFAGEDGATHHGVFDYTYMLPIPNITILAPKDAQ

SEQ ID NO: 111746 - protein, 225 aa, Unknown
  Bacterial polypetide isolated from the Sargasso Sea
MDYELLDKINFPSDLREFKKKDLKQISEELRAKTIETVSKTGGHLGAGLGVVELTVALHYVFNTPHDKLIWDVGHQAYPHKIITGRKKNIDTLRKKDGVYGFVRRSESEYDPFGTAHSSTAVSAGLGIKAAKDINKDNSKVICVVGDGALSAGLAYEGLNNAGAQKKGLIVILNDNKMSIDKPVGAMSTYLTRLLSSKSYSSLRNIIKKISKTLPSNLSKTLYRT

SEQ ID NO: 111747 - protein, 251 aa, Unknown
  Bacterial polypetide isolated from the Sargasso Sea
TAHSSTAVSAGLGIKAAKDINKDNSKVICVVGDGALSAGLAYEGLNNAGAQKKGLIVILNDNKMSIDKPVGAMSTYLTRLLSSKSYSSLRNIIKKISKTLPSNLSKTLYRTEEYSKGLISGGTLFEELGFYYLGPIDGHNIDDMVSVLENIRDNKFDKPVFLHCITKKGKGYSPAEKSEDKFHGVEKFDINTGNSVKKTNLKSYSNVFGEKLTKLAENDEKIVAITAAMMSGTGLKLFQQNFEKRFFDVGI

SEQ ID NO: 111748 - protein, 84 aa, Unknown
  Bacterial polypetide isolated from the Sargasso Sea
MKQNYKFLNNINFPSDIRKLSENDLQKVSDEVRKEMISAVSETGGHLGAGLGVVELTVALHYVFDTPNDKLIWDVGHQSYPHKI

SEQ ID NO: 111749 - protein, 254 aa, Unknown
  Bacterial polypetide isolated from the Sargasso Sea
DNGRSYAPTISRLSESLIRIRSNPTYMRRQHRLEKLAEGMPWVGEILERGINATKAAIREMFEPPAFFEALGMTYLGPFDGHDIDEIEHALSNAVEFEGPVVVHVLTQKGRGHAPAEQDSIKHMHDTSGMKSGSYTEAFSEALVKAGESNPKVVAITAAMPDSTGLLSFRERFPERFFDVGIAEQHAVTSAAGMAMGGLRPVVAVYSTFLTRAIDQINLDVGLHELPVIFCIDRAGVTGDDGASHHGLLDISLL

SEQ ID NO: 111750 - protein, 218 aa, Unknown
  Bacterial polypetide isolated from the Sargasso Sea
MMSGTGLDIFNSQHPDRLFDVGIAEQHAVTMAAGLATEGFKPYVSIYSTFLQRAYDQIVHDVALQKLPVRFAIDRAGLVGADGPTHAGSYDITFLSTLPNFIIMAPSTQNELIRMINTTVLINDRPSAFRYPRATGEIDLGDNNFDPIEIGKGIILSEGSDLAILNLGSRLQSCQEAITLLNTYNIYPTLADARFAKPIDANLLDQLLDNHKYLITIE

SEQ ID NO: 111751 - protein, 311 aa, Unknown
  Bacterial polypetide isolated from the Sargasso Sea
LESALSDASSYEDGPIVVHVLTDKGRGYAPAEDDEEKHLHDIGLFDPATGNSSSASSKNFTSEFSNSLLTIAERRPDVVAITAAMPGSTGLLPFQQRYPDRFFDTGIAEQHALTSAAGMARAGLRPFVAIYSTFLARGFDQVMYDIGLHGLPVVICIDRAGVTGPDGASHHGVHDIAMYARVPGMTIFSPSSLQELPVMMNQALETNGPVAIRWPRGTADESSVVGQGLSARLVRDGQDVAILAAGKMLKAATSAAELLAEEGVDAAVWDPRLLKPLDQEMIRAVIGQSLVVTVEDGSRMGGFGSLVADAL

SEQ ID NO: 111752 - protein, 290 aa, Unknown
  Bacterial polypetide isolated from the Sargasso Sea
MATAKKLSNDKNNVVAVIGDGAMSAGMAYEAMNNAGAMKSKLIVILNDNDMSIAPPVGAMSKYLARLLSGKIYFSFRETVKLILSAFSRRFSKSAGKAEDLLRSAVTGGTLFSQLGFYYIGPIDGHDVNNMVTILENAKNSNHQGPILIHAITKKGKGYKPAEESGDKYHGVSKFDVSTGKQSKGKSAGPSYTKVFANTLIKHAQNDTKIVAITGAMPSGTGLDLFQKKFPDRMFDVGIAEQHGVTFAAGLATEGYKPFAAIYSTFLQRAYDQVVHDVAIQSLPVRFAID

SEQ ID NO: 111753 - protein, 204 aa, Unknown
  Bacterial polypetide isolated from the Sargasso Sea
DVALQSLPVRFAIDRAGLVGADGPTHAGSFDITYLSTLPNFVVMAASDESELVKMINTSVNINDRPSAFRYPRGNGIGVELPSIKETLEIGKGRIIKEGKKVALINFGTRLEECKKASEKLLNKGIDCTIIDARFAKPLDEKLIIEVASNHEVLITIEEGSIGGFGSHVMQFLSDRGVFDRGLKFRSMILPDIFIDQDTPEKMY

SEQ ID NO: 111754 - protein, 203 aa, Unknown
  Bacterial polypetide isolated from the Sargasso Sea
MSGTGLKLFQQNFEKRFFDVGIAEQHAVTMAAGLATEGFKPFVAIYSTFLQRAYDQIVHDVAIQKLPVRFAIDRAGLVGSDGPTHAGSFDITYLATLPNFIVMAPSNQRELSNMIELSCEINDTPSAFRFPRGTGSDELFNNQPTDISIGKGYILIEGNDVAILNLGTRLEKCIEASKFLNQNNIYPTIADARFAKPLDTQLI

SEQ ID NO: 111755 - protein, 251 aa, Unknown
  Bacterial polypetide isolated from the Sargasso Sea
TGMDIFGKEFPKRMFDVGIAEQHAVTFSAGLATEGYKPYAAIYSTFLQRAYDQVVHDVAIQSLPVRFAIDRAGLVGADGSTHAGSFDITYLSTLPNFIVMAASDERELVKMINTSVDINDRPCAIRYPRGTGAGLELPSIDEKVEIGKGRIIQEGKKVCIISLGTRLNECKIAAEELKSKGITISIIDARFAKPLDKELIIRCARNHEVMITIEEGSIGGFGSHVKNLLAENGVFDKGLKFRSMTLPRYFY

SEQ ID NO: 111756 - protein, 151 aa, Unknown
  Bacterial polypetide isolated from the Sargasso Sea
MKKQYKYLNEINFPSDIKKLKISELKILAEEVRQEMIDAVSVTGGHLGAGLGVVELTIALHYVFDAPKDKIIWDVGHQTYPHKILTGRKDKIKTLRQGMGLSGFTKRSESEYDPFGAAHSSTSISAALGIATANKLEKKTNQVVSIIGEEQ

SEQ ID NO: 111757 - protein, 325 aa, Unknown
  Bacterial polypetide isolated from the Sargasso Sea
SALGIAVANRLSNKSDNVVAVIGDGAISAGMAYEAMNNAGASKTKMIVILNDNDMSIARPVGAMGTYLAKIFSGKIYFSLRETIKLITSAFSKRFSAKAGKAEDLLRSAVTGGTLFSSLGFYYIGPIDGHDLSSLIPILRNARDSKHQGPILIHIKTKKGKGYAFAEEAKDNYHGVSKFNVKTGEQVKSTSKLPSYTKVFANTLIEHAKKDSKIVAITAAMPDGTGLDIFRKEFPERTFDVGIAEQHAVTFAAGLATENYKPYAAIYSTFLQRAYDQVVHDVAIQSLPVRFAIDRAGLVGADGPTHAGSFDTTYLSTLPNFCGNG

SEQ ID NO: 111758 - protein, 256 aa, Unknown
  Bacterial polypetide isolated from the Sargasso Sea
KFNVITGEQKKTKSNKPAYTKVFAETLIKHAENDTKIVGITGAMPSGTGLNLFEKKFPDRMFDVGIAEQHAVTFAAGLATEGYKPFAAIYSTFLQRAYDQVVHDVAIQSLPVRFAIDRAGLVGADGPTHAGSFDITYLSTLPNFVVMAASDEAELVRMVNTSVNINNKPSAFRYPRGNGVGIELPSINETLEIGKGRIIKSGKKAAIINFGARLEECRKASEILLKKGINITIVDARFAKPLDEKLIVKISTNHEV

SEQ ID NO: 111759 - protein, 127 aa, Unknown
  Bacterial polypetide isolated from the Sargasso Sea
MLLSELSHPNQLHGLTVSQLEEIACQIRERHLQVVSTSGGHLGPGLGVVELTLALYQTLDLDFDKVVWDVGHQGYPHKLITGRFSQFDSLRQQNGVAGYLKRSESKFDHFGAGHASTSISAALGMAI

SEQ ID NO: 111760 - protein, 291 aa, Unknown
  Bacterial polypetide isolated from the Sargasso Sea
PADNALPKSKPSAPTYSAIFGQWLCDMAKSDPKLMAVTPAMREGSGMVEFSQRFPEQYFDVAIAEQHAVTFAAGLAKDGLNAVVAIYSSFLQRAYDQLIHDVAIQNLPVLFAIDRAGIVGADGPTHQGAFDIAFLRCIPNLVIMAPSDENECRQMLYTGHMLKQPAAVRYPRGAGMGITPNEEMTAIDIGKSRVCRQSIKDSEKRIAILNFGCLLPYALEAAEILDATVIDMRFVKPLDGEAVLSAANEHAALITLEDGCIMGGAGSAVLEHLQQNGVLKPVKVLGLPDSF

SEQ ID NO: 111761 - protein, 271 aa, Unknown
  Bacterial polypetide isolated from the Sargasso Sea
VFDAPKDKIIWDVSHQAYPHKILTGRRDRIRTLRQKNGLSGFTKRSESEYDPFGAAHSSTSISAALGFAVAHDLGGNCISGLGDAIAVIGDGAMSAGMAYEAMNHAGHLGKRLIVILNDNEMSIAAPVGALSSYLSQLYAGAPFQDLKAAAKGAISFLPEPFRDGAKRAKDLLKGMAVGGTMFEALGFSYIGPIDGHDLDQLLPVLRTVKERASGPILIHAVTKKGRGFAPAENADDKGHATAQFDLVTGKQDKGKSNVISYTSAFSNALL

SEQ ID NO: 111762 - protein, 430 aa, Unknown
  Bacterial polypetide isolated from the Sargasso Sea
QFLNDINFPSDLRKVSEDSLQKVADEVREEMISAVSETGGHLGAGLGVVELTVALHYVFDTPNDKLIWDVGHQSYPHKILTGRKDKIRTLRQGDGLSGFTKRSESEYDPFGAAHSSTSISSALGIAEANKLENKSSNVIAVIGDGAISAGMAYEAMNNAGASKTKMIVILNDNDMSIAKPVGAMRTYLAKLFTGKIYFSLRETLKLITSAFSKRFSAKAGKAEDFFRSAVTGGTLFSSLGFYYAGPIDGHDLSSLVPILKNAKESRHEGPIMIHIKTQKGKGYSYAEKANDHYHGVSKFNVETGEQLKSKSNLPAYTKVFANTLVKHAKKDSKIVGITAAMPGGTGMDIFGKEFPNRMFDVGIAEQHAVTFAAGLATEGYKPYAAIYSTFLQRAYDQVVHDVAIQSLPVRFAIDRAGLVGADGINTCWFI

SEQ ID NO: 111763 - protein, 416 aa, Unknown
  Bacterial polypetide isolated from the Sargasso Sea
MNYKFLDKVNYPSDLRTLSINDLDKVSEELRYYLIETVSQCGGHFGASLGSVELTIALHYSYNTPYDKIVWDVGHQCYGHKVITGRKNELVTIRQKDGLHPFPSRKENEYDTFSVGHSSTSISAALGMSLAGKNSNKNFYTVAVIGDGGLSAGMAYEALNHMGSSDQDILVILNDNEMSISPNVGAMNNYLTKILSSKIYSTVKEGSKSILKQVPPFDKVANKTEGHIKGLFAPGMLFEEMGINYYGPIDGHDTKFLVKTLKNLKKIKGPKLLHVVTKKGKGYLPAESDPVKYHAVPKFNKDEGVLKGNNKKYIYSDVFDDWLCKIAENDKRVFAITPAMREGSSLVNFSKSFPERYIDVGIAEQHAVTLAAGLACENQKPIVCIYSTFLQRAYDQLIHDIALQDLDVLFAVDRSG

SEQ ID NO: 111764 - protein, 205 aa, Unknown
  Bacterial polypetide isolated from the Sargasso Sea
MHLGDLKHPNELHGLSVAELEDVGRQIRERHLEVVSTSGGHLGPGLGVVELTLALYQTLDLDHDRVIWDVGHQAYPHKLITGRYNDFGTLRQQHGVAGYLKRSESRFDHFGAGHASTSISAALGMALARDNRGESFKCVAVIGDGAMTGGMALEAINHAGHLPETPLLVVLNDNDMSISPPVGALSNALNRARLSPPMQFLSGSV

SEQ ID NO: 111765 - protein, 439 aa, Unknown
  Bacterial polypetide isolated from the Sargasso Sea
MKKYKFLDKVKFPSDIRKLKLSELETLCNEVREELIDAVSVTGGHLGAGLGVVELSVALHYVFDTPNDKLIWDVGHQSYPHKILTGRKEKIRTLRQGNGLSGFTKRSESEYDPFGAAHSSTSISAALGIATANKLSKKNDNVVAVIGDGAISAGMAYEAMNNAGTSKTKMIVILNDNDMSIAKPVGAMRTYLAKLFTGKMYFSFRETVKLIISSFSKRFSKKAGQAEDFFRSAVTGGTLFNSLGFYYVGPIDGHDIETLVSVLKNAKNSNFNGPIMIHIKTEKGKGYQFAEKSNDKFHGVSKFNVKTGVQQKSKATVPSYTKVFADTLIKHAERDSKIIGVTAAMPSGTGMDLFGKKFPDRMYDVGIAEQHAVTFSGGLATEGYKPYAAIYSTFLQRAYDQVVHDIAIQNLPVRFAIDRAGLVGADGPTHAGSFDITFL

SEQ ID NO: 111766 - protein, 258 aa, Unknown
  Bacterial polypetide isolated from the Sargasso Sea
MKIAKSLLDKVKFPKDLKKFDDQQLKTLCKELRDEVIEAVSVTGGHLGAGLGVVELTVAIHNVFNTPNDKLIWDVGHQCYPHKVITGRREKIRTIRQPGGLYGFTKRSESEYDPFGAAHSSTSISAGLGMAVARDLKKEDHQVICVIGDGAISAGMAYEAMNNAGSMNAKLIVILNDNDMSIAPPVGAMSAYLSRLLSGKTFQSARSLAKHMAKKFPKSFQNMAAKAEEYMRGMVTGGTLFEELGFFYIGPIDGHNQD

SEQ ID NO: 111767 - protein, 290 aa, Unknown
  Bacterial polypetide isolated from the Sargasso Sea
VAITAAMPDGTGLDIFKKEFPQRTFDVGIAEQHAVTFAAGLATENYKPYAAIYSTFLQRAYDQVVHDVAIQSLPVRFAIDRAGLVGADGPTHAGSFDTTYLSTLPNFVVMAASDEAELVRMINTSTEINDRPCAFRYPRGIGVGVTLPSIDEKVEIGKSKIIKEGKKLAVLNFGARLIETLKAAENLKKKGVDITIVDARFAKPLDESLIWQLATTHEAIITIEEGSIGGFGSHVVNFLSKKGLIDNDLKFRSLTLPDIFIDQDTPENMYKIANLDSSSIEEKVLGCIKF

SEQ ID NO: 111768 - protein, 381 aa, Unknown
  Bacterial polypetide isolated from the Sargasso Sea
QILENVKKSKHEGPILIHAITQKGKGYKPAEESGDKYHGVSKFNISTGQQSKSKSNVPSYTKVFSETLIKHAEKDTKIIGITGAMPSGTGLNLFEKKFPDRMFDVGIAEQHAVTFAAGLATEGYKPYAAIYSTFLQRAYDQVVHDVALQSLPVRFAIDRAGLVGADGPTHAGSFDITYLSTLPNFVVMAASDESELVKMINTSVHINDRPSAFRYPRGNGIGIELPGIDEMLEIGKGKIVCEGKQAAILNFGARLDECKKAKDILDKKGIKISIMDARFAKPLDEKLILEMASNHELILTIEEGSIGGFGSHVMKLLSDRGVFDKGLKFRSMFLPDIFIDQDTPEKMYEKAGLNFNSIVEKIEEGLKSNIIFAKNKNKLSN

SEQ ID NO: 111769 - protein, 468 aa, Unknown
  Bacterial polypetide isolated from the Sargasso Sea
MNDNDMSIAPPVGAMSAYLSRLISSKSYRSIRHFAKEMASKFPKKLEETARRAEEYARGIITGGTLFEELGFYYVGPIDGHNIDHLLPVLKNIRDSKEKLPVLVHVVTEKGRGYKPAEDSPDKYHGVSKFDLVTGEQNKSNNKIPTYTNVFANSLISEAKKDKKIIGITAAMPSGTGLDKFNKEFPDRTFDVGIAEQHAVTFAAGLAAEGYKPFVAIYSTFLQRAYDQVVHDVAIQKLPVRFAIDRAGLVGADGPTHAGSFDLTFLGCLPNFIIMAPSDEAELMHMIATAAEIDDRPCSFRFPRGEGVGVTLPEFGSPLEIGRGRVLVEGSSIALLNLGGRLGEVLSAAEQLALMGWSATVADARFMKPLDEELIRQLVSNHRILITVEEGSVGGFGSRLSHFLTSSGLLDNDIVFRTMCLPDEFVEQDSPDEQYSYAGLMRENILDLALTLLDPKADSGVISRTKSA

SEQ ID NO: 111770 - protein, 351 aa, Unknown
  Bacterial polypetide isolated from the Sargasso Sea
MKKDYEYLNQINFPYDLKKIPESKLQNVADEVRKELIEAVSVTGGHLGASLGVVELTVALHYIFDTPKDKLIWDVGHQCYPHKILTGRKDRIRTLRQGSGLSGFTKRLESEYDPFGAAHSSTSISSALGIAEANKLSNKSDNVVAVIGDGAISAGMAYEAMNNAGASKTKMIVILNDNDMSIARPVGAMGTYLAKIFSGKIYFSLRETIKLITSAFSKRFSAKAGKAEDLLRSAVTGGTLFSSLGFYYIGPIDGHDLNSLLPILKNARDTKHNGPILIHIKTKKGKGYSYAEKAKDNYHGVSKFNVKTGEQLKSKVSIPSYTKVFANTLIQHAKKDSKKKQLLQQCLMVQE

SEQ ID NO: 111771 - protein, 290 aa, Unknown
  Bacterial polypetide isolated from the Sargasso Sea
LSKKDNKLIGITPAMKEGSGMVNFEQEHPDKFFDVAIAEQHAITFSAGLALEGHKPVVAIYSTFLQRAYDQLIHDVCIEKLDVTFALDRAGVVGEDGPTHSGNFDLAFMRCVPNIVIATPSDEDELWKLLNTLYEHKGPAAVRYPRGSGRGVKVNQNEDTVIIGSSRTIRDGSNLCILNFGVLLDRLEDIADKLDCGLLDMRFVKPLDTKALDKILNQYKKIVTVEDHTVSGGAGSAVNEYFSSRLNGVSVLNLGLSDEFPEHGSRSEILKLNSLDRESLSKKITDYFNS

SEQ ID NO: 111772 - protein, 353 aa, Unknown
  Bacterial polypetide isolated from the Sargasso Sea
TSISAALGMAIARDANEEDHKIIAVIGDGGITAGMSYEALCHAGYLKKDMLVILNDNEMSISPNVGAMNKYLTKILSGKTLSTIKQKGGELLSDKSPIKRIIKKIKDNAQNILSPGHLFEEIGFSYYGPIDGHDISSLNKVLNNLKNKSGPILLHVITKKGKGYKIAEQDPIKYHGVTPFDVKTGVSEKIKKPKMLTYTNIFSKWINYAAINNSNFVAITPAMREGSGLVEFEEKFPSRFFDVGIAEQHSVTLAAGIALGGLKAIVAIYSTFLQRAFDQLVHDVNLQNLDVMFAIDRAGLVGADGETHHGIYDISFMRILPNIILMTPSNERELLLMLNTGLSHKGPSAIRYP

SEQ ID NO: 111773 - protein, 419 aa, Unknown
  Bacterial polypetide isolated from the Sargasso Sea
MNKIEIKYLDKVKSPKDLDELNDEQLKDLASELRYDVIETVSKTGGHLGASLGVIELTIALHKIFDAPKDKIIWDVGHQSYPHKILTGRRDQMSTLRKKDGLSGFTKRDESKYDHFGAGHSSTATSAGLGMSIGRDLKKRDNHVVCVVGDGAMSAGQAYEALNNAGAEKSKLIVILNDNDMSIAPPAGAMSAYLAKLISGGTYLGLRNFAKQVIEKLPKSLEKGAKKAEEITRLIAGNGTLFEALGFYYVGPLDGHNLDHLLPVIRNVKNANNGPVIIHVVTQKGKGYKPAEDSDEKFHGVTKFNIATGEQEKSKKKNISFTNVYSNSLIELAKKDKDIVTITAAMPSGTGLDKFKEIYPKRFFDVGIAEQHAVTFSAGLAIEGLKPFTTIYSTFLQRAYDQIIQRYSHSESTCKICNR

SEQ ID NO: 111774 - protein, 421 aa, Unknown
  Bacterial polypetide isolated from the Sargasso Sea
SDIRDLDLKELESLASDIREYILDTISKTGGHLAAGLGTVELSIALHYVFNTPVDKIIWDIGHQCYPHKILTGRKNKLNSVRKYNGISGFLKIKESDYDVFGAGHSSTSISAALGMAIARDIQNKEHNIISIIGDGGMTAGMSYEAMCHAGYLKKDMLVVLNDNEMSISPNVGALNKYLTRLMSAIKEKGNNLLDERNPIKKIARAIKDNTQNILTPGHLFEEIGFSYHGPIDGHDLQSLNEVLKNLKHKRGPILLHVITKKGKGYKIAEKNPIKYHGITPFDVSTGAADKPKLKNSLTYTNIFTKWINYAAQYNENFVAITPAMREGSGLVEFEENYPKRFFDVGIAEQHSVTLAAGLAIGGIKPIVAIYSTFLQRAYDQLIHDVNLQDLNVMFAIDRAGLVGADGETHHGIYDISFMRV

SEQ ID NO: 111775 - protein, 370 aa, Unknown
  Bacterial polypetide isolated from the Sargasso Sea
HSSTSISAALGMAIAAERQGLERRCVAIIGDGGLTAGMAFEALNHAGAQRSNLLVILNDNNMSISPNVGALSNRFAQLLSGEFYSSVRKSSKKVLSNIPAALEIAKRAEEHAKGLIIPGTLFEELGFNYIGPVDGHDLSVLLSTLKNIKKLEGPQFLHVITKKGKGYAPAEDDPIKYHGVTPFDPRKGIVSSKTLSIPTYSKVFGDWACDMAELDQRFIAITPAMREGSGLVRFEKEHPDKYFDVAIAEQHSVTIAAGMACDGLKPVVAIYSTFLQRAYDQLIHDVAIQNLPVLFAIDRAGCVGADGPTHNGAYDLSFMRCLPNIVLMTPSDENECRQMLYTGFKLDQPTAVRYPRGTGSGVKVIRKMTS

SEQ ID NO: 111776 - protein, 377 aa, Unknown
  Bacterial polypetide isolated from the Sargasso Sea
MKSLLESVSLPQEIQNFNLRELTQLAQECRQRIIEVTSKCGGHLASSLGAVEITVALLKHFDFSIDRLVWDVGHQGYAYKVLTGRNENFDTLGKYGGIKKFLSRDESSYDHFGAGHASTSISAALGMAIGRDLQQKKHRVVSVIGDGALTGGLAFEALNHNGSLDKNMLVIFNDNGISIDPNVGAISKLLTRFASSQFYNRFREETIDFAEKAPFSERLGIKTTLQKMHDSAKSFFSPPSMLFEQLGWRYFGTIDGHNLQELLDIIKQVKNLDGPIVIHAVTQKGKGYAFAEEDAYKYHGVTPFEPLDGKFKKKKTSGQAMSYSQVFGDKLGELMERDESVVVLTAAMLSGTGIVNLQPKFPDRVLDVGIAGRHAVT

SEQ ID NO: 111777 - protein, 366 aa, Unknown
  Bacterial polypetide isolated from the Sargasso Sea
RRNDRNLENIKDYDSPVVLHAITKKGKGLDYAEDDPIKYHGVKEKKKDDAVVKVQAPIYQNVFGEVICDLAEENKNIVAITAAMREGTGLVEYSSRFPERFYDVGIAEGHAVTFSGGLSTEGKIPVVAIYSTFLQRAFDHIIHDIALQNLPVIFCMDRSGLVGEDGATHHGVLDISYLRCIQNIIISAPKDGNELRDLLYTATLNTTKPFTIRYPKEQSVKFEEKSPQKIEIGSWEVLTEGSDVIILAVGSMVSKSLEIHSMLMEKGISSEVVNCRFIKPMDENYLNESLPKYKLVVTIEEGVTDGGFGEGVINWSNKKNIENSILTLGVPNRFVDHGPRNILLEEIGLDSMTLFEKIYKFFKENQ

SEQ ID NO: 111778 - protein, 454 aa, Unknown
  Bacterial polypetide isolated from the Sargasso Sea
MQLKYLPKINEPKDFRNFSNQELVELCQELREYTIETITGIGGHLAPTLGVVELTVALHYVYNTPNDKLIWDVGHQGYAHKLLTGRFKDFSSIRQFKGLSGFLKRSESKYDSIGAGHASTSISAALGIAEARHQKKLDYRVAAIIGDGSMTGGLAFEGINNAGHLKRQLLVILNDNEMSISPNVGAISTYFTRLISNPLYNKVRNEFWNLTGKLPATETTRSLIKKVEESLKSLVVPGIFFDELGFRYFGPIDGHNVDLLVNTLQNIKDIKTPVLLHVLTKKGKGMVSVNQENGEYQSDAVKFHAVKPSSNPSLNTPNKNSNTKSNAPIFQDAFGSLVCEIANNRDDTVCITAAMREGTGLVNYSKQFPERYYDVGIAEGHAVTFCSGLATEGIKPIAAIYSTFLQRAYDHIIHDCAIQNLSVLFCMDRAGIAGEDGPTHHGALDIAYMRSIQN

SEQ ID NO: 111779 - protein, 219 aa, Unknown
  Bacterial polypetide isolated from the Sargasso Sea
MKIFKEIPTQKPITPLLDSVNLPSDIRSFSLVELQNLANEIREFLLYSVGQSGGHLGGGLGVIELTIILHYIFNTPFDNLVWDVGHQAYPHKILTGRKNKMQTIRKKGGLAPFPSRKESEFDAFGVGHSSTSISAMLGMAIASKESNPEKKHIAVIGDGAMTAGMAFEALSHTGHLKPNVLIILNDNDMSISENIGGLSNYFSRIWASKTYKGIKKSGS

SEQ ID NO: 111780 - protein, 187 aa, Unknown
  Bacterial polypetide isolated from the Sargasso Sea
NYDIAYLRCIPNMIICTPSNENEVRHLLTTAYLYKGPATVRYPRGIGPNAQVEQELKPYEIGKAKVINEENNKVIILNFGALLDQAKEVAKNLKLTLIDMRFVKPLDEDILRKYLSKSDVFISIEDGSIMGGAGSAVQEFCSKENINIKSILFGIPDKFIEHASREEMLNEAGLSSESIESKLKELL

SEQ ID NO: 111781 - protein, 391 aa, Unknown
  Bacterial polypetide isolated from the Sargasso Sea
YAGPIDGHDLSSLVPILKNAKESRHEGPIMIHIKTQKGKGYSYAEKANDHYHGVSKFNVDTGEQVKSKSNLPAYTKVFANTLVKHAKKDSKIVGITAAMPGGTGMDIFGKEFPNRMFDVGIAEQHAVTFAAGIATEGYKPYAAIYSTFLQRAYDQVVHDVAIQSLPVRFAIDRAGLVGADGSTHAGSFDITYLSTLPNFIVMAASDEAELVKMINTSVDINDRPSAIRYPRGTGVGVDLPSIDEKIEIGKGRVVQQGTQVCILNLGTRLEECKLAAEELKAKGVSTTLIDARFAKPLDEELILKSAKEHELMVTVEEGSIGGFGSHVKNLLAERGVFDKGLKFRSMTLPDEFIEQDDPKKMYDKAGLNSSQISNKIANILFQKETIRVVKN

SEQ ID NO: 111782 - protein, 330 aa, Unknown
  Bacterial polypetide isolated from the Sargasso Sea
MNKNYKYLNSINFPSDIKKLSQSELKILVKELREELIDAVSETGGHLGAGLGVVELTVVLHYIFNTPHDKLIWDVGHQTYPHKILTGRKDRIRTLRKGGGLSGFTKRSESEYDPFGAAHSSTSISSALGIAVANKLSNKTNNVIAVIGDGAISAGMSYEAMNNAGSGKTKMIVILNDNDMSIAKPVGAMRAYLAKILSGKLYFSFRETLKLIISAFSKRFSKKAGKAEDFLRSAMTGGTLFNSMGFYYIGPIDGHDVDALVSVMKNAKEINYDGPIMIHIKTEKGKGYEFAEKSKDKFHGVSKFNVNTGIQEKSTSSSPGYTKVFANTLI

SEQ ID NO: 111783 - protein, 304 aa, Unknown
  Bacterial polypetide isolated from the Sargasso Sea
MSNNSSTPFLDKISSPHDLKSFSDEQLFQVASELRQETISAVSETGGHLGAGLGVVELTVALHAVFDAPKDKIIWDVSHQSYPHKILTGRRNRIRTLRQKDGLSGFTKRSESEYDPFGAAHSSTSISAALGFATARDLGGSCEAGLGETIAVIGDGSMSAGMAYEAMNNAGHLKKRLIVILNDNEMSIAPPVGALSSYLSQLYAEEPFQDFRQIAKGAIGFLPEPFKEGAKRAKRLLKSMAVGNTIFEALGFSYLGPIDGHDLNQLLPIFRTIQKRLDGPILLHVVTKKGKGYMPAETARDKGH

SEQ ID NO: 111784 - protein, 590 aa, Unknown
  Bacterial polypetide isolated from the Sargasso Sea
WCSLGVVELTVALHYIFNTPNDKLIWDVGHQCYPHKILTGRKERIRTLRQGNGLSGFTKRLESEYDPFGAAHSSTSISSALGIAEANKLSNKSDNVIAVIGDGAISAGMAYEAMNNAGASKTKMIVILNDNDMSIARPVGAMSTYLAKIFSGKIYFSLRETIKLIVSAFSKRFSAKAGKAEDLLRSAVTGGTLFSSLGFYYIGPIDGHDLNSLIPILKNARDSKHEGPILIHIKTKKGKGYTFAEEAKDNYHGVSKFNVKTGEQLKGTSKLPSYTKVFADTLIQHAKKDSKIVAITAAMPDGTGLNNFRKEFPERTFDVGIAEQHAVTFAAGLATENFKPYAAIYSTFLQRAYDQVVHDVAIQSLPVRFAIDRAGLVGADGPTHAGSFDTTYLTTLPNFIVMAASDEAELVRMINTSTEINDRPCAFRYPRGTGLGSTLPSINEKIEIGKSKIIKEGKKLAILNFGARLSETLKAAENLSKKGIPITVVDARFAKPLDENLIWQLATTHEAIMTIEEGSVGGFGSHVVNFLTKKGLMDSNLKFRSLTLPDIFIDQDTPDKMYKVANLDSVSIEEKVLDLLNSNIVLKKQS

SEQ ID NO: 111785 - protein, 528 aa, Unknown
  Bacterial polypetide isolated from the Sargasso Sea
FGAAHSSTSISSTLGMATAKRLSNDNNNVVAVIGDGAMSAGMAYEAMNNAGAMKSKLVVILNDNDMSIARPVGAMSKYLARLLSGKIYFSLRETIKLIISAFSKRFSKKAGRAEDILRSAITGGTLFNELGFYYIGPIDGHDVNNLVAILENVKKSKYEGPILIHAITKKGKGYKPAEESGDKYHGVSKFNVLTGEQLKGKAIAPSYTKVFANTLIKHAENDTKIVAITGAMPSGTGLDLFEKKFPERMFDVGIAEQHGVTFAAGLATEGYKPFAAIYSTFLQRAYDQVVHDVAIQSLPVRFAIDRAGLVGADGPTHAGSFDITYLATLPNFIVMAPSDESELVQMINTSVKINDRPSAFRYPRGNGIGIELPGIDKVIEIGKGRVIKEGKKIAILNFGARLYECQKASEILSSKGINVTIIDARFAKPLDEKLIMEIANNHEVVISIEEGSIGGFGSHVMQLLSERGFFDKGLKFRSMILPDIFIDQDNPIKMYEKAGLDSQSIVRKIESTLDSNVILASNKNKSSN

SEQ ID NO: 111786 - protein, 305 aa, Unknown
  Bacterial polypetide isolated from the Sargasso Sea
MKPTLLDKINYPADLRHLSDLDLKKLAIELRNETIRAVSETGGHLGSSLGVVELTVAIHSVFNTPHDKLIWDVGHQCYPHKIITGRREKMSSLRQEGGLSGFTKRSESDYDPFGAAHSSTSISAGLGFTVARDMGMATGDAVAVIGDGSISAGMAYEALNNAGAEGRRFFVILNDNEMSIAPPVGAMSKYLSSLYANQQFYTLKELAENFAKALPGPLREGAKRARGLITGLAGGTGNTFFEDLGFSYVGPIDGHDLDQLLPVLRTVKTRSEGPVLIHCVTKKGAGYAPAETSADKYHGVSKFDV

SEQ ID NO: 111787 - protein, 441 aa, Unknown
  Bacterial polypetide isolated from the Sargasso Sea
YDPFGAAHSSTFISSTLGMAVAKKLSNNNNNVVAVIGDGAMSAGMAYEAMNNAGALKSKLIVVLNDNDMSIAKPVGAMSKYLAKLLSGKLYFSLRETVKMVISAFSKRFSQKAGKAEDLLRGIVTGGTLFSELGFYYIGPVDGHDVDNLVQIFENVKNSNHEGPILIHVRTQKGKGYKPAEESGDKYHGVSKFNIATGEQRKSKSNAPSYTKVFAETLIKHAEQDTKIIGITGAMPSGTGLNLFEKKFPDRTFDVGIAEQHAVTFAAGLATEGYKPYAAIYSTFLQRAYDQVVHDVAIQSLPVRFAIDRAGLVGADGPTHAGSFDITYLSTLPNFVVMAASDESELVKMINTSVHINDRPSAFRYPRGNGIGVQMPSINELLEIGKGRIIKEGKKVAILNFGTRLEECKKASEILSNKGIDITIIDARFAKPLDEKLIMEA

SEQ ID NO: 111788 - protein, 187 aa, Unknown
  Bacterial polypetide isolated from the Sargasso Sea
NYDIAYLRCIPNMMICTPSNENETRHLLTTAYHYKGPAAVRYPRGTGPNVKVNKELDTYEIGKSRVINHENSKAIILNFGALLDQAEEVAKDLKLTLIDMRFVKPLDEEVLLKYLPKADIFISIEDASIMGGAGSAVQEFCSRENINIKSILIGIPDEFIEHASREQMLDEAGLSAHKIKSKLKELL

SEQ ID NO: 111789 - protein, 292 aa, Unknown
  Bacterial polypetide isolated from the Sargasso Sea
MPDGTGLDIFQKEFPDRTFDVGIAEQHAVTFAAGLATENFKPYTAIYSTFLQRAYDQVVHDVAIQCLPVRFAIDRAGLVGADGPTHAGSFDTTYLTTLPNFVVMAASDEAELVRMINTSTDINDRPCAFRYPRGTGLGSILPSISEKIEIGKSKIIKEGKKLAILNFGARLNETLKAAENLSRKGINITIVDARFAKPLDENLIWQLATTHEAIMTIEEGSIGGFGSHVIDFLTKKGLMDANLKFRSLTLPDIFIDQDTPENMYKFANLDANSIEEKVLDLLNSNIVLQKQK

SEQ ID NO: 111790 - protein, 627 aa, Unknown
  Bacterial polypetide isolated from the Sargasso Sea
MLESISQPQEIQNFNLRELTQLAQECRQRIIEVTSKCGGHLASSLGAVEITVALLKNFDFSIDRLVWDVGHQGYAYKILTGRNKNFDTLGKFGGIKKFLSRDESSYDHFGAGHASTSISAALGMAIGRDLQEKEHRVVSVIGDGALTGGLAFEALNHNGSLDKNLLVIYNDNGISIDPNVGAISKLLTRFASSQFYNRFREESIDFAEKAPFSERLGIKATLQKMHDSAKSFFSPPSMLFEQLGWRYFGTIDGHNLQELLDIIKQVKKLDGPIVIHTITQKGKGYSFAEEDSYKYHGVTPFEPIDGKFIKKKTSVQAMSFSQVLGNKMSELMEREESVVVITAAMLSGTGIANLQTKYPDRVLDVGIAEGHAVTCSAGLATTGNKPYVAIYSTFLQRALDHIIHDVAVQKLPVRFMIDRAGFVGADGPTHHGMFDLTFLRMIPNMTIMVPRNGAELRCMIEFSSSYETGPLAIRYPRANTSELDENQIPPLELGKAQILRKGQNVALFAVGTMVEKAEKVADLLEKHGVFASVINARFVKPMDEDLIVELSREAKLVVSLEENTIQGGFGSAMLEILSKNKICNHTLQIGAPDCFIPQGSYEEQLNEAELNVEKIYERVLENLPDVV

SEQ ID NO: 111791 - protein, 636 aa, Unknown
  Bacterial polypetide isolated from the Sargasso Sea
MQNYKYLNNINFPSDIKKLNNEELKVLSEEVRSEMIDAVSKTGGHLGAGLGVVELTVALHHVFDTPKDKLIWDVGHQSYPHKILTGRKDKIRTLRQGSGLSGFTKRSESEFDPFGAAHSSTSISAGLGIATANKLSNKSDQVIAVIGDGAMSAGMAYEAMNNAGDSKTKMIVILNDNDMSIAKPVGAMKSYLAKIFSGKIYFSFRETVKMIISSFSKRFSKKAGKAEDFLRSAVTGGTLFNSLGFYYVGPIDGHDLDVLLPILKNAKESNHNGPILIHIKTQKGKGYSFAEKSDDKYHGVTKFDVQTGVQQKSTTKTPAFTKVFANTLIEHAKKDSKIVGITAAMPSGTGMDAFSKVFPDRTFDVGIAEQHAVTFAAGLATEGYKPYAAIYSTFLQRAYDQVVHDVAIQSLPVRFAIDRAGLVGADGATHAGAFDITYLSTLPNFIVMAASDEAELVRMVNTSVDINNQPCAFRYPRGNGAGLELPDINEKIDIGKGRVIREGKKVALVSFGNRLKECLLAEEGLKKMGINPTIIDARFAKPLDENLMWQVATNHEVLITLEEGSIGGFGAHVNHFLNEKNLLDNNIKFRSMILPDKFLDQDKPEEMYKEAGLDAKSIEAKVLETLNSKVVIKKTN

SEQ ID NO: 111792 - protein, 371 aa, Unknown
  Bacterial polypetide isolated from the Sargasso Sea
NQPVLLHIITKKGKGLVSTREDNGEYHRDAVKFHAVKPNSTNGELKKSKEKIIPSFQDVFGYLSCEVARNRDDTICITAAMREGTGLVPYAKEFPNRYYDVGIAEGHGVTFSAGFATEGLRPIVAIYSTFLQRAFDHIVHDVAIQHLPVIFCMDRSGIAGEDGPTHHGSLDIAYLRCIQDMIVTAPRNGNEFRHLLYSALNQTKSPFSIRYPKSSAVEFDIDGQAELLPIGSWEVLRSGSDITVLCVGSLSYDVERAAVALQKEDISLEIVNCRFIKPMDEDYLRSIIERFKIVITIEEGVITGGFGDGVSSWLLENDFQGQIKRLGLPDSFIQHGKRDELLDEIGLDENSIINTIKSLFVNTSNDTLIES

SEQ ID NO: 111793 - protein, 187 aa, Unknown
  Bacterial polypetide isolated from the Sargasso Sea
MQLKYLKNIQSPEDIRGYSIDELKELCDEIRDYTIDTVTTVGGHLAPTLGAIELTVALHHVFNTPKDKLIWDVGHQAYAHKILTGRLKNMNTIRQFGGLSGFLKRTESEYDVFGAGHASTSISAALGVAAARDQKNKDFKVAAVIGDGSLTGGLAYEGLNNSGILNTQILVVLNDNEMSISPKCWSQ

SEQ ID NO: 111794 - protein, 479 aa, Unknown
  Bacterial polypetide isolated from the Sargasso Sea
MKIFKEIPLKKPVTPLLDTVNFPSDIRSFSINELEVLANELREFLLYSVGQSGGHLGGGLGVIELTIVLHHIFNTPYDNLVWDVGHQAYPHKILTGRKNKIQTIRKKNGLAPFPSRKESEYDTFGVGHSSTSLSAMLGMAVASKESNPDKKHVGIIGDGAMTAGIAFEALSHIGHLRPNVLIILNDNDMSISENIGGLSNYFSRIWASKIYKGIKKSGASFLKPLPQAHHLARKVETQMKAMVAPGTIFEELGLNYIGPIDGHNLKELINVISNLKEFDGPQFLHVITKKGAGLDPAEADRIGFHAIGKINSIKDEKTKQKKYQDIFGEWIVDMASQDNDLIGITPAMKEGSGLVMFSKKYPERYFDVAIAEQHSVTFAAGLAVENKKPVVAIYSTFLQRAYDQLIHDVAIQNLDVTFALDRSGLVGEDGPTHSGNYDIAYLRCIPNMIICTPSNENEVRHLLTTAYLYQGPATVRYPR

SEQ ID NO: 111795 - protein, 348 aa, Unknown
  Bacterial polypetide isolated from the Sargasso Sea
MQLELLKNINSPDDIRNYSIEELNKLVDELRYYIIKTISEIGGHLAPTLGVIELTVALHKVFETPRDKIIWDVGHQGYAHKLLTGRFDQFHSIRQFGGLSGFLKRSESEYDVFGAGHASTSVSAATGIAQSQKHSGKDFRVVSVIGDGSMTGGLAFEALNNAGHLKTPMILVLNDNEMSISPNVGALNNYLTKIVTNPTYNRIREEIWKISGKLPFGKSKARTILHRVEDSLKSLLVPGMLFEELGFRYIGPIDGHNLNDLINTFEKIKDIKSPLLLHVLTKKGKGMASVKKDEYHLDAVKFHAVKPNGSKNGKVSSNQNQATPSFQDVFGSLVCEIARNRKDTVCIT

SEQ ID NO: 111796 - protein, 168 aa, Unknown
  Bacterial polypetide isolated from the Sargasso Sea
MHLGDLTHPNELHGLKLSELEDVARQIRERHLQVVSTSGGHLGPGLGVVELTLALYQTLDLDRDRVIWDVGHQAYPHKLITGRFNDFHTLRQQNGVAGYLKRSESNFDHFGAGHASTSISAALGMAMARDNRGEDFKCVAVIGDGALTGGMALEAINHAGHLPETPLL

SEQ ID NO: 111797 - protein, 638 aa, Unknown
  Bacterial polypetide isolated from the Sargasso Sea
MTQKSTFLKDINFPTDLKKISEKDLPKVANEVRGEMIDAVSQTGGHLGAGLGVVELTVALHYVFDTPNDKLIWDVGHQSYPHKILTGRKDKIRTLRQGDGLSGFTKRTESEYDPFGAAHSSTSISSALGIAEANKLENKSSNVIAVIGDGAISAGMAYEAMNNAGASKTKIIVILNDNDMSIAKPVGAMRTYLAKLLTGKIYFSFRETIKLITSAFSKRFSAKAGKAEDFLRSAFTGGTMFNSLGFYYVGPIDGHDLSTLIPILKNARDSNHEGPIMIHIKTQKGKGYSYAEKAKDHYHGVSKFNVSTGEQNKSGSNLPSYTKVFANTLVKHAKKDSKIVGITAAMPGGTGMDIFGKEFPKRMFDVGIAEQHAVTFAAGMATEGYKPYAAIYSTFLQRAYDQVVHDVAIQSLPVRFAIDRAGLVGADGSTHAGSFDITYLSTLPNFIVMAASDEAELVKMINTSVDINDRPSAIRYPRGVGVGVELPSIEEKVEIGKGRIIQNGSQVCLLNLGTRLEECKLAAEHLKQKGVSTTIVDARFAKPLDEELIIKCAREHEVLVSIEEGSIGGFGSHVKNLLAEKGIFDKGLKFRSMNLPDKFIEQNTPEKMYEIAGLNASQISEKILDILFNKNSIKVVKN

SEQ ID NO: 111798 - protein, 636 aa, Unknown
  Bacterial polypetide isolated from the Sargasso Sea
MPNYQYLNKVNFPSDIKKLSIDELKILAKEIREEMIDAVSFTGGHLGAGLGVVELTVALHHVFDTPNDKLIWDVGHQSYPHKIITGRKNKIRTIRQGNGLSGFTKRSESEYDPFGAAHSSTSISSALGIAVANKLSNKSNEVVAVIGDGAISAGMAYEAMNNAGISKTKMIVILNDNDMSIAKPVGAMRSYLAKLLSGKLYFSLRETIKLIISAFSKRFSDKAGKAEDFLRSAVTGGTLFSSLGFYYVGPIDGHDLESLIPILKNAKQSNHEGPIMIHIKTEKGKGYSFAEKASDKYHGVTKFNVKTGVQKKSDSKIPSYTKVFANTLIKHAEKDSKIVAITAAMPSGTGLDIFGNKFPKRVFDVGIAEQHAVTFAAGLATEGFKPFAAIYSTFLQRAYDQVVHDVAIQNLPVRFAIDRAGLVGADGPTHAGSFDITYLSTLPNFIVMAASDEAELVRMINTSVDINSNPSALRYPRGNGIGIELPDIDEKIKIGKGRVILEGKKVALINFGARLNECLLASEKLNKKGIKITIVDARFAKPLDEKLIWQIATDHEAIITIEEGSIGGFGSHVSQFLSEKNLLDNNLKFRSMILPDKFIDHNKPELMYKEAGLDADAIANKVFDTLNSKIIVQKQN

SEQ ID NO: 111799 - protein, 639 aa, Unknown
  Bacterial polypetide isolated from the Sargasso Sea
MNKIEIKYLDKIKSPKDLDELNDEQLKELATELRYDVIETVSKTGGHLGASLGVIELTVALHKIFDSPKDKIIWDVGHQSYPHKILTGRRDQMSTLRKKDGLSGFTKRDESKYDHFGAGHSSTAASAGLGMAIGRDLKNKDNHVVCIVGDGAMSAGQAYEALNNAGAEKSKLIVILNDNDMSIAPPAGAMSAYLAKLISGGTYLGLRNFAKQVIEKLPKSLEKGAKKAEEITRLIAGNGTLFEALGFYYVGPIDGHNLDHLLPVIRNVKNADNGPVIIHVVTQKGKGYKPAEDSDEKFHGVTKFNIATGEQEKPKKANVSYTKIFSNSLIKCAENDNDIVAVTAAMPSGTGLDKFKELYPKRFFDVGIAEQHAVTFSAGLAIEGLKPFATIYSTFLQRAYDQIIHDIAIQNLPVRFAIDRAGLVGADGPTHAGSFDLAYLSILPNFVVMAASNEVELARMVKTAADYSLGPISFRYPRGNVFGLDIPTEIESLEIGKGKIIKQGEKIALLNLGTRIEEVKNASDTLEAMGLSCTIADARFAKPLDKDLIRDLSKNHELMITIEEGSSGGFGAHVLMFLADEGILDNGFKIRNLYLPDTFIQHGDVNDMYAQAGLNSENIVKLAMKALDINNNEIKIIKS

SEQ ID NO: 111800 - protein, 640 aa, Unknown
  Bacterial polypetide isolated from the Sargasso Sea
MSQKSILENISSPKDLKILSLDQLLILSDELRSELISSVSKTGGHLGAGLGVIELTIALHYIFNAPNDKIIWDVGHQAYPHKILTGRKEKMNSLRQENGLSGFTNIQESVYDAFGAGHSSTSISAGLGMAVGRDLKGEKNNIISIIGDGAMSAGMAWEALNNLGSQKRKMIVILNDNDMSIAPAVGAVSTYLSKLISSKPLTSIREIAKQVASHLPNEIERAAKRADELARNMMGGGTIFNNLGMYYIGPIDGHNIIDLVKILKNLKNSVNDGPVLLHVVTEKGKGHPFGKDATEKYHAVPKFDIITGEHKKSASKKTYTQIFSEELIKQAKEDEKIVAVTAAMPSGTGLDKFSLEFPNRFFDVGIAEQHAVTFCAGISLEGYKPFCAIYSTFLQRAYDQIVHDVAIQNLPVKFAIDRAGFVGADGATHQGSFDLSYLSCLPNFVIMSPSNEQELINMVKTSANYNDGPIAIRYPRGEIEGIEKLHTAKILKIGKGKIVLDGFCKDKKADLAFLSIGTRLSDTIKVAKNLKNKGYSVSVADARFAKPFDKEMLIQIAKNHNKLIIIEEASSGGFSSTVISYLANADLINTNFKVRSLTMPDKFLEHKSQEAQIIEAGLDYENILKSALSILENDKIANIS

SEQ ID NO: 111801 - protein, 307 aa, Unknown
  Bacterial polypetide isolated from the Sargasso Sea
MSVDISNFPNLALADTPVELRSLPFERLPVLCNELREYLLRSVSRSSGHLASGLGTVELTVALHYVYNTPFDRLVWDVGHQAYPHKILTGRRDRMQSIRQKDGLHPFPWRGESEYDVLSVGHSSTSIGAALGMAVAAESEGLGRKVVAVIGDGAITAGMAFEALNHAGDVHKDMLVVLNDNEMSISENVGALNNHLARIMSGKLYTTIREGGKKVLAGLPPVKELAKRAEEHLKGMVVPGTLFEEFGFNYIGPIDGHDINALVETLRNMRNLKGPQLLHVKTKKGKGYEPAEKDPIGYHGVPKFNPD

SEQ ID NO: 111802 - protein, 622 aa, Unknown
  Bacterial polypetide isolated from the Sargasso Sea
MSLDISQFPVLAQANTPNELRQLPQALLPQLADELREFLLKSVGMSSGHFASGLGTVELTVALHYVYNTPFDRLIWDVGHQAYPHKILTGRRDRMHTIRQKNGLHPFPWREESEYDTFSVGHSGTSISAALAMAVAAEKEQAGRKVVAVIGDGAMTGGMVFEAMNHAGDLHNDMLMVLNDNEMSISENVGALNNHLAQLMSGRLYTTIRESSKKVLKGMPVIKEMAKRTEEHLKGMVVPGTLFEELGFNYIGPIDGHDVDALVETLRNMRSLKGPQVLHIMTKKGRGYEPAEKDPIGWHAVPKFDPSQFKKPATKPGLPTFSQVFGKWLCDIAEQDEKVLGITPAMREGSGMVEFSQRFPKQYFDAAIAEQHAVTLGAGFACEGFKPVVAIYSTFLQRGYDQLIHDVALQRLPVLFAIDRGGIVGADGPTHQGAFDLSFMRCIPNMVIMAPSDENECRQMLYTGYCYDAGPSAVRYPRGSATGATQVEAMTALPIGKGVIKRLGKGIAMLNFGTTLAAALTAAESLDATVVDMRFVKPLDVDLVKEMAQTHDVIVTVEENAIMGGAGSGVLELLQKLKMPKPVLQIGLPDEFIKHGSPEEVTHDLQLDAEGMLAQINAFLAD

SEQ ID NO: 111803 - protein, 402 aa, Unknown
  Bacterial polypetide isolated from the Sargasso Sea
MSLKILPNISSPEDIRGFSNKELQELCIELRSHTIETITEIGGHLAPTLGVIELTVALHYVFNTPKDKLVWDVGHQGYAHKLLTGRFEEFPTIRQFKGLSGFLKRSESEYDVIGAGHASTSISAALGIAEARQQLKEDFRVAAIIGDGSMTGGLAFEGINNAGHLGKQFLVILNDNEMSISPNVGAISTYFTRLISNPLYNKVRNEFWDLTGRLPIAKSTTRTLIKKVEESLKSLIVPGILFDELGFRYFGPIDGHDLDMVVNTLDNIKDIQNPVLLHILTKKGKGMVSLNMNNREYHEDAVKFHAVKPNGKAKPSEKIEKKINSEKPVPSFQDVFGKLSCEIARNRDDTVCITAAMREGTGLVTYSKEFPDRYYDVGIAEGHGVTFASGLASPGIRPIAAI

SEQ ID NO: 111804 - protein, 648 aa, Unknown
  Bacterial polypetide isolated from the Sargasso Sea
MSKNLENLLLNKVKTPNDLRLLNDEQLDQVSKELRNEVIEVVSQTGGHLGSSLGVVELTVALHAVFNTPFDKLIWDVGHQCYPHKIITERRNDMRSLRQKGGISGFTKRSESEYDPFGAAHSSTSISAALGFTMARELGQAIGDTIAVIGDGSITAGMAYEALNNVGSENKRMFVILNDNEMSIAPPVGAMSSYLSTINSHQAFEKLKLFGEEIESHLPSTLREGARRARQLVTGRSQSTFFEDLGFNYLGPIDGHDMRQLLYVLRAAKFRSTGPTLIHVCTKKGHGYAPAENSADKYHGVSKFNVQTGQQSKAPANAPSYTSIFGKSLLEEAKLDTRVVGITAAMPSGTGINILAKELPERVFDVGIAEQHAVTFAAGLAAGGMKPFCAIYSTFLQRAYDQIVHDVALQNLPVRFAIDRAGLVGADGATHAGVFDISYMSNIPNMTVMAASDEAELVHMVRTAAEFDEGPVAFRYPRGNGTGIQLPQRGEILKIGKGRIIQEGTDLVILSFGAHMNLVKDAEVALAKMGVSVTIADARFAKPLDVELVDQLMENHSCMLTVEQGSMGGFGSIVLQHVNRNRTRNENLVFDSIFVADRFIDQADVNSMYEDAGMGINDIIDKSIKLLEQSSQNSRKFDFGNFKENAVS

SEQ ID NO: 111805 - protein, 336 aa, Unknown
  Bacterial polypetide isolated from the Sargasso Sea
MKVFKDFPLERPKNLFLDRIESPEDLKKLTIEELKVLADELREFLLFSVRQTGGHFGAGLGAIEITIALHYLLNMPSDKIVWDTGHQAYPHKILTGRRDKMHIIRKIDGLAPFPSIRESKFDAMSVGHSSTSISAALGMDEAVKHQKNNKKIFSVIGDGAMTAGIAFEAMMHAGHLNNNLKIILNDNDMSISKNKGGLSDYLAKIWASKSYKKLKSSGKKVLKNLPYGLHLTRNIKDSLKSAVMPGNLFEDLGLHYIGPIDGHDIPLLIKTINRMMEKTEPYLLHVVTKKGAGFEPAENERIKFHAISKIENTPAPKKAKFQDIFGDWLCHKAEED

SEQ ID NO: 111806 - protein, 206 aa, Unknown
  Bacterial polypetide isolated from the Sargasso Sea
MLLSELSHPNQLHGLTVSQLEEIACQIRERHLQVVSTSGGHLGPGLGVVELTLALYQTLDLDFDKVVWDVGHQGYPHKLITGRFSQFDSLRQQNGVAGYLKRSESKFDHFGAGHASTSISAALGMAIARDRKGENYKCVAVIGDGALTGGMALEAINHAGHLPNTPLVVVLNDNDMSISPPVGALSSYLNKVRVSPPLQFLSDSVK

SEQ ID NO: 111807 - protein, 330 aa, Unknown
  Bacterial polypetide isolated from the Sargasso Sea
MKIFKEIPIEKPITPLLDSINLPSDIRSFSMVELENLANEIREFLLYSVGQSGGHLGGGLGVIELTIILHYIFNTPFDNLIWDVGHQAYPHKILTGRKNQMHSIRKKGGLAPFPSRNESEFDAFGVGHSSTSISAMLGMAIASKESNPEKKHIAVIGDGAMTAGMAFEALSHTGHLKPNVLIILNDNDMSISENVGGLSNYFSRIWASKTYKGIKKSGASFLKPLPQAYHLARKVETQMKAMVAPGTIFEELGLNYIGPIDGHNLKELKDVISNLKEFEGPQFLHIITKKGAGLDPAEADRIGFHAIGKIQSIKNKKSKQKKYQDIFGDW

SEQ ID NO: 111808 - protein, 320 aa, Unknown
  Bacterial polypetide isolated from the Sargasso Sea
MIKQINFPSDLRKFKKKDLRQISDELRDELIDVVSETGGHLGAGLGVVELTVALHYVFDTPKDKLVWDVSHQCYPHKIITGRRDRIKTLRKGGGLSGFTKRSESEYDPFGAAHSSTSISSTLGMAVAKKLSNNKNNVIAVIGDGAMSAGMAYEAMNNAGALKSNLIVILNDNDMSIARPVGAMSKYLAKLLSGKLYFSFRETIKMIISSFSKRFSQKAGKAEDLLRNIVTGGTLFNELGFYYVGPIDGHDVENLVEILDNVKNSNHNGPVLIHVRTQKGKGYGPAEESGDKYHGVSKFNVSTGEQSKSKSSVPSYTKVFA

SEQ ID NO: 111809 - protein, 189 aa, Unknown
  Bacterial polypetide isolated from the Sargasso Sea
MRTTKLQKKIFSFMSYKLLDKINFPSDLRKLSLIELENLSNELRNKTIETVSKTGGHLGAGLGVVELTIALHFVFNTPRDRLIWDVGHQSYPHKILTGRKNKIETLRQKNGLYGFVKRSESEYDPFGTAHSSTSISAGMGMKVAKDLNNDDAKIISVIGDGALSAGMAYEALNNIGASNKQMIVILNDK

SEQ ID NO: 111810 - protein, 318 aa, Unknown
  Bacterial polypetide isolated from the Sargasso Sea
YTKVFANTLVKHAKKDSKIVGITAAMPGGTGMDIFGKEFPKRMFDVGIAEQHAVTFAAGMATEGYKPYAAIYSTFLQRAYDQVVHDVAIQSLPVRFAIDRAGLVGADGSTHAGSFDITYLSTLPNFIVMAASDEAELVKMINTSVDIDDRPSAIRYPRGVGVGVELPSIEEKIEIGKGRIIQNGSQVCLLSLGTRLEECKLAAEHLKQKGVSTTIVDARFAKPLDEELIIKCAREHEILISIEEGSIGGFGSHVKNLLAEKGIFDKGLKFRSMNLPDKFIEQDTPNKMYEIAGLNASQISKKILDILFNKNSIKVVKN

SEQ ID NO: 111811 - protein, 448 aa, Unknown
  Bacterial polypetide isolated from the Sargasso Sea
KPNMLIVLNDNDMSISENVGGLNNYFSRIWASKVYKGIRKSGKGFLENLPQAHHIARKVETQMKAMVAPGSIFEELGLNYIGPIDGHDIGELNKVIGNLKDFEGPQFLHVITKKGAGLDPAEADRIGFHAIGKIKPLDSINQKSKPKFQDVFGQWIVDMGKKDEDLIAITPAMREGSGLVKFSKEFPERFYDVAIAEQHAVTLAAGMACEKKKPVVAIYSTFLQRAYDQLIHDVALQNLNVLFAIDRAGLVGEDGPTHSGNYDLTYLRCIPNMIIAVPADENEARMLLTTTFNHNGPAAVRYPRGGGINADIDLELKSLEVGKGRVINSMDSDLLVLNFGTLIATAQEVAKELNATLLDMRFVKPLDKKLIAEYSKGKKVIITIEDGAMSGGAGSAVNEWAQENKISAQIVICGIPDEFIDHSSREEMIEAVGLDKNGILAKVKDFLP

SEQ ID NO: 111812 - protein, 625 aa, Unknown
  Bacterial polypetide isolated from the Sargasso Sea
MKIFKEIPKEAPSTELLDKINYPEDLKELSPHDLKTLADELREFLLYSVGKSGGHLGAGLGVVELTVVLHYLYDAPSDNIVWDVGHQAYPHKILTGRKNQINSIRSKDGLAPFPSRNESNFDAFGAGHSSTSISSAIGMAIANKLNEGEKKTVAVIGDGAMTAGMAFEAMQHAGGVKPDMLIILNDNDMSISENVGGLNNYFSRIWASKLYKGIKSNGKKFLKNIPAAHHLARTVETHMKTMVAPGAIFEELGLNYIGPIDGHNIDQLLNVIGNLKNFEGPQFLHIITKKGAGYDLAEEDRIKYHAISKSNISKSIGKTKPKYQDIFSDWILDMAKENDDLVAITPAMREGSGLVEFSRGFPERYFDVAIAEQHAVTLSAGLACERKKPVVAIYSTFLQRAYDQLIHDVALQNLDVTFAIDRAGLVGEDGPTHSGNYDLVYLRCIPNMIVMTPSDENETRKLLTTGFFHNGPASIRYPRGSGPNVDVENDLTPVEIGKGRLIKERSKDLIVINFGALIDQAKEVANTLGLTLIDMRFVKPLDEDILKKYLSKAQAFVSIEDGSVAGGAGSAVQEFCSDNNINIKSKLFGIPDVFIEHQSREEMIEESGLKASKIIKEIEELRLVK

SEQ ID NO: 111813 - protein, 357 aa, Unknown
  Bacterial polypetide isolated from the Sargasso Sea
RRCNEFLSFKLLSSRSYSNVRSLIKKLSSRLPESFQKTLHRAEEFSKGFVSGGTLFEELGFFYLGPIDGHNFNHLIPIMTNIKNNKIHKPIFLHVITKKGKGYKPAEDSSDKFHGVNKFNIKTGHSLSSSNKQTFSEIFGKTLENEALQDEKIVGITAAMASGTGLNSFSKKFPQRFFDVGIAEQHAVTMAAGLATEGFKPFVAIYSTFLQRAYDQIVHDVAIQKLPVRFAIDRAGQVGADGPTHAGSYDISFLNSLPNFIIMAASDENELIRMIKTSLLINDRPSSFRFPRGSGSGITEELNLNPLEIGKGKIIKEGNKIAIINFGARLEACKEAIDILKINNVFPTLVDARFVKP

SEQ ID NO: 111814 - protein, 637 aa, Unknown
  Bacterial polypetide isolated from the Sargasso Sea
MNKKFKYLDNVNFPSDIKNLSLSELKELAAEVRQEMIDAVSETGGHLGAGLGVVELTVALHYVFNTPNDKLIWDVGHQTYPHKILTGRKDKIRSLRKGGGLSGFTKRSESEYDPFGAAHSSTSISSALGIATANKLSNKSDDVIAVIGDGAMSAGMAYEAMNNAGASKTKMIVILNDNDMSIAKPVGAMRAYLAKILSGKLYFSFRETVKLIISAFSKRFSKKAGKAEDFLRSAVTGGTLFSSMGFYYMGPIDGHDIDDLASVLKNARDINYDGPIMIHIKTKKGKGYEFAEKSEDKFHGVTKFNVNTGVQEKKKSNVPAYTKIFANTLLKHAEKDSKIIGITAAMPSGTGMDIFGKKFPSRMFDVGIAEQHAVTFAAGLATEGYKPYAAIYSTFLQRAYDQVVHDVAIQSLPVRFAIDRAGLVGADGPTHAGSFDITYLSTLPNFVVMAASDEAELVRMINTSVDINDKPSAFRYPRGNGIGVELPNISEKLEIGKGRIIREGKKVAILNFGGRLNECLIACENLKKKGINLTLFDARFAKPLDQNTIWQLARDHETIISIEEGSIGGFGSHVSQYLFDNNLIDNNLKFRSMILPDRFIDHDKPEQMYKYAGLDASSIETKILDTLNSKVVIKKSN

SEQ ID NO: 111815 - protein, 412 aa, Unknown
  Bacterial polypetide isolated from the Sargasso Sea
LGIAEANKLENKSSNVIAVIGDGAISAGMAYEAMNNAGASKTKIIVILNDNDMSIAKPVGAMRTYLAKLFTGKIYFSLRETFKLITSAFSKRFSAKAGKAEDFFRSAVTGGTLFSSLGFYYAGPIDGHDLSSLVPILKNAKESRHEGPIMIHIKTQKGKGYSYAEKANDHYHGVSKFNVETGEQVKIKSNLPAYTKVFANTLVKHAKKDSKIIGITAAMPGGTGMDIFGKEFPNRMFDVGIAEQHAVTFAAGLATEGYKPYAAIYSTFLQRAYDQVVHDVAIQSLPVRFAIDRAGLVGADGSTHAGSFDITYLSTLPNFVVMAASDEAELVKMINTSVDINDRPSAIRYPRGTGVGVDLPSIDEKIEIGKGRVVQQGTQVCILNLGTRLEECKLAAEELKAKGVSTTLIDAR

SEQ ID NO: 111816 - protein, 462 aa, Unknown
  Bacterial polypetide isolated from the Sargasso Sea
NDNDMSISKPVGALRSYLAKILSGKIYFSFRETVKLIISAFSKRFSKKAGAAEDFLRSAVTGGTLFSSLGFYYVGPIDGHNIDDLISVFKNAQNLNFEGPILIHLKTEKGKGYEFAEKSADKFHGVSKFNVKTGEQEKTKSNVPAYTKVFANTLVKHGEKDSKIIGITAAMPTGTGMDVFGKKFPNRMFDVGIAEQHAVTFAAGLATEGYKPYAAIYSTFLQRAYDQVVHDVAIQSLPVRFAIDRAGLVGADGPTHAGSFDITYLSALPNFVVMAASDESELVKMINTSVEINDKPSAFRYPRGSGIGVELPSIEEKLEIGKGRVIKEGNKVALINFGARLKECLIAEENLVKKGIKITLIDARFAKPLDENLIWQLATDHEVLLTIEEGSIGGFGSHVSQFLTEKNLLDNNLKFRSMILPDRFIDHDKPELMYKYAGLDSQAIESKILDTLNSKIVVKKIN

SEQ ID NO: 111817 - protein, 625 aa, Unknown
  Bacterial polypetide isolated from the Sargasso Sea
MKIFSEIPNEVPSTKLLDRINYPEDLKELSPPDLKILADELREFLLYSVGKSGGHLGAGLGVVELTIVLHYLYDSPSDNIVWDVGHQAYPHKILTGRKDQISSIRSKDGLAPFPSRNESDFDAFGAGHSSTSISSAVGMAIANKLNEGEKKTVAVIGDGAMTAGMAFEALQHAGGIKPDMLIILNDNDMSISENVGGLNNYFSRIWASKLYKGIKSNGKKFLKNIPAAHHLARTVETHMKTMVAPGAIFEELGLNYIGPIDGHDIDQLLNVIGNLKNFEGPQFLHIITKKGAGYDLAEGDRIKYHAISKTNTSKNIGKTKPKYQDIFSNWIVDMAREDSDLVAITPAMREGSGLVEFSKEFPERYFDVAIAEQHAVTLSAGLACEKKKPVVAIYSTFLQRAYDQLIHDVALQNLDVTFAIDRAGLVGEDGPTHSGNYDLVYLRCIPNMIVMTPSDENETRKLLTTGFFHNGPASIRYPRGSGPNVVVENDLSPVEIGKGRLIKEGSKNLIVINFGALLDQAKEVADTLGLTLIDMRFVKPLDEDILRKYLSEAQAFVSIEDGSVAGGAGSAVQEFCSENNINVKSKLFGIPDIFIEHQSREEMIEESGLKASKIIKEIEGLELEE

SEQ ID NO: 111818 - protein, 112 aa, Unknown
  Bacterial polypetide isolated from the Sargasso Sea
MEYDLLDKINFPSDLREFKKKDLKQISEELRAKTIETVSKTGGHLGAGLGVVELTVAIHYVFNTPHDKLIWDVGHQAYPHKIITGRKKNIETLRKKDGVYGFVRRSESEYDP

SEQ ID NO: 111819 - protein, 235 aa, Unknown
  Bacterial polypetide isolated from the Sargasso Sea
LQRAFDQLVHDVNLQNLNVMFAIDRAGLVGADGETHHGIYDISFMRILPRIIIMTPSNERELLLMLNTGLYYKGPTAIRYPRGNTACSDIAMTEEKIPVGKSRLIQNGQKVAILVFGQLLSEVIDISKKLSLTLIDMRFAKPVDTERIDELSNTHQHLITIEDHVVTGGAGSAVNEYLVEKGYEITITNFGIPDQIISHGSQSELYAEIGLDNKSLEYKINEIYNHVSSNKKIAE

SEQ ID NO: 111820 - protein, 542 aa, Unknown
  Bacterial polypetide isolated from the Sargasso Sea
MEKKLLDKINYPADLRLLKKKQLKQFTEELRSEVIDVVSETGGHLGAGLGVIELTVALHYVFNTPKDKLVWDVGHQCYPHKIITGRKDKIRTLRKGGGLSGFTKRSESEYDPFGAAHSSTSISSTLGMATAKKLSNDTNNVVAVIGDGAMSAGMAYEAMNNAGAMKSKLIVVLNDNDMSIAPPVGAMSKYLARLLSGKIYFSFRETIKLILSAFSKRFSKRAGKAEDLIRSAVTGGTLFSQLGFYYVGPIDGHDVSNLVKIFENVKNSNHQGPILIHAITKKGKGYKPAEESGDKYHGVSKFDVSTGKQDKSKSAGPSYTKVFANTLVKHAQNDTKIVAITGAMPSGTGLDIFQKKFPDRMFDVGIAEQHGVTFAAGLATEGYKPFAAIYSTFLQRAYDQVVHDVAIQSLPVRFAIDRAGLVGADGATHAGSFDITYLSTLPNFVVMAASDEAELVRMINTSVNINDRPSAFRYPRGNGLGIELPDIKEILEIGKGKIISNGKHLAILNFGARLNECKKAAEILKKKGISITIFDARFAKPL

SEQ ID NO: 111821 - protein, 261 aa, Unknown
  Bacterial polypetide isolated from the Sargasso Sea
MSNYEFLNNINFPSDIKKLSNSDLKILSKEIRAKMIEAVSKTGGHLGAGLGVVELTVALHYIFDTPKDKIVWDVGHQSYPHKILTGRKDKIETLRTGGGLSGFTKRDESEYDPFGAAHSSTSISAALGIATANKLSNKSEDVVAVIGDGALSAGMAYEAMNNAGSSKTKMIVILNDNDMSIAKPVGALRTYLAKILSGKIYFSLRETIKLLISSFSKRFMKKAGKAEDFFRSAVTGGTLFNSLGFYYVGPIDGHDIDVLTS

SEQ ID NO: 111822 - protein, 626 aa, Unknown
  Bacterial polypetide isolated from the Sargasso Sea
MKFKVLDKIEYPSDIKKLDDRELIALSKELRDFLIDTVSKTGGHLAAGLGTIELTIALHKVFDTPKDKLIWDIGHQCYPHKILTGRKDEMKTLRMKDGISGFLKRQESEYDAFGAGHSSTSISAAVGIDQANIINKDDADVVAIIGDGGLTAGMAYEALCHAGDLKSNILVILNDNDMSISPNVGAIHNYLTKMLTSKTLKNIKDGSKKVLSKIKPIENLARRVEGGAKNLITPGLLFEELGFKYYGPVDGHDLLDTIKLLKNLRARKGPRLLHILTKKGKGYKLAEQNPITYHGVTPFNLKTGKSVKKNTGIKKPTYTNIFSDWLNWTAENNSKLVAITPAMREGSGLVEFEKKFPERYFDVGIAEQHAITFAAGLACENIKPVVAIYSTFLQRALDQVIHDVAVQELDVLLAIDRAGIVGADGETHQGIYDISYLRMLPNVVIMTPSNEKDMTRMLSTGLEYKGLAAVRYPRGESRGLSVELSEIEPIDIGRSKTVRHGKDIAFLVFGTLLHTVIDVAETINATVVDMRFAKPIDEEKISLMCKNHQLIVTVEDNVVSGGAGSSVNEFILSQKLKNNIKNIGIPDKLIGHGNQDEILADINLDYNGILESVKDHIDMIDLKEKA

SEQ ID NO: 111823 - protein, 386 aa, Unknown
  Bacterial polypetide isolated from the Sargasso Sea
MNRARLSPPMQFLSGSVEESVRHLPFMGGELPAELNRLKGSMRRLAVPKVGAVFEELGFTYMGPIDGHDIGEMMRTFQAAHRDGGPVLVHVVTKKGKGYPYAEADQVGYHAQSAFDLTTGKAIPSKKPKPASYSKVFGQTLVKLCEQNSRVVGITAAMATGTGLDLLQKAVPNQYVDVGIAEQHAVTLAAGMACEGLRPVVAIYSTFLQRAYDQLIHDVGIQNLPVTFVLDRAGIVGADGPTHQGQYDISYMRSIPNFTVMAPKDEAELQRMLVTCLNHDGPTALRIPRGSGVGMPLMEEGWEALPIGRGELLREGDDLLIVAYGSMVHPALDTATLLEEAGLSTTVINGRFLRPLDQALIHPLARRIRRVVTMERGRSGRVDLVQ

SEQ ID NO: 111824 - protein, 421 aa, Unknown
  Bacterial polypetide isolated from the Sargasso Sea
FQKISAKAGKAEDLLRSAVTGGTLFSSLGFYYIGPIDGHDLSSLIPILRNARDSKHQGPILIHIKTKKGKGYSFAEEAKDHYHGVSKFNVKTGEQEKSSNKVPSYTKVFADTLIQHAKKDSKIIAITAAMPDGTGLSNFRKEFPDRTYDVGIAEQHAVTFAAGLATENYKPYAAIYSTFLQRAYDQVVHDVAIQSLPVRFAIDRAGLVGADGPTHAGSFDTTYLATLPNFIVMAASDEAELVRMINTSTEINDRPCAFRYPRGSGIGSILPSINEKIEIGKSRIIQDGKKLALINFGARLSESLKASENLKKKGVNITIMDARFAKPLDENLIWQLATTHEAIVTIEEGSIGGFGSHVIDFLSKKGLMDSNLKFRSMKLPDIFINQDKPENMYKLANLDSISIEEQILDVLNSNIILQKQK

SEQ ID NO: 111825 - protein, 332 aa, Unknown
  Bacterial polypetide isolated from the Sargasso Sea
KSSGQAISYSQVFGNKLEELMERDESVVVLTAAMLSGTGIVNLQPKFPDRVLDVGIAEGHAVTCSAGLATTGNKPFVAIYSTFLQRALDHIIHDIAVQQLPVRFMLDRAGFVGADGPTHHGMFDLTYLRMIPNMTIMVPRNGSELCCMIEFAYDYETGPLAIRYPRGNTAEVNENKIPPLEFGKAQILRKGQNVVLIAVGTMVEKAEQIADLLEKQGVYASVINARFVKPLDEDLIVNLGRDAKLLVSLEENTIHGGFGSGVLEILSKNKICIPTLQIGAPDRFIPQGSPEEQLNEAELNVEQIYGRVLEKLPEVVKKIRNKRTMERKKRAS

SEQ ID NO: 111826 - protein, 301 aa, Unknown
  Bacterial polypetide isolated from the Sargasso Sea
MSLDLQHYPTLALAQTPDKLRQLPQDKLRELADELREYLLNSVSQTSGHFASGLGTVELTVALHYVYDTPFDRLLWDVGHQAYPHKILTGRAERMSTIRQKNGLHPFPWPPESDYDTFAVGHSSTSISAGLGMAVAAEKEGKNRKVVAVIGDGAMTAGMAFEALNHAGDIKKDMVVVLNDNEMSISENVGALNSHLARLLTGNFFNSIRDGGKKLLSNVPPIKEFASRAEEHIKGMVVPGTIFEELGFNYIGPIDGHDVNGVVDTLRNMRKFDGPQLLHVVTKKGKGYAVAEEDPIKFHAV

SEQ ID NO: 111827 - protein, 327 aa, Unknown
  Bacterial polypetide isolated from the Sargasso Sea
MNKNYKILNSINFPSDIKKLSHSELKVLANEVREEMIDAVSETGGHLGAGLGVVELTVVLHYIFNTPNDKLIWDVGHQSYPHKILTGRKDKIRTLRKGSGLSGFTKRLESEYDPFGAAHSSTSISSAIGIAVANKLSNKSDDVVAVIGDGAISAGMAYEAMNNAGSSKTKLIVILNDNDMSIAKPVGAMRAYLAKILSGKIYFSLRETIKLIISAFSKRFSKKAGKAEDFLRSAVTGGTLFSSMGFYYVGPIDGHDIDALISVLKNAKEINYEGPIMIHIKTEKGKGYSFAEKSEDKYHGVSKFNVNTGVQEKSKSNIPSYTKVFAN

SEQ ID NO: 111828 - protein, 318 aa, Unknown
  Bacterial polypetide isolated from the Sargasso Sea
MRKNYKYLDDINFPSDIKKLSQSELKVLAKEVREELIDAVSETGGHLGAGLGVVELTVALHYIFNTPNDKLIWDVGHQSYPHKILTGRRDKIRTLRKGNGLSGFTKRTESEYDPFGAAHSSTSISSALGIAVANELSNKSTNVIAVIGDGAISAGMSYEAMNNAGASKTKMIVILNDNDMSIAKPVGAMRTYLAKILSGNIYFSFRETVKLIISAFSKRFSKKAGKAEEFLRSAVTGGTLFNAMGFYYIGPIDGHDVDALISVLKTAKEINIKGPIMIHIRTKKGKGYEFAEKSDDKYHGVSKFNISTGVQEKTKSNI

SEQ ID NO: 111829 - protein, 622 aa, Unknown
  Bacterial polypetide isolated from the Sargasso Sea
MSLDISQFPVLAQANTPNELRQLPQALLPQLADELREFLLKSVGMSSGHFASGLGTVELTVALHYVYNTPFDRLIWDVGHQAYPHKILTGRRDRMHTIRQKNGLHPFPWREESEYDTFSVGHSGTSISAALAMAVAAEKEQAGRKVVAVIGDGAMTGGMVFEAMNHAGDLHNDMLMVLNDNEMSISENVGALNNHLAQLMSGRFYTTIRESSKKVLKGMPVIKEMAKRTEEHLKGMVVPGTLFEELGFNYIGPIDGHDVDALVETLRNMRNLKGPQVLHIMTKKGRGYEPAEKDPIGWHAVPKFDPSQFKKPATKPGLPTFSQVFGKWLCDIAEQDEKVLGITPAMREGSGMVEFSQRFPKQYFDAAIAEQHAVTLGAGFACEGYKPVVAIYSTFLQRGYDQLIHDVALQRLPVLFAIDRGGIVGADGPTHQGAFDLSFMRCIPNMVIMAPSDENECRQMLYTGYCYDAGPSAVRYPRGSATGATQVEAMTALPIGKGVIKRLGKRIAMLNFGTTLAAALTAAETLDATVVDMRFVKPLDVDLVKEMTQTHDVLVTVEENAIMGGAGSGVLELLQQLKMPKPVLQIGLPDEFIKHGSPEEVIHDLQLDAEGMLAQINAYLAD

SEQ ID NO: 111830 - protein, 280 aa, Unknown
  Bacterial polypetide isolated from the Sargasso Sea
MNKKLLDNINFPSDLRLLKKKQLRQVSDELRSELIDIVSETGGHLGASLGVVELTVALHYVFNTPKDKLVWDVGHQCYPHKIITGRKDKIRTLRKGGGLSGFTKRSESEYDPFGAAHSSTSISSTLGMATAKRLSNDKNNVIAVIGDGAMSAGMAYEAMNNAGAMKSKLIVILNDNDMSIARPVGAMSKYLAKLLSGKIYFSFRETIKLILSAFSKRFSKTAGKAEDMFRSIVTGGTLFSELGFYYIGPIDGHDVDNLVTILEKIRKSNHDGPILIHTIP

SEQ ID NO: 111831 - protein, 137 aa, Unknown
  Bacterial polypetide isolated from the Sargasso Sea
MKIFSEIPTKKPKTPVLDKVNIPADIKNLTSIELKALADDVRAHMLYSVGQSGGHLGGGLGVVELTVVLHYLYNAPDDKIIWDVGHQAYPHKILTGRKKSLTTIRQKDGLAPFPNREESPYDAFGVGHSSTSISAAL

SEQ ID NO: 111832 - protein, 622 aa, Unknown
  Bacterial polypetide isolated from the Sargasso Sea
MKIFKEIPTQKPITPILDNINLPSDIRSFSLGELESLANEIREFLLYSVGQSGGHLGGGLGVIELTIILHYIFNTPFDNLVWDVGHQAYPHKILTGRKNKMQTIRKKGGLAPFPSRKESEFDAFGVGHSSTSISAMLGMAIGSKESNPEKKHIAVIGDGAMTAGMAFEALSHTGHLKPNVLIILNDNDMSISENVGGLSNYFSRIWASKTYKGIKKSGASFLKPLPQAYHLARKVETQMKAMVAPGTIFEELGLNYIGPIDGHNLKELKDVISNLREFEGPQFLHVITKKGAGLDPAEADRIGFHAIGKIQSIKNKKSKQQKYQDVFGDWIVDMANSDENIIGITPAMREGSGLVKFSEKFPDRYYDVAIAEQHAVTFAAGIATENKKPVVAIYSTFLQRAYDQLIHDVAVQDLDVTFALDRSGLVGEDGPTHSGNYDIAFLRCIPNMVICTPSDENETRKLLSTAYFYNGPATVRYPRGTGPNKTIEKELKTFEIGKANVVTDYESKIVILNFGALLEEACSVAQDLQITLIDMRFVKPLDEELLKKYLTKADMFVSIEDGSVMGGAGSAVQEFCSRENIEIKSVLFGIPDTFIEHASRKEMLEEAGLTSKKIKSKIEDLL

SEQ ID NO: 111833 - protein, 282 aa, Unknown
  Bacterial polypetide isolated from the Sargasso Sea
MSNNYKFLNNVNFPSDIRKLSQSEIKVLADEVRQELIDVVSETGGHLGAGLGVVELTVVLHYIFNTPHDKLIWDVGHQTYPHKILTGRKNKIRTLRKGKGLSGFTKRSESEYDPFGAAHSSTSISSALGMAVANKLSNKSDNVIAVIGDGAISAGMAYEAMNNAGESKTKMIVVLNDNDMSIAKPVGAMRKYLAKILSGKIYFSFRETLKLIISAFSKRFKNKAGKAEDFLRSAVTGGTLFNSMGFYYIGPIDGHDIDTMVSVFKNAKEINYDGPNFSSCKN

SEQ ID NO: 111834 - protein, 197 aa, Unknown
  Bacterial polypetide isolated from the Sargasso Sea
MKVFKDFPIERPKNYFLDKIESPEDLKKLTIEELKVLADELREFLLFSVRQTGGHFGAGLGAIEITIALHYLLNMPSDKIVWDTGHQAYPHKILTGRRDKMHIIRKIDGLAPFPSIKESKFDAMSVGHSSTSISAALGMDEAVKHQKNNKNIFSVIGDGAMTAGIAFEAMMHAGHLNNNLKIILNDNDMSISKNKGG

SEQ ID NO: 111835 - protein, 379 aa, Unknown
  Bacterial polypetide isolated from the Sargasso Sea
LRKLYSTLREGGKKVFSGVPPIKELLKRTEEHLKGMVVPGTLFEELGFNYIGPVDGHDVLGLVNTLKNMRDLKGPQFLHIMTKKGRGYEPAEKDPITFHAVPKFDHTSGVLPKSSGGLPSYSKIFGDWLCETAAKDSKLMAVTPAMREGSGMVEFSRKYPDQYFDVAIAEQHAVTFAAGLAIGDYKPVVAIYSTFLQRAYDQLIHDVAIQKLPVLFAIDRAGIVGADGQTHQGAFDLSFLRCIPDMVIMTPSDENECRQMLYTGYHYNEGPSAVRYPRGTGTGATLEPLASLPIGKGVVKRTGEKVAILNFGTLLPEAAQVADKLNATLVDMRFVKPLDDALILQLAADHDVLVTVEENAIMGGAGSGVNELLMAHRRV

SEQ ID NO: 111836 - protein, 226 aa, Unknown
  Bacterial polypetide isolated from the Sargasso Sea
MTKYKFLDNVNFPSDIKNLKSSELNILSKELREELIEAVSFTGGHLGAGLGVVELTVALHHVFDTPNDKIVWDVGHQSYPHKILTGRKNRIKTLRQGNGLSGFTKRSESEYDPFGAAHSSTSISAALGIATANKLSKKSENVVAVIGDGAISAGMAYEAMNNAGISKTKMIVILNDNDMSIAEPVGAMRSYLAKLLTGKIYFSLRETFKLIISAFSKRFQKKLKSR

SEQ ID NO: 111837 - protein, 639 aa, Unknown
  Bacterial polypetide isolated from the Sargasso Sea
MTKLIRQINFPADLRKFDKDKLKQISDELRDELIDVVSETGGHLGAGLGVVELTVALHYVFDTPKDKLVWDVSHQCYPHKIITGRKDRIKTLRKGGGLSGFTKRSESEYDPFGAAHSSTSISSTLGMAVAKKLSNNNNNVVAVIGDGAMSAGMAYEAMNNAGALKSKLIVVLNDNDMSIAKPVGAMSKYLAKLLSGKLYFSLRETVKMVISAFSKRFSQKAGKAEDLLRGIVTGGTLFSELGFYYIGPVDGHDVDNLVQIFENVKNSNHEGPILIHVRTQKGKGYKPAEESGDKYHGVSKFNVATGEQSKSKSNVPSYTKVFAETLVKHAEQDTKIIGITGAMPSGTGLNLFEKKFPDRTFDVGIAEQHAVTFAAGLATEGYKPYAAIYSTFLQRAYDQVVHDVAIQSLPVRFAIDRAGLVGADGPTHAGSFDITYLSTLPNFIVMAASDEAELVKMINTSVNINDRPSAFRYPRGNGVGVSLPSINEFLEIGKGRIIKEGKKVAILNFGARLEECKKASEILFKKGINATIIDARFAKPLDEKLIMEAANNHEVLISIEEGSIGGFGSHVMQFLSDRGVFDKGLRFRSMILPDLFIDQDTPEKMYEKAGLDSLSIANKIEDTLNSNIVLAKNKNKLSN

SEQ ID NO: 111838 - protein, 187 aa, Unknown
  Bacterial polypetide isolated from the Sargasso Sea
MVYLRCIPNMIVMTPSDENEARKLLTTGFFHNGPASIRYPRGSGPNVVVENDLSPVEIGKGRLIKQGSKDLIVINFGALLDQAKEVASTLGLTLIDMRFVKPLDEDILRKYLSEAQAFVSIEDGSVAGGAGSAVQEFCSDNNINIKSKLFGIPDIFIEHQSREEMIEECGLKASRIIKEIEELKLVE

SEQ ID NO: 111839 - protein, 290 aa, Unknown
  Bacterial polypetide isolated from the Sargasso Sea
LSQKAVPKQYVDVGIAEQHAVTLAAGMACEGLRPVVAIYSTFLQRAYDQLIHDVGIQNLPVTFVLDRAGIVGADGPTHQGQYDISYMRSIPNFTVMAPKDEAELQRMMVTCLNHDGPTALRIPRGSGVGMPLMEEGWESLPIGRGELLREGDDLLIVAYGSMVHPALDTATLLEEAGLSTTVINARFLRPLDQALIHPLARRIQRVVTMEEGALAGGFGAAVLESLSDQDISVPLLRIGIPDKMVDHATPQQSKESLGLTPVQMAERIRRRFELSGRDFAGASSLPAVQS

SEQ ID NO: 111840 - protein, 638 aa, Unknown
  Bacterial polypetide isolated from the Sargasso Sea
MAEKLLDKINYPSDLRKLKKSQLEQVSNELRNELIDVVSETGGHLGAGLGVVELTVALHYVFNTPNDKLVWDVGHQCYPHKIITGRKERIKTLRKGGGLSGFTKRSESEYDPFGAAHSSTSISSTLGMATAKKLSNDKNNVVAVIGDGAMSAGMAYEAMNNAGAMKSKLIVILNDNDMSIAPPVGAMSKYLARLLSGKIYFSLRETIKLIISAFSKRFSKKAGKAEDMFRSMVTGGTLFNELGFYYIGPIDGHDIKNMVTIMENVKNSSYDGPILIHAITKKGKGYKPAEESGDKYHGVSKFNVQTGEQSKGKSKSPSYTKVFANTLIKHAENDTKIVAITGAMPSGTGLDLFEKKFPERMFDVGIAEQHGVTFAAGLATEGYKPYAAIYSTFLQRAYDQVVHDVAIQSLPVRFAIDRAGLVGADGPTHAGSFDVTYLSTLPNFVVMAASDEAELVRMINTSVNINDKPSAFRYPRGNGVGVDLPNIKETLQIGKGRLILQGKHIAILNFGARLNECKKASDILKKKGISASIFDARFSKPLDEQSIIELASSHEAILTIEEGSIGGFGSHVSKLLSERGFFDKGLKFRSMFLPDKFLDQDTPENMYKYAGLDCDSIVQKIENVLNSNVVIAKNKNFS

SEQ ID NO: 111841 - protein, 613 aa, Unknown
  Bacterial polypetide isolated from the Sargasso Sea
MLLSELSHPNQLHGLTVSQLEEIACQIRERHLQVVSTSGGHLGPGLGVVELTLALYQTLDLDFDKVVWDVGHQGYPHKLITGRFSQFDSLRQQNGVAGYLKRSESKFDHFGAGHASTSISAALGMAIARDRKGENYKCVAVIGDGALTGGMALEAINHAGHLPNTPLVVVLNDNDMSISPPVGALSSYLNKVRVSPPLQFLSDSVQESVKNIPIIGKDIPEELKNIKGSVRRLAVPKVGAVFEELGFTYMGPIDGHDIGNLVNTFNAAHKLKKPVLVHVVTTKGKGYPYAEADQVGYHAQSAFDLTTGKSIPSKKPKPVSYSKIFGQTLLKICEQDSKVVGITAAMATGTGLDILQKNIPDQYIDVGIAEQHAVTLAAGMSCDDLKPVVAIYSTFLQRAFDQLIHDVGIQNLPVSFVLDRAGIVGADGPTHQGQYDISYMRSIPNFVLMAPKDESELQRMLITSINYKGPTALRIPRGSGLGVAVMDEGWEPLSIGEAEILEEGDDILIIAYGSMVASAIETAEILKNMNINACIVNARFVKPLDKKLIMPLASRIQKVITMEEGTLIGGFGSAIVELFNDNELNIPVYRIGIPDVLVDHASPDQSKEKLGLM

SEQ ID NO: 111842 - protein, 636 aa, Unknown
  Bacterial polypetide isolated from the Sargasso Sea
MSKYKLLNNVNFPSDIKKYSSSELKILSKEIREKMIEAVSKTGGHLGAGLGVVELTVALHYIFDTPKDKIIWDVGHQSYPHKILTGRKDKIETLRTGGGLSGFTKRDESEYDPFGAAHSSTSISAALGIATANKLSNKSEDVVAVIGDGALSAGMAYEAMNNAGSSKTKMIVILNDNDMSISKPVGALRTYLAKILSGKIYFSLRETIKLIISSFSKRFMKKAGKAEDFFRSAVTGGTLFNSLGFYYVGPIDGHDLDVLTSVLENSKKMKYDGPILIHIKTEKGKGYEFAEKSTDKYHGVSKFNIQTGQQEKAKSITPSYTKVFANTLIRHAQKDSKIIGVTAAMPSGTGMDLFAEKFPDRMYDVGIAEQHAVTFSGGLATQGYKPFVAIYSTFLQRAYDQVVHDIAIQSLPVRFAIDRAGLVGADGPTHAGSFDITYLSTLPNFVVMAASDESELIKMINTSVKINDRPSAFRYPRGNGIGIELPNEDEKLIIGKGRFIKEGKRVALVNFGARLQECLTVEKNLSKKGIFPTVFDARFAKPLDENSLWQIATNHEVVITIEEGSIGGFGSHVNHFLNEKNLLDKETKFRSMILPDLFINHDKPENMYKVAGLDSISIENKIIDTLNSKVVLKKTN

SEQ ID NO: 111843 - protein, 503 aa, Unknown
  Bacterial polypetide isolated from the Sargasso Sea
KDNSRVICVVGDGALSAGLAFEGLNNAGAQKKGLIVILNDNKMSIDKPVGAMSTYLTKLLSSKSYSSLRNIIKKISKTFPKNITETLYRTEEYSKGLISGGTLFEELGFYYLGPIDGHNINNLVNVLENIKDNKFDKPVFLHCITKKGKGYSPAEKSEDKFHGVEKFDINTGNSVNKTNLKSYSNVFGEKLVKLAENDEKIVAITAAMMSGTGLKLFQKKFEKRFFDVGIAEQHAVTMAAGLATEGFKPFVAIYSTFLQRAYDQIVHDVAIQKLPVRFAIDRAGLVGSDGPTHAGSFDITYLATLPNFIIMAPSNQRELSKMIELSSDINDTPSAFRFPRGTGSDELFNNQPTDIDIGKGYILVEGNDIAILNLGTRLEKCIEASKFLNQNNIYPTIADARFAKPLDTQLIDNLLNNHKYILTIEEGSIGGFSSHFLHYVHNIRSKNDNVVIKNLIFPDRFVEHMTPDEQYQDIKMDTESIIKKINSFYENKIIDIKNFKLKF

SEQ ID NO: 111844 - protein, 646 aa, Unknown
  Bacterial polypetide isolated from the Sargasso Sea
MRARLISYNGTTMYDLLKTIDDPADLRRLDRRQLQPLADELRAFVLDSVSKTGGHLSSNLGTVELTIALHYVFNTPNDRIVWDVGHQTYPHKILTGRRDQMHSLRQQDGISGFPRRSESEYDTFGTAHSSTSISAALGMAIGSQLNGDDRFSIAVIGDGAMTAGMAFEAMNNAGVSEDAKVLVILNDNDMSISPPVGALNRHLARLMSGRFYAAARAGVERVLSVAPPVLELARKLEEHAKGMVVPATLFEEFGFNYIGPIDGHDLDSLIPTLQNIRELRGPQFLHVVTKKGQGYKLAEADPVLYHGPGKFNPAEGIKPSATPAKKTYTQVFGEWLCDEAERDTRVVGITPAMREGSGMVEFEKRFKDRYYDVGIAEQHAVTFAGGMATEGLKPVVAIYSTFLQRAYDQLIHDVALQNLPVVFAIDRAGLVGADGATHAGAYDLAFMRCIPNMTIMAASDENECRQMLHTALQQPNPTAVRYPRGAGTGVPTVKEFTEIPLGKGEVRRQTSQPEGKRVAILAFGTMVAPSLAAAEELDATVANMRFVKPIDAALVRELAETHDYVVTVEEGCVMGGAGSACVEALMESGVIRPVLQLGLPDLFIDHGDPAKLLSQCGLDGAGIAKSIRERFLNPAADVAGQAKRVA

SEQ ID NO: 111845 - protein, 221 aa, Unknown
  Bacterial polypetide isolated from the Sargasso Sea
AYDQLIHDVALQNLNVTFAIDRAGLVGEDGPTHSGNFDIAYLQCIPNMVIASPSNENEARKLLSSVYEYDGPAAVRYPRGQGPGEEIDRDLETVKIGKANLLKKGSSKLIMLNFGSLLNHAKEIAKKYDMTLIDMRFIKPFDEGILKKYSNAKWFITIEDGSLIGGIGSTIANWVTEQNFKIQVKCFGIPDKFIEHMSREQMIKEAKLDYESITKELDKIF

SEQ ID NO: 111846 - protein, 474 aa, Unknown
  Bacterial polypetide isolated from the Sargasso Sea
MAFEALNHAGAQRSNLLVILNDNNMSISPNVGALSNRFAQLLSGEFYSSVRKSGKKVLSNMPAALEMAKRAEEHVKGLIVPGTLFEELGFNYIGPVDGHDLPVLLSTLKNIKKLEGPQFLHVITKKGKGYAPAEDDPIKYHGVTPFDPTKGIVSSKTLSMPTYSKIFGDWACDMAKLDQRFIAITPAMREGSGLVRFEKEHPDKYFDVAIAEQHSVTVAAGMACDGLKPVVAIYSTFLQRAYDQLIHDVAIQNLPVLFAIDRAGCVGADGPTHNGAYDLSFMRCLPNIVLMTPSNENECRQMLYTGFKLDQPTAVRYPRGTGCGVKVIRKMTSIPIGKSEIRCKGKNIAILAFGTMVDTCVRIGEEIEATVVNMRFVKPIDESVILNMCDQHDLIITVEENVVHGGAGSAVNEVIAAYGIKKKIINHGLPDRLIQHGTRDDMLRDARLDYQGILDFIMEQISEPAQKKKELTSF

SEQ ID NO: 111847 - protein, 215 aa, Unknown
  Bacterial polypetide isolated from the Sargasso Sea
MTKLLDKINYPSDLRKFDKKHLKQISEELRTELIDVVSETGGHLGAGLGVIELTVALHYVFNTPKDKLVWDVSHQCYPHKIITGRKKDIRTLRKGGGLSGFTKREESEYDPFGAAHSSTSISSTLGMSVAKKLSNDKNNVIAVIGDGAMSAGMAYEAMNNAGALKSKLIVILNDNKMSIAKPVGAMSKYLAKLLSGKIYFSLRETIKLITSAFQK

SEQ ID NO: 111848 - protein, 94 aa, Unknown
  Bacterial polypetide isolated from the Sargasso Sea
MKKNYQFLNDINFPSDLRKVSEDSLQKVADEVREEMISAVSETGGHLGAGLGVVELTVALHYVFDTPNDKLIWDVGHQSYPHKILTGRKDKIRT

SEQ ID NO: 111849 - protein, 319 aa, Unknown
  Bacterial polypetide isolated from the Sargasso Sea
QLGKIKPLDLIDQKNGPKFQDVFGQWIVDMAKQNEDLIAITPAMREGSGLVKFSKEFPERFYDVAIAEQHSVTLAAGMACEEKKPVVAIYSTFLQRAYDQLIHDVALQNLDVLFAIDRAGLVGEDGPTHSGNYDLAYLRCIPNMIIAVPADENEARMLLTTTFNHNGPAAVRYPRGGGINAVINLELNSVEIGKGRVINSLDSDLLVLNFGTLIATSEEVAKELNASLLDMRFVKPLDKELIAEYSKGKKAIITIEDGAMTGGAGSAVSEWAQENKISAQIIICGIPDEFIDHSSREEMIEAVGLDKDGILAKVRDFLS

SEQ ID NO: 111850 - protein, 397 aa, Unknown
  Bacterial polypetide isolated from the Sargasso Sea
MKVFKDFPTERPVTSFLDDIESPEDLKKLTIDELEVLADELREYLLYSVRQTGGHFGAGLGAIEITIALHYLLDMPSDKIVWDTGHQAYPHKILTGRRDKMHLMRKIDGLAAFPSIKESEFDAMSVGHSSTSISAALGMDEASKHQKNNKNIFSVIGDGAMTAGIAFEAMMHAGHLNNNLKIILNDNDMSISKNKGGLSDYLAKIWASKSYKKLKSSGKKVLKNLPYGLHITRNLKDGIKSAVMPGNLFEDLGLHYVGPIDGHDIPLLIKTINRMMEKNEPYLLHVITKKGAGFEPAENERIKFHAISKIENTPAPKKTKFQDIFGDWLCYKAKQDSKLVGITPAMKEGSGMVNFEREFPERFYDVAIAEQHAVTFSAGMSLEGMKPVVAIYSTFLQ

SEQ ID NO: 111851 - protein, 321 aa, Unknown
  Bacterial polypetide isolated from the Sargasso Sea
MSKTKFLNKINFPTDLKQLDHSELKILKDELREEMINAVSETGGHLGAGLGVVELTVALHYVFDTPKDKIIWDVGHQSYPHKILTGRKDKIKTLRQGNGLSGFTKRSESEFDPFGAAHSSTSISAGLGIATANKLSNKSEEVVAVIGDGAMSAGMAYEAMNNAGASKTKMIVILNDNDMSIAKPVGAMKSYLAKIFSGKIYFNFRETLKLIFSSFSKRFSKKAGAAEDFLRSVVTGGTLFNALGFYYIGPIDGHDLDVLLPVLKNAKESKHKGPILIHIKTQKGKGYSFAEKSEDKYHGVSKFNIKTGIQQKSAYKSAILH

SEQ ID NO: 111852 - protein, 612 aa, Unknown
  Bacterial polypetide isolated from the Sargasso Sea
RILADEVREEMIDAVSETGGHLGAGLGVVELTVALHYIFNTPNDKLIWDVGHQTYPHKILTGRKDRIRTLRKGKGLSGFTKRNESEYDPFGAAHSSTSISSALGIAVANKLSNKSDNVIAVIGDGAMSAGMAYEAMNNAGTSKTKMIVILNDNDMSIAKPVGAMRSYLAKILSGKMYFSLRETFKLIISAFSKRFSKKAGKAEDFLRSAVTGGTLFNSLGFYYIGPIDGHDMDSLVSVLKNVKEVNYNGPVLVHLKTEKGKGYKFAERSEDKYHGVSKFNVNTGVQEKSSSNIPSYTKVFAITLVKHAEKDSKIIGITAAMPSGTGMDIFGEKFPSRTFDVGIAEQHAVTFAAGLATEGYKPFAAIYSTFLQRAYDQVVHDVAIQSLPVRFAIDRAGLVGADGPTHAGSFDVTYLATLPNFIVMAASDEAELVRMVNTSVDINDRPSAFRYPRGNGIGIDLPSITEKLEIGKGRVITEGKKVAILNFGARLNECLIAKENLSKKGIKLTIVDARFAKPLDQNLIWQLATDHEILISIEEGSVGGFGSHVGQFLSDKNLLDNNLKYRSMILPDRFIDHDKPDLMYKYAGLDADSIENKILDTLNSKIIIKKTN

SEQ ID NO: 111853 - protein, 385 aa, Unknown
  Bacterial polypetide isolated from the Sargasso Sea
DVVSLVKILENLKNGTHDKPVLLHVVTEKGKGHPFSKGSHEKYHAVSEFNIITGDTVKSSSNAPTYTNVFSDTLCKIAEKDEKILAITAAMPSGTGLNKFAEKFKDRFYDVGIAEQHAVTFAAGMAVEGLKPFVVIYSTFLQRAYDQVIHDVVIQKLPVKFMLDRAGFVGADGATHAGSFDLAYLCCLPNVVVMAPSNEAELANMVLTASNYSEGPIFCRYPRGEGEGVDIPKYLNNIEIGKGRIIQRGNDLAILALGTRVGVALKVADNLIADGCSITVADARFAKPIDTNLLQKLWDEHQKLIIIEEGAVGGFGSHCLHFLSSSGALNSSDKEIRCLTMPDNFEDHASQKEQLANAGLDSDGLLNTIRQMLSISNSNDDFIIR

SEQ ID NO: 111854 - protein, 434 aa, Unknown
  Bacterial polypetide isolated from the Sargasso Sea
LAVYQITFQEYGASKTYKGIKKSGSSFLKPLPQAYHLARKVETQMKAMVAPGTIFEELGLNYIGPIDGHNLKELKDVISNLKEFEGPQFLHVITKKGAGLDSAEADRIGFHAIGKINAIGKINAIKDKKIKQKKYQDIFGEWIIDMANISDDLIGITPAMREGSGLVEFSKKFPDRYFDVAIAEQHSVTFAAGLSVEKKKPVVAIYSTFLQRAYDQLIHDVAVQNLDVTFALDRSGLVGEDGPTHSGNYDIAYLRCIPNMVICAPSDENETRKLLTTAYLHNGPASVRYPRGMGPNRNVDKDLKPLKIGEANIINEESSEIVILNFGTLLNEANQISKELKATLVDMRFVKPLDEKLLKKLFIKAEVFISIEDGSIMGGAGSAVQEFASKENLNIRSILFGIPDKFIEHASREEMLVEAGLDVENIKSKLSKLL

SEQ ID NO: 111855 - protein, 284 aa, Unknown
  Bacterial polypetide isolated from the Sargasso Sea
FPDRTFDVGIAEQHALTFAAGLATEGYKPYAAIYSTFLQRAYDQVVHDVALQSLPVRFAIDRAGLVGADGPTHAGSFDITYLSTLPNFVVMAASDEAELVKMINTSVEINDRPSAFRYPRGNGIGVELPSIKEKLVIGKARIIKEGRKVALLNFGTRLEECKKASKQLSLKGIDCTIIDARFAKPLDEKLIMEVATNHEVLITLEEGSIGGFGSHVMQLLSERGVFDTGLKFRSMILPDIFIDQDTPDKMYEVAGLDSLSIIKKVEETLNSNVILAKNKNKIPS

SEQ ID NO: 111856 - protein, 642 aa, Unknown
  Bacterial polypetide isolated from the Sargasso Sea
MQLKILPKMKSPDDLRKLDSEQLLKLADELRHFTIETVTEIGGHLAPTLGVIELTIALHKVFNTPKDKIIWDVGHQGYAHKILTGRLDKFNTIRRMGGLSGFLKISESEYDTFGAGHASTSISAATGIAEARKHNNKDFRVVSVIGDGSMTGGLAFEAMNNAGHLKTPMLIILNDNEMSISPNVGALNTYLTKIVTNPVYNQIRNEIWDIAGKITFGKKSIQNFLRRVEESLKSFLVPGMLFEELGFRYFGPIDGHNLPELISTLDRIKDLKTPALLHILTKKGKGMVSTNTENNDYYLDAVKFHAVKPNGRIKSNIENNNPAPIKAPIFQDVFGSIVCEIARNRKDTVCITAAMREGTGLVPYAKEFKDRYYDVGIAEGHGVTFAAGLATQNVRPIVAIYSTFLQRAYDHIIHDAAIQHLPVVFCMDRSGIAGEDGPTHHGALDIAYLKCIQGMIVTAPKDGNELRHLLYTALDYSDGPFSIRYPKASSESFDEKGQAELLPIGSWEVCRKSDGNTVILAVGPQVFDGIRAAENLSQKGIECEVVNCRFIKPMDIGYLQSISDRFDQVIIIEEGVKTGSFGESVAAWLATKRFKGIIKTISLPDEFVEHGPRDLLLEKWGVNQKGIEEVILNENKTVKLQY

SEQ ID NO: 111857 - protein, 446 aa, Unknown
  Bacterial polypetide isolated from the Sargasso Sea
MSNNYKFLNDVNFPSDIRKLSQSEIKVLADEVRKELIDVVSETGGHLGAGLGVVELTVVLHYIFNTPHDKLIWDVGHQTYPHKILTGRKNKIRTLRKGKGLSGFTKRAESEYDPFGAAHSSTSISSALGIAVANKLSNKSDNVVRVIGDGAISAGMAYEAMNNAGESKTKMIVVLNDNDMSIAKPVGAMRKYLAKILSGKIYFSFRETLKLIISAFSKRFKNKAGKAEDFLRSAVTGGTLFNSMGFYYIGPIDGHDIDTMVSVFKNAKEINYDGPILVHVKTEKGKGYKFAEKSEDKFHGVSKFNVKTGEQIKSSSNAPSYTKVFANSLIKHAEKDSKIVGITAAMPSGTGMDLFGKKFPNRMFDVGIAEQHAVTFAAGMATEGFKPYAAIYSTFLQRAYDQVIHDVAIQSLPVRFAIDRAGLVGADGPTHAGSFDITYLSTLPNL

SEQ ID NO: 111858 - protein, 292 aa, Unknown
  Bacterial polypetide isolated from the Sargasso Sea
CHQVPDLIYFGKKFPSRMFDVGIAEQHAVTFAAGLATEGFKPYAAIYSTFLQRAYDQVVHDVAIQNLPVRFAIDRAGLVGADGPTHAGSFDITYLSTLPNFVVMAASDEAELVRMINTSVDINDKPSAFRYPRGTGVGVELPNIDQKLEIGKGKIVLEGKGLAILSFGARLNECLKAAENLKKKGINITLIDARFAKPLDENLIWQIANNHESIITIEEGSIGGFGSHVSNFLSQKNLLDNNLKFRSMIFPDKFIEHDKPEKMYNVAELNSASIEQKILDTINSNIVLQKQK

SEQ ID NO: 111859 - protein, 402 aa, Unknown
  Bacterial polypetide isolated from the Sargasso Sea
MTVALHYVFDTPNDRLIWDVGHQAYPHKILTGRKQKIDTLRQGNGLSGFTKRSESEYDPFGAAHSSTSISSALGMAEANKLENKSSNVIAVIGDGAISAGMAYEAMNNAGASKTKMIVILNDNDMSIAKPVGAMRTYLAKLFTGKIYFSLRETLKLITSAFSKRFSAKAGKAEDFFRSAVTGGTLFSSLGFYYAGPVDGHDLSTLVPILRNARDSKHEGPIMIHIKTQKGKGYSYAEKASDHYHGVSKFNVETGEQQKSGSNLPAYTKVFANTLVKHAKKDSKIVGITAAMPGGTGMDIFGKEFPKRMFDVGIAEQHAVTFAAGLATEGYKPYAAIYSTFLQRAYDQVVHDVAIQSLPVRFAIDRAGLVGADGSTHAGSFDITYLSTLPNFIVMAASDEAEL

SEQ ID NO: 111860 - protein, 544 aa, Unknown
  Bacterial polypetide isolated from the Sargasso Sea
MSKATKQDYKFLNNIDTPKDIKKLTSNELEILCEEVRSFMIDNVSKTGGHLGAGLGVVELTVGLHYIFNTPKDQIIWDVGHQTYPHKILTKRKNRMHTLRQGKGLSGFTKRAESIYDPFGAAHASTSISAALGILVGSEIRKKNKKVVAVIGDGAMTAGMAYEALNNAGAMKYPLIVILNDNDMSIAPPVGAMSAYLSKLISSGQYRGLRNVASQLVKKFPKKIAITAKKAEEYARGFFTGGTLFEELGFYYIGPIDGHNLSHLLPILKNARDHSKKGPVLIHVVTKKGNGYIPAEKSDDKFHGVGKFNVLTGKQNKSESNKSYTKIFAENLIELAKTDKKICAITAAMPTGTGLDLFMKKFPSRTFDVGIAEQHAVTFAAGLACEGMKPFATIYSTFLQRAYDQVVHDVAIQNLPVRFAIDRAGLVGADGATHAGSFDIAFLSNLPNFITMAASDDLELARMVHTCADINHAPSAFRYPRGSGLGLKINYPVKKLIIGKGKIVQEGNDIAIISYGARLQEVKLAAKKLESYKVSTTIADARFC

SEQ ID NO: 111861 - protein, 367 aa, Unknown
  Bacterial polypetide isolated from the Sargasso Sea
NFPDDLKNLTYEQLIQLGDEIRNRLIDITNTVGGHLASNLGVVEITLAMHTLFNSPTDKFLWDTSHQTYVHKMLTGRLNDMYTIKQYKGLSGFAKIAESDHDTFGAGHASTSLSAAIGLAQARNARNETHNVICILGDGGLSGGMAYEALNNIKELKGNFICILNDNDMSISPPVGAMANYITSIRTTTVYDQVKNKFERILNRVPKIGTPLKRRIEKTVERMRSTLLDVKAGVLFEEFGFKYLGPIDGHNLTAVMAALRYAKTYDGPIMLHMNTTKGKGMSVAEKNPVKYHGVSKQADPSKPTPKKRPTYTQCFGSEIINIAKENESIHVITPAMREGSGLVEYEQQFPTRYYDVGIAEEHAITFA

SEQ ID NO: 111862 - protein, 559 aa, Unknown
  Bacterial polypetide isolated from the Sargasso Sea
MKKNYQFLNDINFPSDLRKVSENNLQKVADEVREEMIDAVSETGGHLGAGLGVVELTVALHYVFDTPNDKLIWDVGHQSYPHKILTGRKDKIRTLRQGDGLSGFTKRSESEYDPFGAAHSSTSISSALGIAEANKLENKSSNVIAVIGDGAISAGMAYEAMNNAGASKTKMIVILNDNDMSIAKPVGAMRTYLAKLFTGKIYFSLRETLKLITSAFSKRFSAKAGKAEDFFRSAVTGGTLFSSLGFYYAGPIDGHDLSSLVPILKNAKDSRHEGPIMIHIKTQKGKGYSYAEKANDHYHGVSKFNVETGEQLKSKSNLPAYTKVFANTLVKHAKKDSKIVGITAAMPGGTGMDIFGKEFPSRMFDVGIAEQHAVTFAAGLATEGYKPYAAIYSTFLQRAYDQVVHDVAIQCLPVRFAIDRAGLVGADGSTHAGSFDITYLSTLPNFVVMAASDEAELVKMINTSVDINDRPSAIRYPRGTGVGVDLPSIDEKIEIGKGRIVQQGTQVCILNLGTRLEECKLAAEELKAKGVSTTLIDARFAKPLDEELVLKSAKQHELM

SEQ ID NO: 111863 - protein, 415 aa, Unknown
  Bacterial polypetide isolated from the Sargasso Sea
LGMAVASQEESEKKNVAIIGDGAMTAGMAFEALSHTGHIKPNVLIILNDNDMSISENVGGLSNYFSRIWASKTYKGIKKSGASFLKPLPQAYHLARKVETQMKAMVAPGTIFEELGLNYIGPIDGHNIKELHDVISNLIEFEGPQFLHVITKKGAGLDPAEADRIGFHAIGKINSIKQKSSKAKKYQDIFSDWINDMAAIDKDLIAITPAMREGSGLVTFSKNYPDRYYDVAIAEQHAVTFGAGLAIGGKKPVVAIYSTFLQRAYDQVIHDVAVQNLNVTFALDRSGLVGEDGPTHSGNYDIAYLRCIPNMIICTPADENETRLMLSTGFNYKGPASIRYPRGVGPNVKVDKKLDTVEIGKARVINEAGKDKVILNFGSLLHLAREISEKFKFTLIDMRFVKPLDEQILNQYLKK

SEQ ID NO: 111864 - protein, 151 aa, Unknown
  Bacterial polypetide isolated from the Sargasso Sea
MQLKYLKNIQTPKDIRDYNIEQLRELCDEIRNYTIDTVTAVGGHLAPTLGAIELTVALHYVFNTPKDKLIWDVGHQAYAHKILTGRFDSMNTIRQFGGLSGFLKRTESEYDVFGAGHASTSISAALGVAAARDQNNQDFKVSAIIGDGSLT

SEQ ID NO: 111865 - protein, 365 aa, Unknown
  Bacterial polypetide isolated from the Sargasso Sea
MSKQDILDRVNFPSDLRKLTDNDLNHLANELRQETISIVSKTGGHLGSSLGVIELTIAIHSVFNTPFDKLIWDVSHQCYPHKILTGRRKGMMTLRQDKGLSGFTKRTESEYDPFGAAHSSTSISAALGFTVARDLGSSVGDSIAVIGDGSISAGMAYEGLNNAGSEGRRLFVILNDNEMSIAPPAGAMSKYLSSLYANNEFYSLTKLAEGLAKNLPGPLQEGARRAKSIITGLASGGTFFEELGFSYLGPIDGHDLNQLLPVLRAVKTRAKGPILIHCVTKKGKGYYPAENSADKYHGVSKFDISSGEQSKSKPNAPSYTSVFGKALVSEASRDHRIVAVTAAMPSGTGVNLMQKEYPQRTFDVG

SEQ ID NO: 111866 - protein, 423 aa, Unknown
  Bacterial polypetide isolated from the Sargasso Sea
SFFKRFSAKAGKAEDLLRSAVTGGTLFSSLGFYYIGPIDGHDLNSLIPILKNARDSKHEGPILIHIKSKKGKGYTFAEAAKDNYHGVSKFNVKTGEQLKSTSKLPSYTKVFANTLIQHAKKDSKIVAITAAMPDGTGLDIFRKEFPDRTFDVGIAEQHAVTFAAGLATENFKPYAAIYSTFLQRAYDQVVHDVAIQSLPVRFAIDRAGLVGADGPTHAGSFDTTYLTTLPNFIVMAASDEAELVRMINTSTEINDRPCAFRYPRGTGLGSILPSINEKIEIGKSKIIKEGKKLAILNFGARLNETLKAAENLLKKGVPITVVDARFAKPLDENLIWQLATTHEAIMTIEEGSIGGFGSHVVNFLTKKGLMDSNLKFRSLTLPDIFIDQDTPDKMYKVANLDSVSIEEKVLDLLNSNIVLKKQN

SEQ ID NO: 111867 - protein, 265 aa, Unknown
  Bacterial polypetide isolated from the Sargasso Sea
SRKFPDRYFDVAIAEQHAVTFAAGLAIGGYKPVVAIYSTFLQRAYDQVLHDVAIQKLPVLFAVDRAGIVGADGQTHQGAFDLSFLRCIPEMVIMTPSDENECRQMLFTGYHYNDGPTVVRYPRGNAVGVELTPLEQLPIGKGIVKRHGEKVAILNFGTLMPEAAQVAESMNATLVDMRFVKPLDETLILEMAAQHEVLVTIEENAIMGGAGSGVNEVLMAHRKPVPVLNIGLPDFFIPQGTQDEARADLGLNAVGIEAKIKAWLA

SEQ ID NO: 111868 - protein, 551 aa, Unknown
  Bacterial polypetide isolated from the Sargasso Sea
RKSKIRTLRQGNGLSGFTKRSESEYDPFGAAHSSTSISSALGIAEANKLANKSSNVIAVIGDGAISAGMAYEAMNNAGASKTKMIVILNDNDMSIAKPVGAMRTYLAKLFTGKIYFSLRETIKLITSAFSKRFSAKAGKAEDFLRSAVTGGTLFSSLGFYYVGPIDGYDLNTLIPILKNARDSKHEGPIMIHIKTQKGKGYSYAEKASDHYHGVSKFNVDTGEQLKSGSNVPAYTKVFANTLVKHAQKDSKIVGITAAMPGGTGMDIFGKEFPKRMFDVGIAEQHAVTFAAGLATEGYKPYAAIYSTFLQRAYDQVVHDVAIQSLPVRFAIDRAGLVGADGSTHAGSFDITYLSTLPNFIVMAASDEAELVKMINTSIDINNKPCAIRYPRGTGIGVELPSIDEKIEIGKGRIIQEGKQVCILSLGTRLEECKLAAEELKNKGVLTTIIDARFAKPLDEELILKCAREHDVMITIEEGSIGGFASHVKNLLAEKGVFDKGLKFRSMTLPDTFIEQDNPKKMYDLAGLNSSQISKKILDILFTKESIKIIKN

SEQ ID NO: 111869 - protein, 486 aa, Unknown
  Bacterial polypetide isolated from the Sargasso Sea
MKKNYKFLNNINFPSDIKKLSQNELKTLAHEVREEMIDAVSETGGHLGAGLGVVELTVVLHYIFNTPNDKLIWDVGHQSYPHKILTGRKDKIRTLRKGNGLSGFTKRAESEYDPFGAAHSSTSISSALGIAIANKLSNKSDNVIAVIGDGAISAGMAYEAMNNAGSSKTKLIVILNDNDMSIAKPVGAMRAYLAKIFTGKIYFSLRETVKLIISAFSKRFSKKAGKAEDFLRSAVTGGTLFSSMGFYYVGPIDGHDIDALVSVLKNAKDVNYEGPIMIHIKTQKGKGYSFAEKSEDKYHGVTKFNVSTGIQEKSKSNAPSYTKVFANTLVKHAEKDSKIIGITAAMPSGTGMDIFGKKFPSRMFDVGIAEQHAVTFAAGLATEGFKPYAAIYSTFLQRAYDQVVHDVAIQSLPVRFAIDRAGLVGADGPTHAGSFDITYLSTLPNFVVMAASDESELVKMINTSIDINDRPSAFRYPRGNGIGIEL

SEQ ID NO: 111870 - protein, 466 aa, Unknown
  Bacterial polypetide isolated from the Sargasso Sea
EIGGHLAPTLGVIELTTALHYVYNTPEDKLVWDVGHQAYAHKLLTGRYEEFPSIRQYGGLSGFLKRSESEYDVFGAGHASTAISAALGVAEARYQKKDKHRAVAIIGDGAMTGGLAFEAINNAGHLGRQITVILNDNEMSISPNVGAISKYFTRLIANPTYNRLKTEAWELTKKLPLARGTIQAFLSRLDKSIKNIIVPGMLFEEMGFRYFGPIDGHDLDELIKTLDTIKDIEKPVLLHVITKKGKGMSVAEDNPVKYHGVKANGKSNGSTKKLIKQSEVPSFQDAFGYLSCEIAENRKDTVCITAAMREGTGLVPFEKKFPERYYDVGIAEGHAVTFSAGLATQGIRPIVAIYSTFLQRAFDHIVHDVSVQNLPVIFCMDRSGIAGEDGPTHHGALDIPYFRCIQGIVLTAPKNGNELRNLLYTALNHNGPFGIRYPKFSSIEFDRNGQADLLPIGSWEVEKKGG

SEQ ID NO: 111871 - protein, 277 aa, Unknown
  Bacterial polypetide isolated from the Sargasso Sea
MSKLLDIVDSPQDLKNLPVDKLPDLAREIRDMLLDTISKTGGHLSSNLGVVELTMAMHYVFNSPKDKFVWDVGHQSYVHKLLTGRKDRFGTLRQYDGLCGFTRREESEHDHWNCGHGGTSISAALAFAKARDLKNEDHDVLAVIGDGSLTAGMAFEGLNHTGHVQSDMIVVLNDNEMSISANVGGMSAHLSKIMTGQVMLKIKQEIDQLLLSVPGIGKDISRYAHKIDEAIKGVFIPGRLFEDLGFRYVGPIDGHDVKGLIDTFAAVKDLKGPTLMH

SEQ ID NO: 111872 - protein, 556 aa, Unknown
  Bacterial polypetide isolated from the Sargasso Sea
MKKEYEFLNQINFPSDLKKIPESKLQKVADELREEMIDAVSVTGGHLGASLGVVELSVALHFIFNTPHDKLIWDVGHQCYPHKILTGRKDKIRTLRQGGGLSGFTKRLESEYDPFGAAHSSTSISSALGIAEANRLSNKSDNVIAVIGDGAISAGMAYEAMNNAGASKTKMIVILNDNDMSIARPVGAMGTYLAKIFSGKIYFSLRETIKLITSAFSKRFSAKAGKAEDLLRSAVTGGTLFSSLGFYYIGPIDGHDLSSLVPILRNAKDSKHEGPILIHIKTKKGKGYSFAEQAKDNYHGVSKFNVKTGEQIKSINKTPSYTKVFADTLIQHAKKDSKIVAITAAMPDGTGLNSFRKEFPERTFDVGIAEQHAVTFAAGLATENFKPYAAIYSTFLQRAYDQVVHDVAIQSLPVRFAIDRAGLVGADGPTHAGSFDITYLSTLPNFVVMAASDEAELVRMINISTEINDRPCAFRYPRGIGLGSVLPSINEKIEIGKSKVIKEGKKLAILNFGARLNETLKAAENLKKKGIDITIVDARFVKPLDENLIWQLATTT

SEQ ID NO: 111873 - protein, 502 aa, Unknown
  Bacterial polypetide isolated from the Sargasso Sea
FGAGHSSTSISSAVGMAIANKLNEGEKKTVAIIGDGAMTAGMAFEAMQHAGGIKPDMLIILNDNDMSISENVGGLNNYFSRIWASKLYKGIKSNGKKFLKNIPAAHHLARTVETHMKTMVAPGAIFEELGLNYIGPIDGHDIDQLLNVIGNLKNFEGPQFLHIITKKGAGYDLAEEDRIKYHAISKTQTPKSTEKIKPKYQDIFSNWIVDMAKENIDLVGVTPAMREGSGLVQFSKEYPERYFDVAIAEQHAVTLSAGLACEKKKPVVAIYSTFLQRAYDQVIHDVALQNLDVTFAIDRAGLVGEDGPTHSGNYDLVYLRCIPNMIVMTPSDENETRKLLTTGFLYDGPASIRYPRGTGPNIEVEDNLVPVEIGKGRLIREGSKDLIILNFGALLDQAKEVADFLNFTLIDMRFVKPLDEDILKKYLLEAKLFVSIEDGSIAGGAGSAVQEFCSNNNINIRSKLFGIPDIFIEHQSRDEMIEECGLNASRIIEQIQELESQE

SEQ ID NO: 111874 - protein, 87 aa, Unknown
  Bacterial polypetide isolated from the Sargasso Sea
MIHKSTFLKDINFPSDLRKISEKDLPKVVNEVRNEMIDAVSQTGGHLGAGLGVVELTVALHYVFDTPNDKLIWDVGHQSYPHKIFNR

SEQ ID NO: 111875 - protein, 430 aa, Unknown
  Bacterial polypetide isolated from the Sargasso Sea
SALGIAIANKLSIKTDNVIAVIGDGAISAGMAYEAMNNAGASKTKMIVVLNDNDMSIAKPVGAMRKYLAKILSGKIYFNFRETIKLIISAFSKRFSKKAGKAEDFLRSAVTGGTLFNSMGFHYIGPIDGHDTDTLVSVLKNAKEIKYEGPILVHIKTEKGKGYKFAEKSKDKYHGVSKFNINTGIQEKSKSNIPSYTKVFANTLVKHAEKDSKIIGVTAAMPSGTGMDIFAEKFPSRMFDVGIAEQHAVTFAAGLATEGFKPFAAIYSTFLQRAYDQVVHDVAIQSLPVRFAIDRAGLVGADGPTHAGSFDITYLSTLPNFVVMAASDEADLVRMINTAVDINDKPSAFRYPRGNGIGVDLPNINEKIEIGKARVISEGKKVALLNFGGRLNECLIAKESLVKKGINITLIDARFAKPLDENLMWQISTD

SEQ ID NO: 111876 - protein, 380 aa, Unknown
  Bacterial polypetide isolated from the Sargasso Sea
MQNYKYLNNINFPSDIKKLNNEELKVLSEEVRSEMIDAVSKTGGHLGAGLGVVELTVALHYVFDTPRDKLIWDVGHQSYPHKILTGRKDKIRTLRQGNGLSGFTKRSESEFDPFGAAHSSTSISAGLGIATANKLSNKSDQVIAVIGDGAMSAGMAYEAMNNAGDSKTKMIVILNDNDMSIAKPVGAMKSYLAKIFSGKIYFSFRETVRMIISSFSKRFSKKAGKAEDFLRSAVTGGTLFNSLGFYYVGPIDGHDLDVLLPILKNAKESNHNGPILIHIKTQKGKGYSFAEKSDDKYHGVTKFDVQTGVQQKSTTKAPAFTKVFANTLIEHAKKDSKIVGITAAMPSGTGMDAFSKIFSDRTFDVGIAEQHAVTFAAGFS

SEQ ID NO: 111877 - protein, 478 aa, Unknown
  Bacterial polypetide isolated from the Sargasso Sea
MKKYKFLDNVNFPSDIKNLKSSELITLSKELREELIEAVSFTGGHLGAGLGVVELTVALHHVFDTPNDKIVWDVGHQSYPHKILTGRKNRIKTLRQGNGLSGFTKRSESEYDPFGAAHSSTSISAALGIATANKLSKKSENVVAVIGDGAISAGMAYEAMNNAGISKTKMIVILNDNDMSIAEPVGAMRSYLAKLLTGKIYFSLRETFKLIISAFSKRFSKKAGKAEDFLRSAVTGGTLFNSLGFYYVGPIDGHDIDTLISVLKNAKDTNFDGPIMIHIKTEKGKGYQFAENSKDKYHGVSKFNIKTGVQEKSNSKIPSYTSVFANTLIKHAERDSKIIGITAAMPSGTGMDLFAKKFPNRMFDVGIAEQHAVTFSAGLATEGFKPYAAIYSTFLQRAYDQVVHDVAIQSLPVRFAIDRAGLVGADGPTHAGSFDITYLSTLPNFVVMAPSDESELVKMINTSDDINDKPSAFRYPRG

SEQ ID NO: 111878 - protein, 397 aa, Unknown
  Bacterial polypetide isolated from the Sargasso Sea
LGMAVARDMQGKSNHVVAVIGDGAITGGMAYEAMNNAGYLDTNMIIILNDNQQVSLPTQYNSLNQDPVGALSSTFARLQSSKPLRELRESAKAITKQMPVPVQEVTAKVDEYARGMISGSGSTLFEELGLYYIGTVDGHNLKDLVAILQEVKATRSVGPVLIHIVTEKGRGYSYAESAQDKYHGVAKFDVASGKQKKASGGIPTYTQVFADALIGEARRDENVVAVHAAMGGGTGLNHFEKYYADRTFDVGIAEQHAVTFAAGLAVEGLKPMCTIYSTFLQRGFDQVVHDVALQKLPVRFAMDRAGLVGEDGPTHAGAYDVAFMACLPDMVVMAPMNEAELCHMVATSIAIDDRPSCFRYPRGAGVGVDLELEGVELTNPGYRGRVIEIGKGRILEE

SEQ ID NO: 111879 - protein, 581 aa, Unknown
  Bacterial polypetide isolated from the Sargasso Sea
TIALHYVFDTPNDKIIWDVGHQTYPHKILTGRKDKITTLRQGNGLSGFTRRSESEYDPFGAAHSSTSISAALGIATANKLEKKTNQVVAVIGDGAISAGMAYEAMNNAGSSKTKMIVILNDNDMSIAKPVGAMSTYLAKILSGKIYFSLRETIKLIISAFSKRFSDKAKRAEDLLRSVVTGGTLFNSLGFYYVGPIDGYDLDNLISVLKNAKKLNHEGPIMIHIKTEKGKGYEFAEKSDDKYHGVTKFNVKTGIQEKSKSNVPSYTKVFAKTLIKHAEKDSKIIGITAAMPSGTGMDLFSEKFPHRMFDVGIAEQHAVTFAAGLATEGYKPYAAIYSTFLQRAYDQVVHDVAIQNLPVRFAIDRAGLVGADGPTHAGSFDITYLSTLPNFIVMAASDEAELVRMINTSVDINNNPSALRYPRGNGIGVDLPDIDERIEIGKGRLILEGKKVAIINFGARLNECLLANEMLNKKGIGITLVDARFAKPLDENLIWEIATNHEAIITIEEGSLGGFGSHVSQFLSEKKLLDNNLKFRSMILPDKFIDHNKPEIMYKEAGLDAEAIVSKVFDVLNSKVILQKQN

SEQ ID NO: 111880 - protein, 537 aa, Unknown
  Bacterial polypetide isolated from the Sargasso Sea
SGFPKRDESEYDTFGTAHSSTSISAALGMAVASKLQGENRMGIAVIGDGAMTAGMAFEAMNNAGVEDDVPLLVILNDNDMSISPPVGALNRHLARLMSGRFYAAARAGVERVLRVAPPMLDLARKLEEHAKGMIVPATLFEEFGFNYIGPIDGHDLDSLIPTLQNIKELRGPQFLHVVTKKGQGYKLAEADPVLYHGPGKFNPAEGIKPATTPSKKTYTQVFGEWLCDAAELDARVVGITPAMREGSGMVEFEKRFPDRYFDVGIAEQHAVTFAGGLAADGMKPVVAIYSTFLQRAYDQLIHDVALQNLPVVFAIDRAGLVGADGATHAGAYDLAFMRCIPNMTVMAASDENECRQMLYTALQQPNPTAVRYPRGAGTGVATVKQMTALPLGKGEIRRETSQPAGKRIAILAFGTMVAPSLAAAEQLDATVANMRFVKPLDAELVRQLAETHDAIVTVEEGCVMGGAGSACVEALLESGVMRPVLQLGLPDRFIDHGDPAKLLAACGLDATGIAKSIRERFLSSGAVAGQSSVKRVA

SEQ ID NO: 111881 - protein, 190 aa, Unknown
  Bacterial polypetide isolated from the Sargasso Sea
MRKLTDNDLNHLANELRQETISIVSKTGGHLGSSLGVIELTIAIHSVFNTPFDRLVWDVSHQCYPHKILTGRRKDMLTLRQDKGLSGFTKRTESEYDPFGAAHSSTSISAALGFTVARDLGSSVGDSIAVIGDGSISAGMAYEGLNNAGSEGRRLFVILNDNEMSIAPPAGAMSKYLSSLYANNEFYSLT

SEQ ID NO: 111882 - protein, 507 aa, Unknown
  Bacterial polypetide isolated from the Sargasso Sea
MGRLIKQINFPADLRKFKKDDLKQISEELRDELIDVVSETGGHLGAGLGVVELTIALHYVFDTPKDKLVWDVSHQCYPHKIITGRRDRIKTLRKGGGLSGFTKRTESEYDPFGAAHSSTSISSTLGMAVAKKLSNNNNNVIAVIGDGAMSAGMAYEAMNNAGALKSKLIVILNDNDMSIARPVGAMSKYLAKLLSGKLYFSFRETLKMIISSFSKRFSQKAGKAEDLLRNIVTGGTLFSELGFYYVGPIDGHDVENLVQIFENVKNSNYQGPVLIHVRTQKGKGYKPAEDSGDKYHGVSKFNVNTGEQAKSKSNIPSYTKVFAETLIKHAEQDTKIVGITGAMPSGTGINLFEKKFPDRSFDVGIAEQHAVTFAAGLATEGYKPYAAIYSTFLQRAYDQVVHDVALQSLPVRFAIDRAGLVGADGPTHAGSFDITYLSTLPNFVVMAASDEAELVKMINTSVNINDRPSAFRYPRGNGIGIELPSINETLIIGKGQVIQEGKKAVLL

SEQ ID NO: 111883 - protein, 487 aa, Unknown
  Bacterial polypetide isolated from the Sargasso Sea
MAENYKVLNEINVPADMKNLSKDQILQLSDDLRDFLIKSISKTGGHLAAGLGAVDITIALHYVYDTPKDIIVWDIGHQCYPHKILTGRKDKMSTLRKKDGISGFLKINESKYDAFGAGHSSTSISAAIGYERAAKLKNEDKKIIAVIGDGGLTAGMAFEALSHAGGIKSNLLVVLNDNEMSISPNVGAVHKYLTRILTGKTFNTIKESGKKVFSKVKAIEELAKKVENQAKGLITPGLLFEELGFKYYGPVNGHDVHGLIEVLKNLKDKDGPRILHIVTKKGKGYKLAEQNPISYHGVTPFDIKTGVVKTNKVNNKLTYTQIFSRWINEMARIHEDIVAITPAMREGSGLVEFEKNFPSRYFDVGIAEQHALTFAGGLACGGLKPIVAIYSTFLQRAYDQMIHDIMIQNLDVLLAIDRAGIVGADGETHQGIYDISFLRILPNIVLMTPSNEQELWAMLNTGFKYKGIGAVRYPRGYTKGLDLDLND

SEQ ID NO: 111884 - protein, 111 aa, Unknown
  Bacterial polypetide isolated from the Sargasso Sea
MTKLIRQINFPSDLRKFKKDQLKKISDELREELIDAVSETGGHLGAGLGVVELTVALHYVFDTPKDKLVWDVSHQCYPHKIITGRKDRIKTLRKGGGLSGFTKRSESEYDP

SEQ ID NO: 111885 - protein, 402 aa, Unknown
  Bacterial polypetide isolated from the Sargasso Sea
VPPVKELASRMEEHLKGMVIPGTFFEELGLNYIGPIDGHDVNMLVDTLRNMRNLKGPQLLHIKTQKGKGYKPAEADPIGYHGVPKFDPNTSSLPKSKPGAPTFSKVFGDWLCDMAQQDDKLMAITPAMREGSGMVRFSKEHADKYFDVAIAEQHAVTLAAGFACEGLKPVVAIYSSFLQRAYDQLIHDVALQNLPVLFAIDRAGIVGADGETHQGAYDLSFMRCIPNMVIMAPSDTNECRQMLYTGYKANCPVAVRYPRGSAGTADIQSDMQLFEIGKANTVKEGSKIAILSFGTLLENAQLAANELNATLVNMRFIKPLDTSLLNDIIKNHDVIVTLEDNAIAGGAGSAVNEYLASQQANVKILNLGIPDEFIKHGTQDEMHDEMGLGEQGILSSIRSFTA

SEQ ID NO: 111886 - protein, 304 aa, Unknown
  Bacterial polypetide isolated from the Sargasso Sea
MKIFSEIPTKKPKTLILDKVNAPADIKNLTPIELKTLADDVRAHMLFSVGQSGGHLGGGLGVVELTVVLHYLYNAPDDKIIWDVGHQAYPHKILTGRKENLTSIRQKDGLAPFPSREESPYDAFGVGHSSTSISAALGMAIANKDSDKKVVAVIGDGAMTAGMAFEALSHAGHIKPNMLIILNDNDMSISENVGGLNNYFSRIWASKVYKGIRKSGKSFLENLPQAHHIARKVETQMKAMVAPGSIFEELGLNYIGPIDGHDINELTKVIGNLKDFEGPQFLHVITKKGAGIDPAEADRIGFHA

SEQ ID NO: 111887 - protein, 333 aa, Unknown
  Bacterial polypetide isolated from the Sargasso Sea
LRAETINVVSSTGGHLGAGLGVVELTVALHYVFNTPKDHLVWDVGHQAYPHKIITGRRNKIRTLRQGGGLSGFTKRTESEYDPFGAAHAATSISAALGLSVASGFKGIENNSIAVIGDGSMTAGMAYEAMNNAGSMNRRLIVILNDNDMSIAPPVGAMSAYLSRLISSRYYRSLRHLMRDLAKKFPKRLEQAAAKSEEYARGLVTGGTMFEELGFYYIGPVDGHNLEHLLPVLKNVRDSNESGPVLVHVVTKKGGGYPPAESAADKYHGVGKFDAATGALVKAPQGPPSYTKVFAEALSAEAQTDNKIIAITGAMPSGTGLDIFAKTFPRTMF

SEQ ID NO: 111888 - protein, 269 aa, Unknown
  Bacterial polypetide isolated from the Sargasso Sea
MRKLFRERCFDVGIAEQHAVTFAAGLAAEGYKPFAAIYSTFLQRAYDSVVHDVSIQGLPVRFAIDRAGMVGADGVTHQGSFDITYLGCLPGMILMAAADEAELVHMVKTQVAIDDRPSGLRYPRGNGVGVEMPQTAEVLEIGKGRITKEGNTVALLSYGTRLADCHKAAESLDEIGLSTTVADARFAKPIDEDLVRRLAMDHEVLVTIEEGTIGGFASQITHFLAFNGLLESGLKFRPMYLPDFYIDHDTQQQQYKIAGLSAENIVDNV

SEQ ID NO: 111889 - protein, 204 aa, Unknown
  Bacterial polypetide isolated from the Sargasso Sea
MKKKYKLLDNINFPSDIKNLSQSNLKILASEVREEMIEAVSETGGHLGAGLGVVELTVALHYTFNTPNDKLVWDVGHQTYPHKILTGRKDRIRTLRKGGGLSGFTKRSESEYDPFGAAHSSTSISSALGIAIANKLSNKSDNVVAVIGDGAMSAGMAYEAINNAGASKTKMIVILNDNDMSIAKPVGAMRAYLAKILSGKIYFS

SEQ ID NO: 111890 - protein, 549 aa, Unknown
  Bacterial polypetide isolated from the Sargasso Sea
KDRIKTLRQGNGLSGFTKRSESEFDPFGAAHSSTSISAALGIATANKLSNKNDEVIAVIGDGAISAGMAYEAMNNAGDAKTKLIVILNDNNMSIAKPVGAMKSYLAKIFSGKIYFNLRETIKLIISSFSKRFSKKAGKAEDFLRSMVTGGTLFSSLGFYYIGPIDGHDLDVLLPILKNARDSRHNGPILIHLKTQKGKGYEYAEKSDDKYHGVSKFNVQTGIQEKSKSNIPAYTKVFANTLIKHAEKDSKIVGITAAMPSGTGMDIFSKKFPNRMFDVGIAEQHAVTFAAGLATEGFKPYAAIYSTFLQRAYDQVVHDVAIQSLPVRFAIDRAGLVGADGPTHAGSFDITYLSTLPNFVVMAASDEGELVKMINTSVDINDRPSAFRYPRGIGVGMNLPDITEKLVIGKGRIIREGKKVAILNFGTRLKECLIAEENLKKKGIDLTVVDARFAKPLDENLIWQIATNHEVIITIEEGAIGGFGSHVNFFLNEKNLLDNNLKFRSMILPDKFIDHNKPEEMYKDAGLDARSIELKVLEALNSKVLIKKIN

SEQ ID NO: 111891 - protein, 638 aa, Unknown
  Bacterial polypetide isolated from the Sargasso Sea
MTRLIKQINFPSDLRKFKKENLRQISDELRDELIDVVSETGGHLGAGLGVVELTVALHYVFDTPKDKLVWDVSHQCYPHKIITGRRDRIKTLRKGGGLSGFTKRSESEYDPFGAAHSSTSISSTLGMSVAKKLSNNRNNVIAVIGDGAMSAGMAYEAMNNAGALRSNLIVVLNDNDMSIARPVGAMSKYLANLLSGKLYFSFRETIKMIISAFSKRFSQKAGKAEDMLRNIVTGGTLFSELGFYYVGPIDGHDVENLVQIFENVKKSNHQGPVLIHVRTKKGKGYKPAEESGDKYHGVSKFNISTGEQSKSTSNTPSYTKVFAETLIKHAEQDTKIIGITGAMPSGTGLNLFEKKFPDRTFDVGIAEQHAVTFAAGLATEGYKPYAAIYSTFLQRAYDQVVHDVALQSLPVRFAIDRAGLVGADGPTHAGSFDITYLATLPNFVVMAASDEAELVKMINTSVDINDRPSAFRYPRGNGIGAELPSVNEKLVIGKARIIKEGKKVALLNFGTRLEECKKASEKLSLKGIDCTIVDARFAKPLDEKLIMEVATNHEVLITIEEGSIGGFGSHVMQILSDRGVFDTGLKFRSMILPDIFIDQDTPDKMYKVAGLDNLSIVKKVEETLNSNIILAKNKNKIS

SEQ ID NO: 111892 - protein, 406 aa, Unknown
  Bacterial polypetide isolated from the Sargasso Sea
MGGTLFEELGFYYLGPIDGHNVKDLVSVLENIRDNRFDKPVFLHCITKKGKGYSPAEKSEDKFHGVEKFDIDTGASLKKSNQKSYSQVFGETLTKLAENDEKIVAITAAMMSGTGLKIFRDNYNKRFFDVGIAEQHAVTMAAGMATEGFKPYVAIYSTFLQRAYDQIVHDVAIQKLPVRFAIDRAGQVGSDGPTHAGSFDLTYLSTLPNFIIMAPSNQSELIKMMKTSASIDNCPSAFRYPRGVGIINDLDGLDEIEIGKGYIDTEGDNVAILNLGTRLDNIKNACKILNNNNIYPTIADARFAKPLDTNLIDNLIENHKYLITIEEGSIGGFGSHVLNYVHNIRLKRSSVIIKNIFFPDKFIEHMKPEEQYEEMKMDVNSIVKQISRLYDNKVIDIKNFNIKDKN

SEQ ID NO: 111893 - protein, 496 aa, Unknown
  Bacterial polypetide isolated from the Sargasso Sea
SSTSLSALVGMAIGSKESNPDKKHVAVIGDGAMTAGMAFEALGHIGHLKPNVLVVLNDNDMSISENVGGLSNYFSRIWASKTYKGIKKSGASFLKPLPQAYHLARKVETQMKAMVAPGTIFEELGLNYIGPIDGHNLNQLNDVISNLKDFEGPQFLHVITKKGAGLDSAEADRIGFHAIGKINSIKDKKIKQKKYQDIFGEWIIDMAGSDESLIGITPAMREGSGLVEFSKKFPDRYFDVAIAEQHSITFAAGLSVEKKKPVVAIYSTFLQRGYDQLIHDVAVQNLDVTFALDRSGLVGEDGPTHSGNYDIAYLRCIPNMLICTPSDENETRKLLTTAYLHKGPASVRYPRGAGPNSNIVKDLKPYKIGEANVIRDKNSKVVILNFGTLLKEATEISKDLKATLVDMRFVKPLDEKILKKLFNKAEVFISIEDGSVMGGAGSAVQEFASKENLNIKSILFGIPDKFIEHASREEMLIEAGLDIESIKSKLSKVLSM

SEQ ID NO: 111894 - protein, 216 aa, Unknown
  Bacterial polypetide isolated from the Sargasso Sea
MKIFKEIPVEKPNTPLLDSVTYPSDLRSFSINELETLSNELREFLLYSVGQSGGHLGGGLGVIELTIILHHLYQTPYDNLVWDVGHQAYPHKILTGRKDKINTIRKKNGLAPFPSRLESEYDTFGVGHSSTSLSAIVGMAEANRESNPDKKHVAVIGDGAMTAGMAFEALSHIGHLKPNLLIILNDNDMSISENVGGLSNYFSRIWASKTYKGIKK

SEQ ID NO: 111895 - protein, 98 aa, Unknown
  Bacterial polypetide isolated from the Sargasso Sea
MSKLLEKINFPADLRKFKKDQLKQISDELRNELIDVVSETGGHLGAGLGVVELTVALHYVFNTPKDKLVWDVGHQCYPHKIITGRKNKIRTLRQGRGL

SEQ ID NO: 111896 - protein, 313 aa, Unknown
  Bacterial polypetide isolated from the Sargasso Sea
VLKNAKESKHKGPILIHIKTQKGKGYSFAEKSEDKYHGVSKFNIKTGIQQKSDSKVPSYTKVYANTLVKHAENDSKIIGITAAMPSGTGMDIFGNKFPNRMFDVGIAEQHAVTFAAGLATEGYKPYASIYSTFLQRAYDQVVHDVAIQSLPVRFAIDRAGLVGADGPTHAGSFDITYLATLPNFIVMAASDEAELVKMINTSVEINDKPCAFRYPRGNGTGVKLPDITDKIQIGKAKVVREGKKIAILNFGARLNECLIAEENLRKKGVNATIVDARFAKPLDENLIWQLATNHEVIITIEEGIYRWFWGTRK

SEQ ID NO: 111897 - protein, 361 aa, Unknown
  Bacterial polypetide isolated from the Sargasso Sea
MKYDFLDNIDNPSDLRILSTNDLDNVSEELRHFLIDTVSQCGGHFGASLGAVELTVALHYSFDTPKDRIIWDVGHQCYGHKVLTGRKDELHTIRKKGGLHPFPSREESEYDYFGVGHSSTSISVAVGAAIASSYKKDDKKVVAVIGDGGLSAGMAFEALNHMGSIDEDILVILNDNEMSISPNVGAMTNYLTKILSSKAYSTVKEGSKNILKKVPPSGMFLTKTEKHIKGLLAPGMLFEEMGINYYGPIDGHDTRFLVKTLKNLKKISGPKLLHVITKKGKGYLPAESDPVKYHAVPVFDSKIGVEKDLNKKITYTKVFDDWLCKIAEKDPRIFAITPAMREGSGLVNFSKKFPKRYIDVG

SEQ ID NO: 111898 - protein, 427 aa, Unknown
  Bacterial polypetide isolated from the Sargasso Sea
MSLDLQHYPTLALAQTPDKLRQLPQDKLRELADELREYLLNSVSQTSGHFASGLGTVELTVALHYVYNTPFDRLLWDVGHQAYPHKILTGRAERMSTIRQKNGLHPFPWPPESEYDTFAVGHSSTSISAALGMAVAAEKEGKDRKVVSVIGDGAMTAGMAFEALNHAGDIKKDMVVVLNDNEMSISENVGALNSHLARLLTGNFFNSIRDGGKKLLSNVPPIKEFASRAEEHLKGMVVPGTIFEELGFNYIGPIDGHDVNAVVDTLRNMRNFDGPQLLHVVTKKGKGYAVAEEDPIKFHAVPKFNPADNALPKSKPSAPTYSAIFGQWLCDMAAQDPKLMAVTPAMREGSGMVEFSQRFPEQYFDVAIAEQHAVTFGAGLAKDGMNAVVAIYSSFFTRAYDQLIHDVAIQDLPVLFAIDRAGICGRR

SEQ ID NO: 111899 - protein, 114 aa, Unknown
  Bacterial polypetide isolated from the Sargasso Sea
MSFDIAKYPTLALVDSTQELRLLPKESLPKLCDELRRYLLDSVSRSSGHFASGLGTVELTVALHYVYNTPFDQLIWDVGHQAYPHKILTGRRDKIGTIRQKGGCIRSRGAVRAS

SEQ ID NO: 111900 - protein, 638 aa, Unknown
  Bacterial polypetide isolated from the Sargasso Sea
MDYDLLDKINFPSDLREFKKKDLKQISEELRAKTIETVSKTGGHLGAGLGVVELTVAIHYVFNTPHDKLIWDVGHQAYPHKIITGRKKNIETLRKKDGVYGFVRRSESEYDPFGTAHSSTAVSAGLGIKAAKDINKDNSKVICVVGDGALSAGLAFEGLNNAGAQKKGLIVILNDNKMSIDKPVGAMSTYLTRLLSSKSYSSLRNIVKKISKTLPSNVSKTLYRTEEYSKGLITGGTLFEELGFYYLGPIDGHNIDDMVLVLENIRDNKFDKPVFLHCITKKGKGYSPAEKSEDKFHGVEKFDINTGNSVKKTNLKSYSNIFGETLSKLAENDEKIVAITAAMMSGTGLKLFQKNFEKRFFDVGIAEQHAVTMAAGLATEGFKPFVAIYSTFLQRAYDQIVHDVAIQKLPVRFAIDRAGLVGSDGPTHAGSFDITYLATLPNFIIMAPSNQRELSSMIELSCEINDTPSAFRFPRGTGSEELFNNQPTDISIGKGYILIEGNDVAILNLGTRLEKCIEASKFLNQNNIYPTIADARFAKPLDTQLIDDLLNNHKYILTIEEGSIGGFSSHVLHYVHNIRSKKDNVVIKNLIFPDRFVEHMTPDEQYQDIKMDTESIIRKINNFYENKIVDIKNFKSKV

SEQ ID NO: 111901 - protein, 476 aa, Unknown
  Bacterial polypetide isolated from the Sargasso Sea
MKIFDSIPNKEPTLEFLNGISSPEDLRKLDKNQMSLVADELREFLLYTVGKTGGHFGAGLGVIELTLALHYAFETPHDRLVWDVGHQTYPHKILTGRKDAMESMRQSNGLAPFPVRSESVYDTFGVGHSSTSISAALGMITAAEKKNENRFVTAVIGDGAMTAGMAYEALAHAGSIDKNLLVILNDNQMSISENIGGMRNYLARIWASKTYNRIRESGKSVLTYLPGAKEFARKAEIHAKGMVAPGSLFEELGFEYFGPVDGHDANNLINILHDLKNIHGPKFLHVITTKGKGFAPAENDPVGFHAINKIKKEDLPSHDNSLPKIPTYSQIFGQWLSYKAKKDPRLIAITPAMGEGSGMVEFSKEFPDRYYDVAIAEQHSVSFAAGLSCEGMKPVVAIYSTFLQRAYDQMIHDVALQDLDVLFALDRAGLVGLDGATHQGAFDLSYIRCIPNMVIMAPSDESLAWKMLNTGYDHEG

SEQ ID NO: 111902 - protein, 226 aa, Unknown
  Bacterial polypetide isolated from the Sargasso Sea
MPVRFAIDRAGLVGADGPTHAGSFDITYLSTLPNFVVMAASDEAELVRMINTSMHINDRPSAFRYPRGNGVGVQLPEITEKIELGKAKIIKEGKKVAILNFGARLQECILASENLIKKGIDISIIDARFAKPLDENLIWQIATEHEVLITIEEGSIGGFGSHVSQFLSEKNLLDSNLKFRSMILPDRFIDHDKPELMYKFANLDSIGIENKILDTLNSKVLIKKSN

SEQ ID NO: 111903 - protein, 621 aa, Unknown
  Bacterial polypetide isolated from the Sargasso Sea
MSILSKINLPKELKKLSFNQLQKLNDELRDYTIQVVSKTGGHLGASLGVIELTSALHYVFDAPKDKIIWDVGHQTYPHKILTGRKNKIHTLRKKNGLSGFTKRSESIYDPFGAAHSSTSVSANLGITAARDMLNQNFDVISIIGDGAISAGLAYEGLNNLGHLNKNSLIILNDNEMSIAEPVGAMSKYLVKLLSSKSYESFRDIIKNFTKRLPNEVGDFAKKTEGYLKGYLTGNTLFEELGLNYLGPIDGHNLKLLVQLFKKYKKKELHGPVFLHLITKKGKGYKPAENSKDKFHGVSSFNLKTGVQSKSKEKTFTNVVSDTLIKLAKKDKKIVAITAAMPSGTGLDKFKDAYPNRFYDVGIAEQHAVTFAGGMATEKVKPFVAIYSTFLQRAYDQIVHDIAIQSLPVRFLIDRSGFVGADGATHAGSFDLSYLCCLPNFVVMAPSSGEELKNMIKLSITINDKPSAIRYPRNLANDYNEKAKFNKIKLGEAKLVKKGKRIAFLSLGTRLQKILEVSELIKKNYKFQCSVLDMRFAKPIDKKSINSLIKNHEIFVTIEENAIGGFSSQVNNYLLNESSKSPKILNFFMKDKFIDQSDIEDQYTLSGISSKKIYEKLINFLK

SEQ ID NO: 111904 - protein, 621 aa, Unknown
  Bacterial polypetide isolated from the Sargasso Sea
MKIFKEIPSQKPKTPLLDKVNDPSDIRSFSINELRILSDELREYLLYSVGQSGGHLGGGLGVVELTVVLHYLLNTPFDNLVWDVGHQAYPHKILTGRKNQIHTIRKKGGLAPFPSISESEYDSFGVGHSSTSISALLGMAVASEAESEKKNVAVIGDGAMTAGMAFEALSHTGHIKPNVLIILNDNDMSISENVGGLSNYFSRIWASKTYKGIKKSGASFLKPLPQAYHLARKVETQMKAMVAPGTIFEELGLNYIGPIDGHNIKELHDVISNLMEFEGPQFLHVITKKGAGLDPAEADRIGFHAIGKINSIKQKSSKSKKYQDIFSDWINDMAAKDEDLIAITPAMREGSGLVTFSKNYPDRYYDVAIAEQHAVTFGAGLAIGGKKPVVAIYSTFLQRAYDQLIHDVAVQNLNVTFALDRSGLVGEDGPTHSGNYDIAYLRCIPNMIICTPADENETRLMLSTGFNYKGPASIRYPRGVGPNVKVDEKLDTVEIGKARVINEAGKDKVILNFGSLLHIAREISEKFKFTLIDMRFVKPLDEQILNQYLKKADLFISIEDGSIMGGAGSAVQEFCSKNNINIESELFGIPDEFIEHASREEMLNDAGLSVDKISSRLKELI

SEQ ID NO: 111905 - protein, 298 aa, Unknown
  Bacterial polypetide isolated from the Sargasso Sea
VGITAAMPSGTGMDLFSEKFPNRMFDVGIAEQHAVTFAAGLATEGYKPYASIYSTFLQRAYDQVVHDVAIQNLPVRFAIDRAGLVGADGPTHAGSFDVTYLSTLPNFIVMAASDEAELVRMINTSVDINNNPSALRYPRGNGVGVELPDINEKIDIGKGRIIIEGKKVAIINFGARLKECLLANETLIKKGINITLVDARFAKPLDENLIWQIATDHEAIITIEEGSIGGFGSHVGQFLAEKNLLDNNLKFRSMILPDKFIDHDKPELMYKEAGLDAEAIVSKVFDVLNSKIIVQKQN

SEQ ID NO: 111906 - protein, 397 aa, Unknown
  Bacterial polypetide isolated from the Sargasso Sea
MGGEIPAELNRLKGSMRRLAVPKVGAVFEELGFTYMGPIDGHDIGEMVRTFQAAHREGGPVLVHVVTKKGKGYPYAEADQVGYHAQSAFDLGTGKAIPSSKPKPPSYSKVFGQTLVKLCEQNSRVIGITAAMATGTGLDLLQKAVPDQYVDVGIAEQHAVTLAAGMACEGLRPVVAIYSTFLQRAYDQLIHDVGIQKLPVTFVLDRAGIVGADGPTHQGQYDISYMRAIPNFTVMAPKDEAELQRMLVTCLQHDGPTALRIPRGSGEGVPLMEEGWESLPIGRGELLREGDDLMIVAYGSMVAPALATATLLEEAGLSTTVINARFLRPLDQALIHPLARRIPRVVTMEEGALPGGFGAAVLESLIDQDINVSMLRIGIPDQLVDHATPQQSRKLSA

SEQ ID NO: 111907 - protein, 320 aa, Unknown
  Bacterial polypetide isolated from the Sargasso Sea
SIPSKKPKPVSYSKIFGQTLLKICEQDSKVVGITAAMATGTGLDILQRNIPDQYIDVGIAEQHAVTLAAGMSCDGLKPVVAIYSTFLQRAFDQLIHDVGIQNLPVSFVLDRAGIVGADGPTHQGQYDISYMRSIPNFVLMAPKDESELQRMLITSINHKGPTALRIPRGSGLGVAVMDEGWEPLNIGEAEILEEGEDILIIAYGSMVASAIETVKILKNMNINVCLINARFVKPLDKNLIIPLASRIQKVVTMEEGTLIGGFGSAIVELLNDNEINIPVYRIGIPDVLVDHASPDQSKEKLGLMPDQMADKIVKKFKLDN

SEQ ID NO: 111908 - protein, 623 aa, Unknown
  Bacterial polypetide isolated from the Sargasso Sea
LKKVSEDNLQKVADEVREEMISAVSETGGHLGAGLGVVELTVALHYVFDTPNDKLIWDVGHQSYPHKILTGRKDKIRTLRQGDGLSGFTKRSESEYDPFGAAHSSTSISSALGIAEANKLENKSSNVIAVIGDGAISAGMAYEAMNNAGASKTKIIVILNDNDMSIAKPVGAMRTYLAKLFTGKIYFSLRETLKLITSAFSKRFSAKAGKAEDFFRSAVTGGTLFSSLGFYYAGPIDGHDLSSLVPILKNAKESRHEGPIMIHIKTQKGKGYSYAEKANDHYHGVSKFNVETGEQLKSKSNLPAYTKVFANTLVKHAKKDSKIVGITAAMPGGTGMDIFGNEFPNRMFDVGIAEQHAVTFAAGLATEGYKPYAAIYSTFLQRAYDQVVHDVAIQSLPVRFAIDRAGLVGADGSTHAGSFDITYLSTLPNFVVMAASDEAELVKMINTSVDINDRPSAIRYPRGTGVGVDLPSIEEKIEIGKGRVVQQGTQVCILNLGTRLEECKLAVEQLKAKGVSTTLIDARFAKPLDEELILKSAKEHELMITIEEGSIGGFGSHVKNLLAERGVFDKGLKFRSMTLPDEFIEQNDPKKMYDKAGLNSSQISKKIADILFQKGNNKKVVKN

SEQ ID NO: 111909 - protein, 358 aa, Unknown
  Bacterial polypetide isolated from the Sargasso Sea
NAGASKTKMIVILNDNDMSIAKPVGAMRTYLAKLFTGKIYFSLRETLKLITSAFSKRFSAKAGKAEDFFRSAVTGGTLFSSLGFYYAGPIDGHDLSTLVPILRNAKDSKHEGPIMIHIKTQKGKGYSYAEKASDHYHGVSKFNVETGEQQKSGTNLPAYTKVFANTLVKHAKKDSKIVGITAAMPGGTGMDIFGKEFPKRMFDVGIAEQHAVTFAAGLATEGYKPYAAIYSTFLQRAYDQVVHDVAIQSLPVRFAIDRAGLVGADGSTHAGSFDITYLSTLPNFIVMAASDEAELVKMINTSVDINDKPCAIRYPRGTGIGVELPFIDEKIEIGKGKIIQEGTQGCFVSLGTRLEECK

SEQ ID NO: 111910 - protein, 359 aa, Unknown
  Bacterial polypetide isolated from the Sargasso Sea
KGKVTNQAEDSGDKYHGVSKFNIATGEQKKSKSNAPSYTKVFAETLIKHAEQDTKIIGITGAMPSGTGLNLFEKKFPDRTFDVGIAEQHAVTFAAGLATEGYKPYAAIYSTFLQRAYDQVVHDVAIQSLPVRFAIDRAGLVGADGPTHAGSFDITYLSTLPNFVVMAASDESELVKMINTSVHINDRPSAFRYPRGNGIGVEMPSINELLEIGKGRIIKEGKKVAILNFGTRLEECKKASDILYKKGIDITIIDARFAKPLDEKLIMEVANNHEVLISIEEGSVGGFGSHVMQFLSERGVFDRGLKFRSMILPDLFIDQDTPEKMYEKAGLDSLSIANKIEETLNSNIILAKNKSKISS

SEQ ID NO: 111911 - protein, 265 aa, Unknown
  Bacterial polypetide isolated from the Sargasso Sea
MKKNYEFLDQINFPSDLKKVPETKLQKVADELREEMIDAVSVTGGHLGASLGVVELSVALHYIFNTPSDKLIWDVGHQCYPHKILTGRKDKIRTLRQGGGLSGFTKRLESEYDPFGAAHSSTSISSALGIAEANKLSKKSENVIAVIGDGAISAGMAYEAMNNAGASKTKMIVILNDNDMSIARPVGAMGTYLAKIFSGKIYFSLRETIKLITSAFSKRFSAKAGKAEDLLRSAVTGGTLFSSLGFYYIGPINGHDLSSLIPILR

SEQ ID NO: 111912 - protein, 431 aa, Unknown
  Bacterial polypetide isolated from the Sargasso Sea
LAKQLASHLPKQLERTAKRAEEYARGLVTGGTLFEELGFYYVGPVDGHNLEHLLPVLQNIKNAKQDKPVLLHVVTEKGRGHPFPEKSLEKYHAVQKFDLVTGAQSKAKANAPSYTEVFSKSLIREAEQDERIVAVTAAMPSGTGIDKFAQQFPQRSFDVGIAEQHAVTFAAGLATEGLKPFVAIYSTFLQRAYDQVVHDVAIQGLPVRFAIDRAGLVGADGATHAGAFDLAYLCCLPGFIIMAAADEAELVHMIATARDINDAPSAIRYPRGEGVGVELPDHGTPLPIGKGRLLRKGSTVAILSLGSRLKDCLLAAEQLAALGLSTTVADARFAKPLDTELIKQMAQDHELLIILEEGSVGGFSSQVLHFLALEGLLDGGVKVRPMTLPDIFIDHASSDEQYKIAQLDSASIIDVVVKTLGNSELSGSASA

SEQ ID NO: 111913 - protein, 504 aa, Unknown
  Bacterial polypetide isolated from the Sargasso Sea
KESEFDAMSVGHQALSISAALGMDEASKHQKNNKNIFSVIGDGAMTAGIAFEAMMHAGHLNNNLKIILNDNDMSISKNKGGLSDYLAKIWASKSYKKLKSSGKKVLKNLPYGLHITRNLKDGIKSAVMPGNLFEDLGLHYVGPIDGHDIPLLIKTINRMMEKNEPYLLHVITKKGAGFEPAENERIKFHAISKIENTPAPKKTKFQDIFGDWLCHKAKQDSKLVGITPAMKEGSGMVNFEREFPERFYDVAIAEQHAVTFSAGMSLEGMKPVVAIYSTFLQRAYDQLIHDVCLENLDVTFALDRAGIVGEDGPTHSGNFDIAFMRAIPNIVIATPSDENEMWQVLNSCYEHKGPAAVRYPRGSGRGSEIIDKDNKFEIGKAKKVLDGENLCILNFGVLLDRVELLAENNNFGLYDMRFVKPIDIQALEDIANKYDQIVTLEDHTIMGGAGSCVAEHLNIIGMNKKILHLGLEDSFPKHGSRNEILELNELDAVSISEKILNFIK

SEQ ID NO: 111914 - protein, 590 aa, Unknown
  Bacterial polypetide isolated from the Sargasso Sea
MKIFSEIPSEVPSTKLLDKINYPRDLKELSPPDLKILADELREFLLYSVGKSGGHLGAGLGVVELTIVLHYLYDSPSDNIVWDVGHQAYPHKILTGRKNQIGSIRSKDGLAPFPSRNESDYDVFGAGHSSTSVSSAVGMAIANKLNEGEKKTVAVIGDGAMTAGMAFEAMQHAGGIKPDMLIILNDNDMSISENVGGLNNYFSRIWASKLYKGIKSNGKKFLKNIPAAHHLARTVETHMKTMVAPGAIFEELGLNYIGPIDGHDIDQLLKVIGNLKNFEGPQFLHIITKKGAGYDLAEEDRIKYHAISKTNTSKNIVKTKPKYQDIFSNWVVDMAREDSDLVAITPAMREGSGLVEFSKEFPERYFDVAIAEQHAVTLSAGLACEKKKPVVAIYSTFLQRAYDQLIHDVALQNLDVTFAIDRAGLVGEDGPTHSGNYDLVYLRCIPNMIVMTPSDENETRKLLTTGFLHNGPASIRYPRGSGPNVIVENDLSAVEIGKGRLIEEGSKDLIVINFGALLDQAREVASTLGLTLIDMRFVKPLDEDILRKYLSKAQAFVSIEDGSVAGGAGSAVQEFCADNNINIKSKLLGI

SEQ ID NO: 111915 - protein, 357 aa, Unknown
  Bacterial polypetide isolated from the Sargasso Sea
FSRIWASKTYKGIKKSGSSFLKPLPQAYHLARKVETQMKAMVAPGTIFEELGLNYIGPIDGHNLKELKDVISNLKEFEGPQFLHVITKKGAGLDSAEADRIGFHAIGKINAIKDKKIKQKKYQDIFGEWIIDMAQISDDLIGITPAMREGSGLVEFSKKFPDRYFDVAIAEQHSVTFAAGLSVEKKKPVVAIYSTFLQRAYDQLIHDVAVQNLDVTFALDRSGLVGEDGPTHSGNYDIAYLRCIPNMVICTPSDENETRKLLTTAYLHNGPASVRYPRGTGPNSNVDKDLKPLKIGEANIINEESSEIVILNFGTLLNEANQISKELKSALVDMRFVKPLDEKLLRKLFKKAKVFIS

SEQ ID NO: 111916 - protein, 271 aa, Unknown
  Bacterial polypetide isolated from the Sargasso Sea
MKIFKEIPTELPNTPLLDSVDYPSDLRSFSINELETLASELREFLLYSVGQSGGHLGGGLGVIELTIILHHLYNTPYDNLVWDVGHQAYPHKILTGRKDRIMSIRKKDGLAPFPSRSESEYDTFGVGHSSTSLSALVGMAEATKNSNPDKKHVAVIGDGAMTAGMAFEALSHIGHLKPNLLVILNDNDMSISENVGGLSNYFSRIWASKTYKGIKKSGSSFLKPLPQAYHLARKVETQMKAMVAPGTIFEELGLNYIGPIDGHNFKELKDV

SEQ ID NO: 111917 - protein, 459 aa, Unknown
  Bacterial polypetide isolated from the Sargasso Sea
NAGNAKKQLLGILNDNQMSISPNVGAMRNYLMKISTNKYYNYIRKKISTLPDIAYGKTLLRRIESSVKNFLLPRTVFEDLGFRYFGPVDGHDVNLLVNTLEKIKDFPGPVVLHTVTKKGKGIDYAEKDPIKYHGVKAKKIGEDKTLVQDAPIFQNVFGSLCCSLANENEKIVCITAAMREGTGLVKFSKKFPDRYFDVGIAEAHGVTFAAGLSISGNIPIVAIYSTFLQRGYDQIVHDIAIQKLPVIFCLDRSGLVGEDGPTHHGALDIAYMRCIQGMIVTAPKDGNELKNLLYTAINHNSGPFSIRYPKDSSIAFHKEIPGENIPIGSWEVIKKGTDVTLLAVGSMVDKALYVANKLKSNNIHCEVVNCRFIKPMDEKYLNESLRNFSKIVTLEEGVLDGGFGEGVSGWLSSMKAKNNLLRIGLPNNFVEHGPRKVLLEEVGLDSESLSKKVLSFISS

SEQ ID NO: 111918 - protein, 81 aa, Unknown
  Bacterial polypetide isolated from the Sargasso Sea
MHLGDLKHPNELHGLSPAQLEDVARQIRERHLQVVSTSGGHLGPGLGVVELTLALYQTLDLDHDRVIWDVGHQAYPHKLIT

SEQ ID NO: 111919 - protein, 582 aa, Unknown
  Bacterial polypetide isolated from the Sargasso Sea
MLLSELSHPNQLHGLTVSQLEEIACQIRERHLQVVSTSGGHLGPGLGVVELTLALYQTLDLDFDKVVWDVGHQGYPHKLITGRFSQFDSLRQQNGVAGYLKRSESKFDHFGAGHASTSISAALGMAIARDRKGENYKCVAVIGDGALTGGMALEAINHAGHLPNTPLVVVLNDNDMSISPPVGALSSYLNKVRVSPPLQFLSDSVQESVKNIPLIGKDIPEELKNIKGSVRRLAVPKVGAVFEELGFTYMGPIDGHDIGNLVNTFNAAHKLKKPVLVHVVTTKGKGYPYAEADQVGYHAQSAFDLTTGKSIPSKKPKPVSYSKIFGQTLLKICEQDSKVVGITAAMATGTGLDILQRNIPDQYIDVGIAEQHAVTLAAGMSCDGLKPVVAIYSTFLQRAFDQLIHDVGIQNLPVSFVLDRAGIVGADGPTHQGQYDISYMRSIPNFVLMAPKDESELQRMLITSINHNGPTALRIPRGSGLGVAVMDEGWEPLNIGEAEILEEGEDILIIAYGSMVASAIETVKILRNMNINACLINARFVKPLDKNIIMPLASRIQKVVTMEEGTLIGGFGSAIIGIINDR

SEQ ID NO: 111920 - protein, 544 aa, Unknown
  Bacterial polypetide isolated from the Sargasso Sea
SDKIVWDTGHQAYPHKILTGRRDKMHIIRKIDGLAPFPSIRESKFDAMSVGHSSTSISAALGMDEAVKHQKNNKNIFSVIGDGAMTAGIAFEAMMHAGHLNNNLKIILNDNDMSISKNKGGLSDYLAKIWASKSYKKLKSSGKKVLKNLPYGLHLTRNIKDSLKSAVMPGNLFEDLGLHYIGPIDGHDIPLLIKTINRMMEKTEPYLLHVVTKKGAGFEPAENERIKFHAISKIENTPAPKKAKFQDIFGDWLCHKAEEDNKLVGITPAMKEGSGMVNFEKEFPERFYDVAIAEQHAVTFSAGLALENMKPVVAIYSTFLQRAYDQLIHDVCLENLDVTFALDRAGIVGEDGPTHSGNFDISFMRAIPNIVIATPSDENEMWQALNACYEHQGPAAIRYPRGSGRGAEITDKNNKVDIGKAKKIIDGENLCILNFGVLLNRVETLAKNNNFGLYDMRFVKPIDIQALKDIGNKYDQIVTLEDHTIMGGAGSCVSEHFNMLGISKKIIHLGIEDKFPKHGSRNEILELNELSTDSISEKILNFTE

SEQ ID NO: 111921 - protein, 535 aa, Unknown
  Bacterial polypetide isolated from the Sargasso Sea
FTKRSESEYDPFGAAHSSTSISSAFGIAEANKLANKSSNVIAVIGDGAISAGMAYEAMNNAGASKTKMIVILNDNDMSIAKPVGAMRGYLAKLFTGKIYFSLRETFKLITSAFSKRFSAKAGKAEDFLRSAVTGGTLFNSLGFYYVGPIDGHDLTTLVPILKNARDSKHEGPIMIHIKTQKGKGYLYAEKATDHYHGVSKFNVETGEQVKSGSNLPAYTKVFANTLVKHAHKDSKIVGITAAMPGGTGMDIFGKEFPKRMFDVGIAEQHAVTFSAGLATEGYKPYAAIYSTFLQRAYDQVVHDVAIQSLPVRFAIDRAGLVGADGSTHAGSFDITYLSTLPNFIVMAASDEAELVKMINTSVDINDRPTAIRYPRGTGIGVELPSIDEKIELGKGRVIQEGKQACILSLGTRLEECKIAAEELKNKGVSTTIVDARFAKPLDQELILKCAREHEVMITIEEGSIGGFGSHVENLLSEKGVFDKGLKFRSMTLPDVFIEQDNPKKMYELAGLNSSQISKKILDILFKKESIKVVKN

SEQ ID NO: 111922 - protein, 400 aa, Unknown
  Bacterial polypetide isolated from the Sargasso Sea
SGFLKRSESDYDVIGAGHASTSISAGLGIAEARRQLNEDYRVASIIGDGSMTGGLAFEGINNAGHLGKQFLVILNDNEMSISPNVGALSSYFTRLISNPLYNRVRNEFWDLTGRLPIAKSQTRTLIKKVEESLKGLIVPGILFDELGFRYFGPIDGHDLNMVISTLENIKDIQNPVLLHILTKKGKGMVSLNMKNREYHEDAIKFHAVKPNGKAATSEKIKSKVIKETPVPSFQDVFGKLSCEIARNRNDTVCITAAMREGTGLVPYSKEFPDRYYDVGIAEGHGVTFASGLAAQGVRPIAAIYSTFLQRAYDHIIHDCAIQHLPVIFCMDRSGIAGEDGPTHHGSLDIAYLRCVQDMIVTAPKNGNEFRHLLYTALNINDKPFSIRYPKASAVLFDETG

SEQ ID NO: 111923 - protein, 463 aa, Unknown
  Bacterial polypetide isolated from the Sargasso Sea
MSIDRPVGAMSNYLTKLLSSKQYTNVRSLLKKISSKLSNSISKTLYKAEEFSKGLVTGGTLFEELGFYYLGPIDGHDIKTLVPVLENIKDSSVDKPIFLHCVTKKGYGYDPAEKSDDKFHGVNKFNVKTGQSLNSSNKKTYSSIFGETLSNAAKNDEKIVALTAAMMSGTGLNIFNSQHPDRLFDVGIAEQHAVTMAAGLATEGFKPYVAIYSTFLQRAYDQIIHDVALQKLPVRFAIDRAGLVGADGPTHAGSYDITFISTLPNFIIMAPSNQNELIRMINTTVFIDDRPSAFRYPRGTGEMDINDHNIEPIEIGKGIVIEQGNEVAILNLGSRLQSCQEAIKILNANGIQPTLADARFAKPIDTNLLEQLLDNHKYLLTIEEGSSGGFSSSILNYIHNKRIKITSTKVNNIFFPDKFIDHQSPEEQYSEIGMDADSIAKKIIQIYEDNVVNFQSFNKNIRN

SEQ ID NO: 111924 - protein, 388 aa, Unknown
  Bacterial polypetide isolated from the Sargasso Sea
GHTLDHLLPVLRTLQKSKWDGPVFVHVVTKKGYGYEPAEKSEDKYHGVSKFNVITGEQVKSTSKAPSYTKVFANALVKQAQKDKSIVAITAAMPSGTGLDIFEKKFPKRTFDVGIAEQHAVTFAAGLATRGMKPYAAIYSTFLQRAYDQVVHDVAIQSLPVRFAIDRAGQVGADGATHAGSFDLAYLCTLPNFIVMAPSDENELCNCIATSTQINNKPSAFRYPRGEGIGVKINEKPEPWEIGKGRIIREGNQVCILSLGTRLGDSLIASEKLASYGLSTTVVDARFAKPIDELLITQLARDHEVLVTVEEGSIGGFSAQVMSFLTKSAALDRELKFRPLFFPNRFINHGKPDHQNIECGIDHDSIVKTVLGALGIATPAKFSIEERA

SEQ ID NO: 111925 - protein, 542 aa, Unknown
  Bacterial polypetide isolated from the Sargasso Sea
KFDHFGAGHSSTSISSALGIAVARDKLRKKFNVIAVIGDGAMSAGMAYEAMNNAGNINTNMIIILNDNDMSIAPAVGALSNYLSNVVSSRPFNTVREIAKQMMEFFPEELSKTAKKAEDLARNLLNKGESTIFSQMGMFYLGPVDGHDVKSMVKILENLKDGPIEGPVLLHVVTEKGKGHPFSKVSEEKYHAVSKFNLVSGDSVKSNSNVPTYTSVFSDTLCDIAENDEKIIAITAAMPSGTGLNNFKKRFYDRFYDVGIAEQHAVTFAAGLAVEGFKPFVAIYSTFLQRAYDQVIHDVVIQKLPVRFMLDRAGLVGADGATHAGSFDLAYLSCLPNVVIMAPSNENELSKMVFTASKYNDGPIFCRYPRGEAVGLKIEEKLEKLKIGKGKILKKGNQIAVLSVGTMLKSVLQSCEFLDNDGYSMTIADARFVKPIDYEMLENLFLNHQALLIVEEGAQGGFSSHCLSYLSKNNFLGQKSTFVKCLTLPDKFQDHGSQDNQLNEANLDDEGILKELKNIISILEIVPKYKKQNSFSDSKRSY

SEQ ID NO: 111926 - protein, 504 aa, Unknown
  Bacterial polypetide isolated from the Sargasso Sea
AIARDRKGENHKCVAVIGDGALTGGMALEAINHAGHLPNTPFVVVLNDNDMSISPPVGALSSYLNKVRLSPPLQFLSDSVQESVKNIPLIGKDIPEELKNIKGSVRRLAVPKVGAVFEELGFTYMGPIDGHNIGNLINTFNAAHRLKKPVLVHVVTTKGKGYPYAEADQVGYHAQSAFDLTTGKSIPSNKPKPVSYSKIFGQTLLKICEQDSKVIGITAAMATGTGLDILQKNIPDQYVDVGIAEQHAVTLAAGMSCDGLKPVVAIYSTFLQRAFDQLIHDVGIQNLPVSFVLDRAGIVGADGPTHQGQYDISYMRSIPNFVLMAPKDESELQRMLITSINHKGPTALRIPRGSGLGVAVMDEGWEPINIGEAEILEEGNDILIIAYGSMVASAIETSKILKDMNINACIVNARFVKPLDQKLIIPLASRIQKIVTMEEGTLIGGFGSAIVELFNDNEVNIPVYRIGIPDVLVDHASPDQSKKKLGLMPDQMADKIIEKFKLNN

SEQ ID NO: 111927 - protein, 477 aa, Unknown
  Bacterial polypetide isolated from the Sargasso Sea
SALGIAIANKLSNKSNNVIAVIGDGAISAGMSYEAMNNAGASKTKIIVVLNDNDMSIAKPVGAMRTYLARILSGKIYFSFRETIKLIISAFSKRFSNKAGKAEVFLRSAVTGGTLFNSMGFHYIGPIDGHDLDALIPVLKNAKEINIDGPIMVHIKTQKGKGYKFAEKSEDKYHGVSKFNISTGIQEKSKSNVPAYTKVFAQTLIKHAEKDSKIVGITAAMPSGTGMDIFGEKFPSRMFDVGIAEQHAVTFAAGLATEGYKPYAAIYSTFLQRAYDQVVHDVAIQSLPVRFAIDRAGLVGADGPTHAGSFDITYLSTLPNFIVMAASDEAELVRMINTSVDINDKPSAIRYPRGNGIGVNLPSNDEKIIIGKGRVIKEGKKIAILNFGARLKECLIAEENLKKKGINLTIIDARFAKPLDENLIWQIATEHEAIITIEEGSIGGFGSHVGQFLSDKNLLDNNLKYRSMILPDRFIDQ

SEQ ID NO: 111928 - protein, 349 aa, Unknown
  Bacterial polypetide isolated from the Sargasso Sea
AHSSTSISSGLGMSVARDIERKHYNIISVIGDGAMSAGMAYEAMNNAGVMKNKLIVILNDNDMSIAPPVGAMSAYLAKLISGGIYRGFRNFIKKIMRYLPPPVRRGLVRFEEYGRGFFTGGTLFEEMGFYYVGPIDGHNFNHLLPILKNVKSNNDGPTLIHVVTKKGKGYAPAETSEDKFHGVSKFNINTGKQEPKSTNLPAYTKVFSDQLIEEAKSDEKIIAITAAMPSGTGLDAFQKQYPDRYFDVGIAEQHAVTFAAGLAVDEFKPFCAIYSTFLQRAYDQVIHDVGIQNLPVRFAIDRAGLVGDDGATHAGSFDIMYLSAIPNFTVMAPSDELELARMVKTSAKH

SEQ ID NO: 111929 - protein, 376 aa, Unknown
  Bacterial polypetide isolated from the Sargasso Sea
KRFSAKAGKAEDFFRSAVTGGTLFSSLGFYYAGPIDGHDLSSLVPILKNAKESRHEGPIMIHIKTQKGKGYSYAEKANDHYHGVSKFNVETGEQVKSKSNLPAYTKVFANTLVKHAKKDSKIVGITAAMPGGTGMDIFGKEFPNRMFDVGIAEQHAVTFAAGLATEGYKPYAAIYSTFLQRAYDQVVHDVAIQSLPVRFAIDRAGLVGADGSTHAGSFDITYLSTLPNFVVMAASDEAELVKMINTSVDINDRPSAIRYPRGTGVGVDLPSIDEKIEIGKGRVVQQGTQVCILNLGTRLEECKLALEELKAKGVSTTLIDARFAKPLDEELILKSAKEHELMITIEEGSIGGFGSHVKNLLAERGVFDKGLKFRSM

SEQ ID NO: 111930 - protein, 367 aa, Unknown
  Bacterial polypetide isolated from the Sargasso Sea
YIGPIDGHNLKELINVISNLKEFDGPQFLHVITKKGAGLDPAEADRIGFHAIGKINSIKDEKTKQKKYQDIFGEWIVDMASQDNDLIGITPAMKEGSGLVMFSKKYPERYFDVAIAEQHSVTFAAGLAVENKKPVVAIYSTFLQRAYDQLIHDVAIQNLNVTFALDRSGLVGEDGPTHSGNYDIAYLRCIPNMIICTPSNENEVRHLLTTAYLYQGPATVRYPRGIGPNEEVDQDLNPYEIGKAKVINEENSKVLILNFGALIDQAIEVAKDLKLTLIDMRFVKPLDEDILKEYLSKSDMFISIEDGSIMGGAGSAVQEFCSKENINIKSILFGIPDQFIEHASREEMLNEAGLSSESIKSKLKEML

SEQ ID NO: 111931 - protein, 357 aa, Unknown
  Bacterial polypetide isolated from the Sargasso Sea
KDLKDVISNLKEFEGPQFLHVITKKGAGLDSAEADRIGFHAIGKINAIKDKKIKQKKYQDIFGEWIIDMAKVSEDLIGITPAMREGSGLVEFSKKFPNRYFDVAIAEQHSVTFAAGLSVEKKKPVVAIYSTFLQRAYDQLIHDVAVQNLDVTFALDRSGLVGEDGPTHSGNYDIAYLRCIPNMVICTPSDENETRKLLTTAYLHSGPASVRYPRGTGPNSNVDKDLKPLKIGEANIINKESSEIVIVNFGTLLNEANQISKELKATLVDMRFVKPLDEKLLRKLLKKAKVFISIEDGSIMGGAGSAVQEFASKENINVRSILFGIPDKFIEHASREEMLVEAGLDAENIKSKLSKLL

SEQ ID NO: 111932 - protein, 405 aa, Unknown
  Bacterial polypetide isolated from the Sargasso Sea
AAVTGGTLFNSLGFSYLGPIDGHDIDLLVSTLKNAKESKSDGPILIHIKTQKGKGYSFAEKADDKYHGVTKFDVKTGEQAKSNNKIPSYTKVFANTLIKHAEKDSKIVGITAAMPSGTGIDLFSEKFPKRSFDVGIAEQHAITFAGGLATEGFKPYAAIYSTFLQRAYDQVVHDIAIQSLPVRFAIDRAGLVGADGPTHAGSFDITYLSTLPNFIVMAASDEAELVKMINTSVDINDRPCAFRYPRGNGMGVEIPNIDSKLEIGKGKIITEGNKVCILNFGARLQECLTAAKELENKGIKISIIDARFAKPLDQDLILSCARDHEIMLTIEEGSIGGFGSHVSHLLSSKGIFDKGLKFRSLILPDIFIDQDKPDLMYDQAGLNSKQITEEIELILFNRSGIKIIK

SEQ ID NO: 111933 - protein, 295 aa, Unknown
  Bacterial polypetide isolated from the Sargasso Sea
QGYNIAKIVSFMTDMPEHVGGMTINRWCGSSMQAIHSAAGAIAMNAGKVFICCGIESMTFVPINGLNYTPHPDLLKDHPNVYLSMGLTAENVAKKYNLSRKEQQDFAIKSHNNASKAQLSKSFDDEIISIKKNDIEVKADGAIRPNTSQDTLNNLKLVFDENGTITAGTASPLTDGAAATLICEEEYAKSNKLPIIARIKSTAVQGCPPELMGLGPINATKKALKRAKLNINDIDIVELNEAFASQSIACIKELKINPEIVNIEGGAIALGHPLGATGTRITAKAASLIMKKNKR

SEQ ID NO: 111934 - protein, 295 aa, Unknown
  Bacterial polypetide isolated from the Sargasso Sea
RLAREKGIDLGSISGSGPHGRIVKTDILDVNVSSVDTNQESLATPVLRTNVQQASGSSITNLYADREFKEIPLNSMRKTVASRLTEAKQNIPHFYLRKDARIDELLQVRARLNAHLAEKNNKLSINDFIIKSCALALQSVPTANAIWAEDKILQLKPSDIAVAVSVEDGLFTPIIRDADTKSLSNISKEMKELADKARSKKLMPNEYQGGSFSISNLGMFGVDNFDAVINPPHGAILAVGRGLQKPIVNEDESISVANLMSLTLSVDHRVIDGALGAKLLQNITKYLEDPVLMLT

SEQ ID NO: 111935 - protein, 285 aa, Unknown
  Bacterial polypetide isolated from the Sargasso Sea
AGFGHIFVAGGIESMSLIPMTGYKLSPSYKANMENMNYHIGMGHTAEAVAEKYKISREASDQFSYESHQKAANAIEKGLFKDEIVPVTVEEVFVQDGNKVSKSHTVDMDEGVRRETTVEALAKLRPAFKLGGIVTAGSSSQMSDGAAFVLVMSEEMVKQLGVKPIARMVTCTSGGVDPLYMGIGPVEAIPKALSQAGLKLSDIEQTELNEAFACQALAVIQESGLNPDTVNVNGGAIALGHPLGCTGAKLSIQLLNEMKRRNQKYGMVTACVGGGQGIAGIYERL

SEQ ID NO: 111936 - protein, 253 aa, Unknown
  Bacterial polypetide isolated from the Sargasso Sea
CKAKRFRYANNDMVELEARLKEAREAGARHILIATDGVFSMDGVIANLKGVCDLADKYDALVMVDDSHAVGFVGENGRGSHEYCDVMGRVDIITGTLGKALGGASGGYTAARKEVVEWLRQRSRPYLFSNSLAPAIVAASIKVLEMVEAGSDLRDRLWANARQFREQMSAAGFTLAGADHAIIPVMLGDAVVAQAFARELQKEGIYVTGFFYPVVPKGQARIRTQMSAAHTPEQITRAVEAFTRIGKQLGVIA

SEQ ID NO: 111937 - protein, 222 aa, Unknown
  Bacterial polypetide isolated from the Sargasso Sea
MNKELDKQRESNLHRKVRLYSDYRHNLASNDYFQLRFHPKVISGAQTACEKYGSGSGASPLLSGFLSCHNDLLTEILNWKQKPFGMLFNSGFVANQAILKHLPGKNDFVLADRLIHHSLAQALIQCPAKFKRYDHLNLDSLEVLLKNIHGNYDTIFVVTESVFSMDGDYPNLKELVALKKKFPFVLILDEAHGTGVFGPNGGGLAEEMGVLPEIDILVGTLG

SEQ ID NO: 111938 - protein, 104 aa, Unknown
  Bacterial polypetide isolated from the Sargasso Sea
GLGPISAAKKALERATLSIKDIDIIELNEAFASQSLACIKDLEIDINKVNLDGGAIALGHPLGATGARITGKAAQLLKRENKKYALATQCIGLGMGIATIIETV

SEQ ID NO: 111939 - protein, 65 aa, Unknown
  Bacterial polypetide isolated from the Sargasso Sea
ELNMDINKVNIHGGAIALGHPLGATGARITGKVANLLQNNNKKYGLATQCIGLGQGIATVLENIN

SEQ ID NO: 111940 - protein, 294 aa, Unknown
  Bacterial polypetide isolated from the Sargasso Sea
GEAETVVAGGMENLSQSPHVLRDERTTYKLGRSPRKGEEIPRDMEDYFFTNLRDDVCGYFMAQTSDELCKMLDVSREDADSFAALSHQRTENSIRNGIWEDEIVEVITPEGVLDSSHDDHVVLGTTIESLSGLRTHFGPDSLVTAGNASGVVDGAAAIVVKSGARAKSDGDAPLSRIVSWGIVGLDPKIMAHGPVPSSNLALQKAGLKVEDIDLWEINEAFAGQCVACIKDLGIDPSKVNVNGGAVGLGHPLAATGTRLLLTLSLELRRRGGRYGVATACIGGGQGIAVVIEAI

SEQ ID NO: 111941 - protein, 151 aa, Unknown
  Bacterial polypetide isolated from the Sargasso Sea
MKKIFILTGEPSGDKLAATVISDLKKINKDTDFLSVGGQNLQSLGIKSIYDLKEITYLGFTNVLINIFKIRKKINETVNTIIDYNPDLLFTVDSPDFTLRVAEKIKKLNSKIKTVHYVAPQVWVWREGRVKKIKNFIDHILLLFKFEKKIF

SEQ ID NO: 111942 - protein, 203 aa, Unknown
  Bacterial polypetide isolated from the Sargasso Sea
TQFDEADISILNSIRQQKKEEGAKKNIKVTFLPFIMKAVVKSLREFPVFNSSLDHTEENLVIKDYINLGIAVDTPTGLVVPVIKNADKKSILGLSKDLMDISERARSGKLKPNEMQGGTFTISSLGGIGGTYFTPIINPPEVAIMGVSKSVWRAIYNHNSKEIIPTFTMPFSLSYDHRVIDGAIGAAFTSFFSKALFDSKTFE

SEQ ID NO: 111943 - protein, 270 aa, Unknown
  Bacterial polypetide isolated from the Sargasso Sea
GKVFICAGVESMTRVPMLGFNPMPHPQLLEDNPNVYLSMGITAENVAKKYNIDRKEQQEFAISSHEKASNADSKGNLKDEIISIKNDTIDVTKDGGIRPGTTQEILDGLKLAFDQYGTVTAGTSSPLTDGAAATLICEENYAKENGLDILARIKSCAVNGCDPEVMGLGPIGASRKAMDRAGINSADLGVVELNEAFASQSLACVQDLELDKKIVNLDGGAIALGHPLGATGARITGKAAQLLKREGKKYALATQCIGLGQGIATVLEAV

SEQ ID NO: 111944 - protein, 102 aa, Unknown
  Bacterial polypetide isolated from the Sargasso Sea
DVRLRTSLNLKKSIYNYYVYLNNKKIDKNYFRNDFEILSVLRNLKVIGIFTRLAVRDNKKKYLKLIPYAWELIESRINNNLIFADLKNYLDANFPKKIRMKK

SEQ ID NO: 111945 - protein, 111 aa, Unknown
  Bacterial polypetide isolated from the Sargasso Sea
MPGGQERVLRRRINSVQSTKQITRAMELIAATRVVKAMQRANAARPYSTKMTGVIEDLAAGGVGADDPLLRVAEKIDSIGFVVITSDRGLAGAYNSAVIRAAEREIMAAQT

SEQ ID NO: 111946 - protein, 285 aa, Unknown
  Bacterial polypetide isolated from the Sargasso Sea
MSDVVIAGAARTPIGAFNGSLSALSAAELGTVAIANALERAGVPAADVDEVVMGQVLTAATGMNPARQALLAADIPEDRTAYLVNQVCGSGLRAVAQGFQAIKLGEANVVVAGGQESMSQSPHASLMRNGTKMGDVKFVDTMINDGLWCSLMGYHMGTTAENVAEKWQITRDEQDAFAAGSQQKAEAAQNAGRFADEITAVAIKTRKGDIVVDTDEYPRHGTTTEALGKLRPAFSKEGTVTAGNASGINDGSAATVLMSSGEATKRGITPLARIASGRRRASIRP

SEQ ID NO: 111947 - protein, 106 aa, Unknown
  Bacterial polypetide isolated from the Sargasso Sea
YLLDGPVDATQKMLDQSKYNISDFDLFECNEAFASVMLSWAQVHEVPIEKINVNGGAIALGHPVGCTGSRLITTLLHELERQDKELGFLTMCQGGSLGIAIVLERI

SEQ ID NO: 111948 - protein, 145 aa, Unknown
  Bacterial polypetide isolated from the Sargasso Sea
MDYKKFFSSELKNLKEQGLYRNFRNIDRPIKNFPNADEVFENKEREVEVWCSNDYLNMSQHPEVVNEIVKTLLEYGSGSGGTRNISGTSSYHTDLEKKLAGVHNKDAALLFASAYTANQSTLWTLGKKIKNIEIFSDELNHASLI

SEQ ID NO: 111949 - protein, 107 aa, Unknown
  Bacterial polypetide isolated from the Sargasso Sea
MGYGPVPAIKKLLKSTGISLDKIGIIELNEAFASQALAVTRALNLEDDDERVNPNGGAIALGHPLGMSGARLALTAMRELQSKKDRYALCTMCIGVGQGIALLMERV

SEQ ID NO: 111950 - protein, 192 aa, Unknown
  Bacterial polypetide isolated from the Sargasso Sea
MQKIERKLENINFSNRTGIRNKDSILLNGTSMVNFSSNDYLGLSKNKKLISSSLKWTKLYGTSFSSSRLVSGNFDKINYLEDSISKNVNCEKTLILGSGFLLNSTLIPALTDNNVGQRNEMLIFSDKYNHSSINFGSFLTKQKIIRYRHLDLNHLEFLLKKSNNKIPKIIITETLFSMDGDIVDIEGVRFLA

SEQ ID NO: 111951 - protein, 254 aa, Unknown
  Bacterial polypetide isolated from the Sargasso Sea
PAYIVNQVCGSGLRSIASGFQSIKSGDSKIVIAGGQESMSLAPHAIHLRDGKKIGDTKLVDTMIKDGLWDAFHGYHMGVTAENVATKFQVTRQEQDKFALKSQEKALKAIKENKFKDEITNFKIKSKKAEIDFNKDEHPRDGINLEGLTRLKPVFQKDGTVTAGNASGINDGAAAVTLMSDEEAKKRDLEKLVTIKSWASCGVEPALMGTGPIPATKKALDLAGWKINDVDLFEVNEAFAAHSIAVLKTLGIPN

SEQ ID NO: 111952 - protein, 96 aa, Unknown
  Bacterial polypetide isolated from the Sargasso Sea
ALDRAGISSKDLGVIELNEAFASQSLACIKDIGLDENAVNIDGGAIALGHPLGATGARITGKAAQLLKREGEKYALATQCIGLGQGIATVLEAIEK

SEQ ID NO: 111953 - protein, 280 aa, Unknown
  Bacterial polypetide isolated from the Sargasso Sea
MRRSDVDPAEVEHTVFGNVIHTEAKDMYLSRVAAMEAGIPKEVPAMTLNRLCGSGLQAIVSAAQLILLDDADITVAGGAESMSRAGHLISTARWGQKMGNTVAVDMMTEALHDPFGHGHMGITAENLAEKYHISRDQQDAFAFESHQRAQKAIEGGHFQDQILPIDIKIKRETFQFDQDEHVRADLKLPDMTSLRPAFKKDGTVTAGNASGLNDAAAAVVLMSGEIAEKRGATPLAKIIGYGHAGVEPSEMGIGPVPAVKNMLDRIDMSIKDFDIIESNE

SEQ ID NO: 111954 - protein, 196 aa, Unknown
  Bacterial polypetide isolated from the Sargasso Sea
MNYKKFFSDELISLKSQGLYRKFRAINRNKSSFPKATERFEGQEREVEVWCSNDYLNLSQHPEVTKTSIEVINELGTGSGGTRNISGTSTYHVDLEKLLADLHRKESALLFPSAYTANQSTLWTLCKNMEGIEVFSDELNHASLIQGIKNADVVTHIFRHNDTEHLEELLNNANANTPKLVVFESLYSMEGLRSPC

SEQ ID NO: 111955 - protein, 305 aa, Unknown
  Bacterial polypetide isolated from the Sargasso Sea
NDLVETSKINKNDIEDIIAGCAYPEGAQGYNIAKIVSFMTNMPEHVGGMTINRWCGSSMQAIHTAAGAISMNAGKVFVCCGIESMTSVPINGLNYSPHPELLKNQPDVYLSMGLTAENVAKKFNISRIEQQEFAIESHIKAFKAQSSDAFDEEITIINNKEIEVVKDGAIRPNTNQEILDGLKLVFDQNGTVTAGTSSPLTDGASATLICEEEYAVSNNLPILAKIKSTAINGCPPELMGLGPIGASKKALKRAELKISDIDIIELNEAFASQSLACIKELNINPDKVNTEGGAIALGHPLGATG

SEQ ID NO: 111956 - protein, 106 aa, Unknown
  Bacterial polypetide isolated from the Sargasso Sea
MGLGPINASKKALIRAGLTIEDIDIVELNEAFASQSLACIRELNMNENKVNIHGGAIALGHPLGATGSRITGKTASLLKNNDKKYGLATQCIGLGQGIATVLENIN

SEQ ID NO: 111957 - protein, 305 aa, Unknown
  Bacterial polypetide isolated from the Sargasso Sea
EGEKEFIRLNSNSYLGLGLHPEVIDAEEKASAQFGAGPGAVRFISGSYSAHRNLELELADFHDREASMIFSSAYATIISTITSIVTKDTVVISDELNHNCIINGTRMSSACGKVIYPHLDMDVLSSSLKEWAGKAKRALIITDGIFSMRGDHAPLDQIMEIAQEHDYMYEENAVVLVDDSHGVGAMGKTGRGVEEFTKSTPVDILVGTLGKAFGVNGGYVTSSNAVIDFLREKSPMYIYSNPITTGEASAARKAVQVVNSHEGRSLLKNLRDLTKHFEDGVTAIGMETIPGNHPVVPLMIRDTEQ

SEQ ID NO: 111958 - protein, 144 aa, Unknown
  Bacterial polypetide isolated from the Sargasso Sea
SDGAAAMVVMSDATARRHQIIPMVRVLSTAVIGVSPALMGMGPVYATRKLLHRSGIHLRDIGLFEINEAFAAQAMACVEELKLDHDRVNVCGGSLAIGHPLGASGARISTTLIHAMRDRQVHLGLATMCIGLGQGIAVVFELIE

SEQ ID NO: 111959 - protein, 55 aa, Unknown
  Bacterial polypetide isolated from the Sargasso Sea
NLNGGAIALGHPLGCSGARIITTLLNVMEQNNSRTGLATMCIGTGQGIATILERN

SEQ ID NO: 111960 - protein, 250 aa, Unknown
  Bacterial polypetide isolated from the Sargasso Sea
MQYKNFFKSELKNLKEQGLYRDFRNIDRPIKSFPNADESFKNKEREVEVWCSNDYLNMSQHPEVVNEIVKTLLEYGSGSGGTRNISGTSTYHTELEKKLANVHNKEAALVFASAYTANQSTLWTLGKKIKDIEIFSDELNHASLIQGIKNSGAKCHIFKHNDIDHLEQLLKESNLDNPKLIVFESLYSMEGIRSPIVKIVELAKKYNCMTYLDEVHSVGLYGEEGKGIAVEMGVEDKIDIINGTLAKAYG

SEQ ID NO: 111961 - protein, 101 aa, Unknown
  Bacterial polypetide isolated from the Sargasso Sea
MSLEKIITDAWENKDQVNQNSDKSLKDTINQIIDDLDCGKLRVAEKINGEWVTHQYIKKAIMLSFRIYPMENLSGPYSSWYDKAHLLKGKTAGWTKEDHIK

SEQ ID NO: 111962 - protein, 121 aa, Unknown
  Bacterial polypetide isolated from the Sargasso Sea
ARIKSTAVVGCPPELMGLGPINASKKALKRANLSITDIDIVELNEAFASQSLACIKELKMDINKVNIHGGAIALGHPLGATGARITGKVATLLQNNNKKYGLATQCIGLGQGIATVLENIN

SEQ ID NO: 111963 - protein, 256 aa, Unknown
  Bacterial polypetide isolated from the Sargasso Sea
MQKIERKLENINFSNRTGTRNKDLIILNGKSLVNFSSNDYLGLSKNKKLISSSLKWTKLYGTSFSSSRLVSGNFDKINYVEDSISKNVNCEKTLIFGSGFLLNSTLIPALTENNVGQSNEILIFSDRYNHSSINFGSFLTKQKIIRYKHLDLNHLEYLLKKSNKKVPKIIITETLFSMDGDIVDIEGMRFLAKKFNSFLYIDEAHSMGVLGKNGFGIASNLYNEKEVVIGTFGKSFGSYGGFVSSSKKVYAKIINS

SEQ ID NO: 111964 - protein, 38 aa, Unknown
  Bacterial polypetide isolated from the Sargasso Sea
MPLSLSYDHRVIDGAMAARFLKEVIGYLESPGRLLLAM

SEQ ID NO: 111965 - protein, 275 aa, Unknown
  Bacterial polypetide isolated from the Sargasso Sea
GGHSRTILEKTSPGGYLIGFDKDNQALRVAKQALQDFEGRVELVQGSYAGMLQPLNQARTGLVDGILFDLGISSRQVDESGYGLSFNRSETLDMRFDKSQDLMAMDVINEYDFEDLSRIFKEYGEERYSKRIARKIIDSRPLSTTDELADLVTTCVRKDASGRHPATRVFQALRIEVNQELEDLHAGLESALTALKVQGRMAVISYHSLEDRIVKNFMRDKSKACQCPKAIPVCVCEVLQRLRLVNRKVIKPSVKEVDRNRRSRSARLRVAEKIG

SEQ ID NO: 111966 - protein, 294 aa, Unknown
  Bacterial polypetide isolated from the Sargasso Sea
MLCVQQLGKYKGMFSKFQAHDLGEIVIKNILTKTKIRPEYIDEVIIGQVLTGDTGQNPARHAAIRAGIPKEKTGYLINQVCGSGLRAIVAGYQSISLGDSKIIVAGGQESMTNCDQKVMLKDGLIDVFNNYHMGITAENVAQKWNITREQQDTFAASSQNKAELAIKNNRFKEEIIYNKAPKDEHPRLGVTTESLGKLKPAFKENGTVTAGNSSGINDGAAAVLLMNRDESEKRGLEPIAKIVSWATSGVDPSLMGSGPIPASKKALEKAGWSISDLDLVESNEAFAAQSLAVV

SEQ ID NO: 111967 - protein, 65 aa, Unknown
  Bacterial polypetide isolated from the Sargasso Sea
NTLGLNPANVNPMGGAIALGHPLGATGAIRAATVVHALRRHKLKYGMVTMCVGTGQGAAGIIEAL

SEQ ID NO: 111968 - protein, 154 aa, Unknown
  Bacterial polypetide isolated from the Sargasso Sea
MNYKDFFKKEIIKTKASGFYREFVPIIRERKIFPFSYIAHEASSDDQFNSETKIWCTNDYLNMSQNEVVIEKMIDIIRKVGASSGGTRNISGTTPYHIELENKIAQFHSREKALVFNSAYLANQTSLWTLCKKIPNVQIFSDELNHASLIQGIK

SEQ ID NO: 111969 - protein, 58 aa, Unknown
  Bacterial polypetide isolated from the Sargasso Sea
KVNIHGGAIALGHPLGATGARITGKVATLLHNNNKKYGLATQCIGLGQGIATVLENIN

SEQ ID NO: 111970 - protein, 52 aa, Unknown
  Bacterial polypetide isolated from the Sargasso Sea
GGAIALGHPLGCSGSRISGTLINLMESQDVSLGLATMCIGLGQGIATVFERV

SEQ ID NO: 111971 - protein, 81 aa, Unknown
  Bacterial polypetide isolated from the Sargasso Sea
LIELNEAFASQSIAVINELNLDRNIINVNGGAIALGHPLGCSGAKLSVQLFDEMKQRKLKHGMVTMCVGTGQGAAGIFEIL

SEQ ID NO: 111972 - protein, 262 aa, Unknown
  Bacterial polypetide isolated from the Sargasso Sea
MRDAFICDGIRTPIGRYGGALAGVRADDLAAIPLRELLRRNPRLDASAIDDVIFGCANQAGEDNRNVAHMATLLAGYPHSVAGTTINRLCGSGLDAIGFAARAIKAGDADLLIAGGVESMSRAPFVMGKATAPFQRQAEMFDTTIGWRFVNPLMQQQFGTDSMPETAENVAELLNISREDQDAFAYRSQQRTSKAQRDGILAQEIVPVQIIGKKGAVSAVRDDEHPRAETTMEQLAQLKTPFRKGGVVTAGNASGVNDGAAA

SEQ ID NO: 111973 - protein, 127 aa, Unknown
  Bacterial polypetide isolated from the Sargasso Sea
LTPKARILSSAATGVEPSVMGIGPVSATKKVLSLSNTNLNNINIIELNEAFASQALATMRDLSLSDDDERVNINGGAIALGHPLGMSGARLVLTATEQLHQSKNNKLALCTMCVGVGQGSAIILENL

SEQ ID NO: 111974 - protein, 276 aa, Unknown
  Bacterial polypetide isolated from the Sargasso Sea
IPCLTENSLGTRNKCIVFSDKLNHASINYGCLISRQKCFRYNHRDLNHLESQLKKTPSKMRKMIISETLFSMDGDLADLNGLRYLSKKYACILYLDEAHSFGLYGKNGYGFASDVNKNTNEIIVGTFSKAIGSYGSFVSCSRDFYKKIVNSCGGLIYSTALPPSILGAISASLKKITKASKLRKKIKSNSDFLLEKLKSLNFDTAKSNSHIIPLILRDRSKCESLKKYLFDHGYFVKEISPPTVPSGYDRIRLSLTASMSRVIIKNFIKHISNFKH

SEQ ID NO: 111975 - protein, 148 aa, Unknown
  Bacterial polypetide isolated from the Sargasso Sea
MDYSKFFNSELEKLKKEGLYRKFREIDRPIKKFPKADETQGEIERDVEVWCSNDYLNMSQHPEVVNETVKTLLEIGSGSGGTRNISGTSSYHTALEERLAKVHNKDNALLFASAYTANQSTLWTLGKKIKNLEIFSDELNHASLIQGI

SEQ ID NO: 111976 - protein, 216 aa, Unknown
  Bacterial polypetide isolated from the Sargasso Sea
MSNSPHYQNLRKGEKLDNEKMKDSMIIDGLLDVYNQYHMGITAENVAEKYQITREQQDEFAVKSQSKAAEAIKTNKFKDEIVPIKIKDENIFDTDEYPKIGTTLEKLATLKTVFKKDGTVTAGNASGLNDGAAALTLMTAKTAKEKKLKPLAKIISWAQCGVDPSVMGTGPIPATRLALKKAGWKEDQIDLVEANEAFAAQAISVNKELGFNSDIV

SEQ ID NO: 111977 - protein, 78 aa, Unknown
  Bacterial polypetide isolated from the Sargasso Sea
GLNDGAAAVLVMSAQKAAALGLTPLARIKAYANAGVDPSVMGVGPVPASRRALERAGWTPGDLDLMEINEAFAAQALA

SEQ ID NO: 111978 - protein, 120 aa, Unknown
  Bacterial polypetide isolated from the Sargasso Sea
MKRVVVTGIGLLTSIGNNKEETWNNLINLKSGIKKIDHFDTSELTCKIAGHISHNPEDPFYYDRLKHLDQKDIKRNDRFIQYGIAAAKMAVEDSGIENINDVAKLKVGVSVGSGIGGLET

SEQ ID NO: 111979 - protein, 146 aa, Unknown
  Bacterial polypetide isolated from the Sargasso Sea
QISDGAAGLLWMDEKRAKALGLKPRAKIVANVVVGTDPYYLLDGPVDATKKILSKSGMSLSDIDLFECNEAFASVVLSWLGENPDIDSEKVNVNGGAIALGHPVGATGSRLIVTALNELERRDGSLAMVTMCCGGAIGTATIFERI

SEQ ID NO: 111980 - protein, 247 aa, Unknown
  Bacterial polypetide isolated from the Sargasso Sea
MQYKNFFKSELKNLKEQGLYRDFRNIDRPIKSFPNADENFKNKEREVEVWCSNDYLNMSQHPEVVNEIVKTLLEYGSGSGGTRNISGTSTYHTELEKKLANVHNKEAALVFASAYTANQSTLWTLGKKIKDIEIFSDELNHASLIQGIKNSGAKCHIFKHNDIDHLEQLLKESNVDNPKLIVFESLYSMEGIRSPILKIVELAKKYNCMTYLDEVHSVGLYGEEGKGIAVEMGVEDKIDIINGTLAK

SEQ ID NO: 111981 - protein, 231 aa, Unknown
  Bacterial polypetide isolated from the Sargasso Sea
GDTAENVASKYHLSRKEQQDFAIKSQKKAHKAYESEYFKNEITKIIIENDEVSQDGCIRPNTSQEILDNLKLAFNQKGTVTAGTSSPLTDGASATLICEENYAKKNNLNILARIKSCAVQGCSPELMGLGPIEASKKALIRANLSIKDIEIVELNEAFASQSLACIKELSISEEIVNLDGGAIALGHPLGATGARITGKAAQLLKRENKKYALATQCIGLGQGIATILEAI

SEQ ID NO: 111982 - protein, 292 aa, Unknown
  Bacterial polypetide isolated from the Sargasso Sea
MNNIYIMSAVRSPIGTFGGTLKNFHPVDLGTFVAKEAIKRSNFESKEISHAVFGNVIHTEPRDMYVSRVVALQSGLNKGSSAFTVNRLCGSGLQAIVSATQLIALDDTEIALAGGVEVMSSGTHVVQGFRWGSKMGDAKVYDMMLGALQDPFGHGHMGITAENISGRYQISRLMQDEFALSSQMKAKKAIEKGIFKEQIVPIEINTRKGIEIFDTDEHPKPETTLETLSNLKAAFKKDGSVTAGNASGINDGASALILANEKKAKKGTPLAKIISYGFGGVDPDEMGMGPIP

SEQ ID NO: 111983 - protein, 184 aa, Unknown
  Bacterial polypetide isolated from the Sargasso Sea
KEIVVEEDEQPLSADLEKITRLRPAFDKEGTVTAANSSSISDGAAALVMMRESTAKKRGITPLALIHGHSSFAHSPDWFTTAPIGAIKKLLDKVQWDIHDVDLFEINEAFATVTMAAMKDLELPVEKVNIHGGACALGHPVGASGTRILVTLISALKKYNKKRGVASLCIGGGEATAMAVEVLS

SEQ ID NO: 111984 - protein, 89 aa, Unknown
  Bacterial polypetide isolated from the Sargasso Sea
MIDKNIIKKIVNLVNVKNRDILEIGPGSGALTEEILKNNPKSISVIEKDNNLANKLRNNFKNESVKVYNDDILKFDLEKIDKKNSIIFG

SEQ ID NO: 111985 - protein, 257 aa, Unknown
  Bacterial polypetide isolated from the Sargasso Sea
IAINEGLDLSKIKGTGPNGRIVKRDLENKINSKTLIVDNLNEDKNFKLVKNTNIRKVIAKRLTDSIQNAPHFYLTVDCNIDKLLAFRKEINQELNEEKKVSLNDFIIKAVGNTLVNVPEVNASWDKDNTKYYNSADVSIAVAIDKGLITPIIKSVENKGLETISLEMKKLIKKAKEGLLKPEEYNGGTFSISNLGMFGIKHFTSIINPPQGAILAVGSGIKQPIVNNDKLEIGTIMNVTLSCDHRVIDGATGSKFLA

SEQ ID NO: 111986 - protein, 79 aa, Unknown
  Bacterial polypetide isolated from the Sargasso Sea
EAFAAQACAVNKALGLSEDIVNVNGGAIALGHPVGATGSIIMTKLVHELKRRKGRYGLATMCIGGGQGIAVIIESCKSL

SEQ ID NO: 111987 - protein, 144 aa, Unknown
  Bacterial polypetide isolated from the Sargasso Sea
MQYKNFFKSELKNLKEQGLYRDFRNIDRPIKSFPNADESFKNKEREVEVWCSNDYLNMSQHPEVVNEIVKTLLEYGSGSGGTRNISGTSTYHTELEKKLANVHNKEAALVFASAYTANQSTLWTLGKKIKDIEIFSDELNHASL

SEQ ID NO: 111988 - protein, 62 aa, Unknown
  Bacterial polypetide isolated from the Sargasso Sea
GLDPDTVNVNGGAIALGHPLGCTGAKLSIQLLNEMKRRNQKYGMVTACVGGGQGIAGIYERL

SEQ ID NO: 111989 - protein, 129 aa, Unknown
  Bacterial polypetide isolated from the Sargasso Sea
IKELNIEPIARLLSYHVAGLEPKIMGVGPIYAVPGALEKAGMKLNDIEQVELNEAFACQSLAVIRELDINPEIVNVNGGAIALGHPLGCTGAKLSVQLFSEMKKRNQKYGMVTMCVGTGQGAAGIFEML

SEQ ID NO: 111990 - protein, 106 aa, Unknown
  Bacterial polypetide isolated from the Sargasso Sea
MGLGPINASKKALKRANLDIKDIDIVELNEAFASQSIACIKELKINPEIVNIEGGAIALGHPLGATGTRITAKAASLMIKHNKKYALATQCIGLGQGIATVLERVG

SEQ ID NO: 111991 - protein, 259 aa, Unknown
  Bacterial polypetide isolated from the Sargasso Sea
MGVQIVGTGSFLPDNVVTNDDLASLGCDADWIVQRTGIQERRHAPSEMTTSDMAVRAAQNAIEDAGIARGDIDLLLMATMTPDYLLPATAAQVQHQLGLQCAAVDMTAACAGFLYAMVTGFQYVATGCSRYALIIGADINSRITNPQDKRTYPLFGDGAGAVVLGPGGSGQGLEAYTLGADGAGTELLKRPVGGSKEPFSADCGSGERWYLEMDGRSVFKWAVRLVEDSSKQILNAGECPVEDVKLWLFHQANERILEA

SEQ ID NO: 111992 - protein, 204 aa, Unknown
  Bacterial polypetide isolated from the Sargasso Sea
ANNADTNGKFEDEITIIKDKKVDVMKDGGIRPGTTQEILSGLKLAFDNNGTVTAGTSSPLTDGAAATLICEEEYAKSNNLEILARIKSTAVNGCEPEVMGLGPIGASKKALSRAGLKSSDLDIIELNEAFASQSLACVKDLELDEKSVNIDGGAIALGHPLGATGARITGKAAQLVKREGKKFALATQCIGLGQGIATVLEAVE

SEQ ID NO: 111993 - protein, 232 aa, Unknown
  Bacterial polypetide isolated from the Sargasso Sea
HHKSSFDKSYRDITHSSMRKTIADRLVKSATEAPHFFLSVDCDISEINKIRENVNKGDINISINDFIIKASALALKKFPKANCSWNNDFIRYYYSYDISVAVAVEDGLITPIVKNAISKGIEEISIEVKLLASKAKKGELSPEEYSGGNFTVSNLGMFGIKNFNAIINPPQSMILAVGKAEPRAVVSNNEITISNLMTVTLSCDHRAVDGALGAQWLNKFKDFIQNPSLMLL

SEQ ID NO: 111994 - protein, 212 aa, Unknown
  Bacterial polypetide isolated from the Sargasso Sea
MPKKIEKSKEKIEKFIIDFNQINAGPAVRKIARELEIDLNKILGSGKNKLITKDDLKNYIHSGTSQEKLAYANLKSLETYGEYKLQNQSKIRKTAAKNLTKSWQIIPHVTHFEEANITKIEKQRKDLNNVSSIKITPLAYIIKATSIALEKFPLMNSSLVDEGKVMIKKYVNIGVAVNTQEGLVVPVIRNVTELKIAEIAKNILDLSAKAKN

SEQ ID NO: 111995 - protein, 242 aa, Unknown
  Bacterial polypetide isolated from the Sargasso Sea
YSDDEKQNPHLYLSMGITAENVAKKFNISRTEQQIFALESHRKANEAQQKGKFNDEITRIRNYETDENIRPNSTMEKLDSLKLAFDENGTVTAATSSPLTDGAAVTLICEENFAKENGLNILGRIKSTAVEGCDPNYMGLGPISATKKALERAKLSIKDIDIVELNEAFASQSIACIKDLEIDVEKVNLDGGAIALGHPLGATGARITGKAAQLLKRENKQYALSTQCIGLGMGIATIIEAI

SEQ ID NO: 111996 - protein, 176 aa, Unknown
  Bacterial polypetide isolated from the Sargasso Sea
KETPSYIVNQVCGSGLRSIASGFHSILSNNSNIVVAGGQESMSQAPHVIHLRNGKKLGDTELIDSMIKDGLWDAFNGYHMGITAENVAQQFQVTRKDQDIFAFDSQTKALRAQKENKFDNEILPFNIELKKGSTTFQKDEHPRAGISMEALEKKKAAFQKDGTVTAGNASGINDGA

SEQ ID NO: 111997 - protein, 219 aa, Unknown
  Bacterial polypetide isolated from the Sargasso Sea
MASSCVPGQHYDTATGTCVECAPGYYQPRAGQSNCLECRAGTYSAGSVVPSAWTRSTDRMCRGGTPQMGGSFHLSDALTACRLNPDCRSIVADCTYGWDPTTYTPPYTGGYLEYCPNDGEGGSGAVGTCLYTPPSGISSGSGGCASCPAGTYQPYGNAGTMNTYYPDYYFPTDGVGTPAGTVPIPGGTYPFAAAHADDSTDCQHCPPGSMSNAESTSVD

SEQ ID NO: 111998 - protein, 191 aa, Unknown
  Bacterial polypetide isolated from the Sargasso Sea
DNLLTFRSDINNKRVELPKVSLNDFIIKAVGLTLMKVPEVNVSWDKDNTKFFNTADISIAVAIEGGLVTPIIKNVEKKGLETISNEVKTMVRKAKEGSLLPEDYNGGSFSISNLGMFGIKHFTSIINPPQGAILAVGSGEKTPIVKNDKIEIATLMNVTLSCDHRVIDGATGAKFLNELKRFIETPSLMIL

SEQ ID NO: 111999 - protein, 117 aa, Unknown
  Bacterial polypetide isolated from the Sargasso Sea
STAVVGCPPELMGLGPINASKKALKRANLSISDIDIVELNEAFASQSLACIKELKMDINKVNIHGGAIALGHPLGATGARITGKVATLLHNNNKKYGLATQCIGLGQGIATVLENIN

SEQ ID NO: 112000 - protein, 228 aa, Unknown
  Bacterial polypetide isolated from the Sargasso Sea
SSWRAHILIATDGVFSMDGVIANLQGVCDLADKYGALVMVDDSHAVGFVGLNGRGSHEHCGVMGRVDIITGTLGKALGGASGGFTSGKKEVIDWLRQRSRPYLFSNSLAPSIVTASIHVLEMLKSGQALREAVWENSRYFREKMSAAGFTLGGADHAIIPVMIGDAKLASDFANRLLAEHIYVIGFSFPVVPKGQARIRTQMSAAHTREQLDKAIEAFTRIAKEMAII

SEQ ID NO: 112001 - protein, 72 aa, Unknown
  Bacterial polypetide isolated from the Sargasso Sea
MIKAYANAGVDPSVMGVGPVPASRRALERAGWTPGDLDLMEINEAFAAQALAVHKQMGWDTSKVNVNGGAIA

SEQ ID NO: 112002 - protein, 311 aa, Unknown
  Bacterial polypetide isolated from the Sargasso Sea
SKVLILGKIVTFMTGMNINTAGMTVNRWCGSSMQSIHIAAGSIAMGSGKAFICCGVESMTRVPMNGFNPMPHPKLNEDNPNVYLSMGTTAENVAKKYQLTRKDQQEFAISSHQKAYEAETKGNFKDEITIINGCDKDGGIRPNTNQEILDGLKLAFDENGTITAGTSSPLTDGAAATLICEEEYAKNNNLDILARIVSTAVEGCAPEVMGLGPIGASNKALKRANLSIKDIDIVELNEAFSSQSLACIKDLNIDHNKVNIDGGAIALGHPLGATGARITGKAADLLRRENKKYALSTQCIGLGQGIATVLE

SEQ ID NO: 112003 - protein, 156 aa, Unknown
  Bacterial polypetide isolated from the Sargasso Sea
MASLAEQTEALKSQGLYKHERVIAGPQQAAIDVHNNDDTCEVLNLCANNYLGLANHPAIIKAAHEALDTFGYGMASVRFICGTQTIHKELEECISRFLGTEDTILYPSCFDANGGLFETILTNEDAVISDALNHASIIDGIRLSKAQRFRYKNNDM

SEQ ID NO: 112004 - protein, 273 aa, Unknown
  Bacterial polypetide isolated from the Sargasso Sea
MVTFLSDLNIKIPGMTVDRWCGSSMEAIHIAAGKIAMGSGKVFLCGGVESMTRVKTGFDPLPYPYTKNNDQNPHLYLSMGITAENVAKKYKISRTEQQEFALDSHEKANFAKNSGNFKNEIIKINNCEHDENIRPNSNMEKLNKLKLAFNNNGTVTAATASALTDGAAVTLICEENFARENNLEILGRIKSTAIQGCHPDFMGLGPISASKRALKRAQLTIKDIDIVELNEAFASQALACIRDLDIDQKKVNLDGGAIALGHPLGATGARITG

SEQ ID NO: 112005 - protein, 144 aa, Unknown
  Bacterial polypetide isolated from the Sargasso Sea
DGASAVLVMSAEKAAELGLRARARFHSFALAGADPVTMLKGPIPATEKVMARSGLTLEDIDLFEVNEAFASVVLAWQKEHGTDLNKTNVNGGAIALGHPLGCSGTKLMATLLNELERTNGRYGLQTMCEGGGMANATIIERLDA

SEQ ID NO: 112006 - protein, 88 aa, Unknown
  Bacterial polypetide isolated from the Sargasso Sea
FISDIDIVELNEAFASQSLACIKELKMDINKVNIHGGAIALGHPLGATGARITGKVATLLQNNNKKYGLATQCIGLGQGIATVLENIN

SEQ ID NO: 112007 - protein, 193 aa, Unknown
  Bacterial polypetide isolated from the Sargasso Sea
FVENGKRVSKSHVVDMDEGVRRDTTLEALSKLRPAFKMGGIVTAGNSSQTSDGAAFVLVMSEEMVKQLGVTPIARMVTCTSGGVDPLYMGIGPVEAIPKALDQAGLKLSDIEQTELNEAFACQALAVIQEAGLDPSTVNVNGGAIALGHPLGCTGAKLTIQLLNEMKRRDQKYGMVTACVGGGQGIAGIFERL

SEQ ID NO: 112008 - protein, 278 aa, Unknown
  Bacterial polypetide isolated from the Sargasso Sea
MTVNRWWALQCKQFMMLLELSQLTLEMYFMCGVESMTFIPMNGLTYDLHLQLSKDNPNVYMSMGITAENVAKKFDISRKEQQDFAISSHSKANSARETNMFDDEIVSIINNHEIINKDGGIRPNTSHEILDGLKLAFDENGTVTAGTASPLTDGASAVIVCEEEYAKKNSLNILARIKSTAVVGCPPELMGLGPINASKKALKRANLSIDDIDIIELNEAFASQSLACIKELNMDINKVNIHGGAIALGHPLGATGARITGKVATLLQNNNKKYGLAT

SEQ ID NO: 112009 - protein, 237 aa, Unknown
  Bacterial polypetide isolated from the Sargasso Sea
MIDAKKSLGQNFLVDKNIIKKIVNLVEIKNNNVIEIGPGKGALTEEILKAKPKFLSLIEKDKQFINDLKNRFDRNKYVQVFGEDILKFNLEGKIKKNTIIFGNLPYNISSQILIKFLRFKAWPPKFSHLILMFQKELGEKIIGKFSTSNYGRLSILAGYRLELQKKFMVSNNCFLPRPKVKSIVLHLKPKKKNSFLIKNIYNLEKITNTLFSNKRKMINKNIKKILALSEIQQIDEL

SEQ ID NO: 112010 - protein, 143 aa, Unknown
  Bacterial polypetide isolated from the Sargasso Sea
MSIDSNEGLTKEDAYYSFQTRLVNVRRYLTNIVDNFFIQYGIVSKNWDTKTIIKSNENGQRKGIYKTKYSTDGINIGVGMNWVFDNGLSSGLYLIKIISKEPSFTYELSEDWECNSSCQSNYESNVKKYTPNNSVNLSFGYNF

SEQ ID NO: 112011 - protein, 229 aa, Unknown
  Bacterial polypetide isolated from the Sargasso Sea
MIFAKKSLGQNFLIDKNIILKILNLVNVHDRNIIEIGAGQGALTEEILKRNPKSLCLVEKDTNLAKKLKEKYSTNKIVTIYEKDIIKFNLEKIAKKNSIILGNLPYNISSQILVKILKFHKWPPKFNDVIFMFQKELGDKIIGKFKSINYSRLSILTNLRLKIVNKFLVSPNCFLPRPKVKSIIIHFRPKNQKNIHIKRIENLEKVTNILFSNKRKMINKNIKRILNQS

SEQ ID NO: 112012 - protein, 218 aa, Unknown
  Bacterial polypetide isolated from the Sargasso Sea
MDANFCTTDPKALNFSKWDNVHYMPNCVDQSLENLEIYNNKYFKSDVFFAMSHGVHRGVLKKGKIDAREYFINKLIDITPNIKFDCYGLNGNQPIWSDDFLKILSQNKIGINLSQGKSSNFYSSDRFSQLVGNGLLVMIDEKTNIGKFFEKNEIITYKNVSDLSEKIIKYSNDNYTRSRIAKKGRDKYFKYFNSKIVADFLINKTYGFDKKYFWEEII

SEQ ID NO: 112013 - protein, 243 aa, Unknown
  Bacterial polypetide isolated from the Sargasso Sea
SKDNPNVYMSMGITAENVAKKFDISRKEQQDFAISSHYKANLARESNMFDNEIVSITNNDEKINKDGGIRPNTSHEILDGLKLAFDENGTVTAGTASPLTDGASAVIVCEEEYAKKNNLNILARIKSTAVVGCPPELMGLGPINASKKALKRANLSITDIDIVELNEAFASQSLACIKELKMDINKVNIHGGAIALGHPLGATGARITGKVATLLQNNNKKYGLATQCIGLGQGIATVLENIN

SEQ ID NO: 112014 - protein, 318 aa, Unknown
  Bacterial polypetide isolated from the Sargasso Sea
MQEEVVILSGSRTAIGSFGGSLKSVSPIELGTVVAKKALENSGVDKNEFGQVAFGHVINTEPKDMYLSRVISLNSGLPKSVAAMNVNRLCGSGLQAIVSVIQSLTLGDTNFGLAGGSENMSNSPHIIKSNRWGKRMGNTTVEDMMLGALNCPFGTGHMGVTAENVANEYNISREVQDSFSLESQQRASSAIEKGYFKEQIVDIEIKKNTFNVDEHPKNTDLESLKSLKSVFMDKGTVTAGNSSGLNDGAAALVLSTATAAGSNGLKVKAKILGYSHSGVRPEVMGIGPIIAVKKLFEKTGLCEKDFDVIESNEAFAAQ

SEQ ID NO: 112015 - protein, 233 aa, Unknown
  Bacterial polypetide isolated from the Sargasso Sea
MGLTAENVAKKYNLSRKEQQDFAILSHTNASKAQLSKSFDQEITIINKDNIDVISDGGIRPNTSQEILNNLKLVFDENGTITAGTASPLTDGASATLVCEEQYAKDNKLSIIARIKSTAIQGCPPDLMGLGPINASKKALKRANIDIKDIDIVELNEAFASQSIACIKELKINPEIVNIEGGAIALGHPLGATGTRITAKAASLMNKHNKKYALATQCIGLGQGIATVLERVE

SEQ ID NO: 112016 - protein, 309 aa, Unknown
  Bacterial polypetide isolated from the Sargasso Sea
MSKEVYIVDGIRTPIGNFCGTLSTIRTDDLAAHSIASLMARHPHLDLELVEDVIFGCANQAGEDNRNVARMAGLLAGLPISVGGETVNRLCASGMAAVVNAARAIKDDSGELFISGGVEHMTRGPWVMSKSSKAFGRDSKLHDSSFGWRFINPKLEELYGTEGMGVTAENLVEKYNLSREEQDEFALWSQQKVLKAQESGFFDPEICPVEIPQRKKDSIIFSKDEFNRPKTTLDSLAKLKPAFKKNGSVTAGNASGLNDGAAALLISSENALKSQNLKPMARIVSSAIAGVSPSIMGIGPVLASNKALK

SEQ ID NO: 112017 - protein, 334 aa, Unknown
  Bacterial polypetide isolated from the Sargasso Sea
SKINPKEIEDVVIGCAFQVDEQCFNIGRLVTFLSDLDIRVPGMSVDRWCGSSMEAIHIAAGKISMGSGKVFICGGVESMTRVKTGFDPLPYPYSDEEKINPHLYLSMGITAENVAKKYNISRTEQQQFSLESHRKANEAQQKGKFINEITKIGDCETDENIKPNSTMEKLDSLKLAFDQNGTVTAATSSPLTDGAAATLVCEENFAKENGLEILGRIKSTAVEGCDPNYMGLGPIAATRKALERAKLSIKEIDIVELNEAFASQSLACIKDLDINIKKVNLDGGAIALGHPLGATGSRITGKAAQLLKRENKKYALATQCIGLGMGIATIIESV

SEQ ID NO: 112018 - protein, 286 aa, Unknown
  Bacterial polypetide isolated from the Sargasso Sea
MNYKKFFSDELISLKSQGLYRKFRAINRNKSSFPKATERFEGKEREVEVWCSNDYLNLSQHPEVTKTSVEVINQLGTGSGGTRNISGTSTYHVDLENLLADLHNKESALLFPSAYTANQSTLWTLCKNMGGVEVFSDELNHASLIQGIKNADVVTHIFRHNDTDHLEELLKTANANTPKIIVFESLYSMEGLRSPLQKIIEIAKKYNALTYLDEVHSVGLYGPEGRGITAEKGLEDDIDIINGTLSKSFGQMGGYVAANSDIIDYIRSFAPGFIFTSSMNPLIAAA

SEQ ID NO: 112019 - protein, 379 aa, Unknown
  Bacterial polypetide isolated from the Sargasso Sea
MKSAVLVGFKRSPFTIANKGLLAGVRPEDILSQVINDLVKTTKVNKEDIEDIIAGCAYPEGAQGYNIAKIVSFMTGMPEHVGGMTINRWCGSSMQSIHSAAGAISMNAGKVFICCGIESMTSVPINGLNYSPHPELITEQPNVYLSMGLTAENVAKKFNISRKEQQEFAIQSHSKAFKAQSSNAFDEEITIIKNKETEVVLDGAIRPNTNQEILDGLKLVFDQKGTVTAGTASPLTDGASATLVCEEGYAISNNLPILARIKSTAINGCPPELMGLGPIGASLKALKRARLDINDIDIIELNEAFASQSLACIKELNINPDKVNIEGGAIALGHPLGATGTRITAKAAYLMSKQNKQYALATQCIGLGQGIATVLEKVE

SEQ ID NO: 112020 - protein, 378 aa, Unknown
  Bacterial polypetide isolated from the Sargasso Sea
MSSAVIVGFKRSPFTIARKGNLADVRPEDILSQVINDLVKSTNINKEHIEDIIAGCAYPEGEQGFNIAKIVSFMTNMPEHVAGMTVNRWCGSSMQAIHIAAGAIAMNAGNAFICCGIESMSKVPINGLNYSPHSKLNESNPNVYLSMGNTAENVAKKYNLSREVQQDFSISSHKKAFNAQNQNYFNDELTSIHIDNKIIELDEAIRPNTSQEILNGLKLVFDENGTVTAGTSSPLTDGAAATLVCNENYAKKNNLPILAKIISTAVNGCPPELMGLGPIGATKKALKRANLDIKDMDIIELNEAFASQSLACMKDLNIDPEKVNIDGGAIALGHPLGATGTRITAKAAQIMQREKKQYALATQCIGLGQGIATILKSY

SEQ ID NO: 112021 - protein, 230 aa, Unknown
  Bacterial polypetide isolated from the Sargasso Sea
MKKIFKRSFERNDKRELLLFGYSEHQEQPSKELEITPAPSPHMRWNPSRQEWVTYSATRKVRTSFPPEEYCPLCPGAELNFPTEIPFKNFEIAIFPNRWASFNTKNRQMSIEGIDAQPSNGECEVVVYSSNHKDTIAQMSLDRVELLFNAWSDRYINLMKRDDIKYVMPFENRGIECGVTLHHPHGQIYAYPIIPPVIQKEIEAFSKENFIEKLMKNLEQNYYVYQDDYV

SEQ ID NO: 112022 - protein, 678 aa, Unknown
  Bacterial polypetide isolated from the Sargasso Sea
MAELKEVFVPDIGGDEVQVIEICASVGDTLAAEESILTVESDKATMDIPAPFAGVLAELKVAVGDKVSEGTLIAMMQAAGTANVQAAPVAQAAAPAPAPAAPAPVQAAPAPVAAAPATGATQVVEVTVPDIGGDTDVSVIEVLVAAGDKIEVDAGLITLETDKATMDVPSPFAGVVKEVKVAVGDKVSQGSLVIMLEVGGAAPAAAPQASAPAASAPVAQAASSVTQAAAPVAPVAAAAPVVAVKEIQVPDIGDASNVDVIEVLVSVGDDITVDQGLITLETDKATMEVPAPFAGKLLSLTVKVGDKVSQGSVIATIETVTAGSAPVPIAQAATPAPVAQEAAPAPVATAPSRPPVPHHPSAGAPVATGVVHASPAVRRLAREFGVDLTQVTGSGRKGRIMKEDVQAYVKYELSRPKATAATSVAAGNGGGLQVIAAPKVDFSKFGEVEEIPLSRIQKISGPNLHRNWVTIPHVTQFDEADITEMEEFRKQQNDAAAKKKADYKITPLVFMMKAVAKTLQQFPVFNSSLSSDGESLIQKKYYHIGVAVDTPNGLVVPVVRDVDKKGIIELSRELADISIRARDGKLKSADMQGSCFTISSLGGIGGTAFTPIVNYPDVAILGVSKSEIKPKWNGKEFEPKLMLPLSLSYDHRVIDGAMAARFSVTLSGILSDIRTLIL

SEQ ID NO: 112023 - protein, 150 aa, Unknown
  Bacterial polypetide isolated from the Sargasso Sea
MNNSNQLYKNTLDDIEADGLYKKERIITTPQSVKIKTNNNDEVLNFCANNYLGLADNPDVINAAKDGLDKYGFGMASVRFICGTQNLHKELELKISQFFNSDDTILYTSCFDANGGLFETLLSSEDSVISDSLNHASIIDGIRLCKAATL

SEQ ID NO: 112024 - protein, 393 aa, Unknown
  Bacterial polypetide isolated from the Sargasso Sea
MREAYIVKAYRTAVGKAPRGFFKFKRPDELAAETIEYLISQIPGFDKTQIDDLIVGNAMPEAEQGFNVARLISLMGLKVDDVPGVTINRFCASGLETIAVATAKIRSGMSECIIAGGVESMSYIPMTGFKPVPNYNTVSKGKEDYYWGMGLTAEEVANQYSVSREDQDKFAYESHQKAVKALEEKKFDSQIAPITVNEVYLDENLKKKERQTTFNQDQGPRKDTSIEALSKLRPVFSSSGSVTAGNSSQMSDGAAFVMIVSEDMLKKLNIEPIAKLVSYSVAGLPPKIMGMGPVRAVPKALKQANMKINDIELIELNEAFASQSIAVINELNLDKNIINVNGGAIALGHPLGCSGAKLSVQLFDEMKQRKLKYGMVTMCVGTGQGAAGIFEIL

SEQ ID NO: 112025 - protein, 418 aa, Unknown
  Bacterial polypetide isolated from the Sargasso Sea
MLKEIKLPDLGEGIDSADVSEILVSPGDNVSVDDIILVLESEKASMEIPSEDNGVVKKVFVSSGDVVKTGEILIMLEVAKSSESKVEKKDIKEEETTSQISDTKEKPSSAVASEEKPEKRTLDKTFASPGVRRLARELEIDLSGVGATGPKGRITKDDLHAFIKQKMSQGGAPIGYKQPEIDFSKWGDIEIKPLTKIQKITGQRLQQSWQTIPHVTQFDEADISVLNNIREEKKAEGVKKNIKVTFLPFIMKAVVKSLKEFPVFNSSLDHTGENLVIKDYINLGIAVDTPTGLVVPVIKNANKKSILGLSKDLMDISERARSGKLKPDELKGGTFTVSSLGGIGGTYFTPIINPPEVAIMGISKSVWRTVYNHNSKEIIPTFTMPFSLSYDHRVIDGAIGAAFTSFFSKALFDSKTFE

SEQ ID NO: 112026 - protein, 321 aa, Unknown
  Bacterial polypetide isolated from the Sargasso Sea
VAEAKPVQAPVESKPAAVVKAPQAPVAREASERPLASPAVRKHALDAGIQLRLVQGTGPAGRILHEDLEAYLHQGPATSTSAANPYAERNDEHQIPVIGMRRKIAQRMQDATRRAAHFSYVEEIDVTALDELRVHLNEKHGATRGKLTLLPFIVRAMVVALRDFPQINARYDDEAQVITRLGAVHVGVATQSDVGLMVPVVRHAEARSLWGTAEEIARLANAARTGKASREELSGSTITLTSLGALGGIVSTPVLNLPEVAIVGVNRIVERPMVIKGQIVVRKMMNLSSSFDHRVVDGMDAAQFIQAIRGLLEQPASLFLE

SEQ ID NO: 112027 - protein, 391 aa, Unknown
  Bacterial polypetide isolated from the Sargasso Sea
MSRDVVIVGAARTPIGKFRGALAGVRADHLGAHVIDELVKRVGLAPEVVNDVIFGCVTQIGEQSANIARTSLLGAGWPDRIPGLTIDRKCGSGEEAVHVAAGLIAFGAAEVVVAGGAENMSRVPMGSNRDLHGEAFGWMASERYELTSQGEAAERLCDKWELGREQLDAFAVESHRRAAAAAAEGWFAREIVPVPVQRLREKSQEGEAPLFSADETIRPGTHAEKLATLKTSFRSQGRLTAGNSSQISDGAAALLLMSAGQAKALGVKARARVRAVATVGADPTLMLTGPIAATREVLAKAGLGIDDIDLFEVNEAFASVPLVWMKELGVPHSKLNVNGGAIALGHPLGASGARIMTSMLHELERRGARYGLQAICCAGGLGTATIIERLD

SEQ ID NO: 112028 - protein, 61 aa, Unknown
  Bacterial polypetide isolated from the Sargasso Sea
DDDPRVNPNGGAIALGHPLGMSGARLVTTAMYQLQRTGGRYALCTMCIGVGQGIALVIERV

SEQ ID NO: 112029 - protein, 312 aa, Unknown
  Bacterial polypetide isolated from the Sargasso Sea
MTDVVICGFSRSPFTPAHKGGLSKIRPDDLAAQVVKGLIEKTGIKKEDVEDLILGCAFPEGEQGMNLARNVVFLSGLPNSVGGVTVNRFCASSMQAIHQAAGSIISGSGDVFIAAGVESMSRVPMGGFNPMMNPSLVDLDAYIGMGHTAENLAKKYSIPRERQEEMALSSHQKAGEAISNNSFDEEIVSIGDISQDGCVRSDTNLESMAKLKPAFDKGGVVTAATSSPLTDGAAAVLVCSEKYAKDNNLNIMAYIRGMAISGCDPDIMGIGPVLSSMKALDRAGLKLSDMDFIEMNEAFAAQSLACIDELGV

SEQ ID NO: 112030 - protein, 377 aa, Unknown
  Bacterial polypetide isolated from the Sargasso Sea
MKKIFILTGEPSGDKLASEVIKQIKLKESNIEYLCLGGENLKSLNIESISDLKDITYIGITSVLLNIFKIKKIINETVKKIVEFKPDILFSVDSPDFSLRVAEKVKQQNPNIKTIHYVSPQIWVWRKDRIKKYKNFIDHMLLLFKFEKKYYDEENMNSTFVGHPLLELKSNKVDISNILPKDKKIISIFPGSRISEIDLLLPILVDFMKLMNKKYNNFYFVIHSTELMRNIILKKLSNFKDDNYQIVTNPNIKEDIIKHSFFAVSKSGTISLEICKYEVPSIIIYKMNPINFFFIKRMVKTKFANIINIINQKEIIPELLQSECNSKEIFNSVNYFIQKPEMIKKQKKLVKKTVKSMQNDELSSLNAANIVLNYIKN

SEQ ID NO: 112031 - protein, 152 aa, Unknown
  Bacterial polypetide isolated from the Sargasso Sea
MSKLKLKNNTFVHRDFHVSNLMKLKKKIGILDSQDAVYGNKAYDLASLIDDVRLKTSLKLKNSIYNYYVYLNKKKINKNHFRNDFEILSVLRNLKVIGIFTRLAVRDDKKSYLKLIPYAWKLIENRINNNLIFEDLKNYLDANFSKKIRMKK

SEQ ID NO: 112032 - protein, 436 aa, Unknown
  Bacterial polypetide isolated from the Sargasso Sea
MSDRQQVTNAKGERIAIVAGLRTPFAKQATAFHGVSALDMGKMVVNELLVRSELDPKLIEQLVYGQVVQMPAAPNIAREIVLGTGMDVSTDAYSVTRACATSFQSAVNVAESIMNGNIDIGIAGGADSSSVLPIGVSKKLAHALVDLNKARTFGQKLQIFRRLGIKDLLPVPPAVAEYSTGLSMGQTAEQMAKTYNISRADQDALAHRSHTLASETWASGHLREEVMVAHVPPYKQFIERDNNIRENSDLSSYAKLRPAFDKKHGSVTAANSTPLTDGASAIILMSEGRAKALGYQPIGYIKSYAFTAIDVWQDMLMGPSYATPLALKRAGMELEDLTLIEMHEAFAAQTLANMQMFASKKFAEEKLGRNRAIGDIDMSKFNVLGGSLAYGHPFAATGTRLITQVCRELKRRGGGTGLATACAAGGLGAAMIVEVE

SEQ ID NO: 112033 - protein, 277 aa, Unknown
  Bacterial polypetide isolated from the Sargasso Sea
MQRDVVVVSGVRTAIGGFGGSLKDFPPTDLAARVVREALARANVSGDEVGHVVFGNVVHTEPKDMYLARVAAINGGVAQHAPALTVNRLCGSGLQAIVSAAQSVLLGDADIAIGGGAENMSRAPYSMPAARFGQRMGDARLVDMMVGALNDPFQSIHMGVTAENVARKYEISREAQDALALESHRRAAHAITSGYFKDQILPITIPSKKGDVVFDTDEHARMNATAEDFSKLKPVFVKENGTVTAGNASGINDAAAAVVLMERSVAEKRGIKPLARL

SEQ ID NO: 112034 - protein, 53 aa, Unknown
  Bacterial polypetide isolated from the Sargasso Sea
DKIKKVNGQFIVRKMLPISLSYDHRVIDGAEGARFCVHLSKSLGKDFAFKLAV

SEQ ID NO: 112035 - protein, 209 aa, Unknown
  Bacterial polypetide isolated from the Sargasso Sea
ISSHEKASNADSKGNFKDEITSINNDTIDVTKDGGIRPGTTQEILDGLKLAFDQNGTVTAGTSSPLTDGAAATLICEENYAKENGLDILARIKSCAVNGCDPEVMGLGPIGASRKAMDRAGINSADLGVVELNEAFASQSLACVQDLELDKKIVNLDGGAIALGHPLGATGARITGKAAQLLKREGKKYALATQCIGLGQGIATVLEAV

SEQ ID NO: 112036 - protein, 176 aa, Unknown
  Bacterial polypetide isolated from the Sargasso Sea
MDVINNYSEYELADIFYKFGEEKFSRKIAKKIINARKIKDIENTKELSLLIKQSYKNKSKIDPATRTFQALRIYVNDELNELSKALEKSLNLLKVKGKIIIVSFHSLEDRLVKDFFNHNSGKRWRSSRHYPELADDGPITLKLITKKPIRPSDLETNINPRSRSARLRVAEKISIN

SEQ ID NO: 112037 - protein, 228 aa, Unknown
  Bacterial polypetide isolated from the Sargasso Sea
NKNLFVALIPARGGSKGLKKKNLYPVNNKPLISWTIESAISSHYLEQIFVSSDDNSILEIASKEGVNCIERPANLAEDTSSMESVIMHSIEQIDKQGIGFKYLILLQPTSPLRDSKDIDLACKKFIQLKANSLISVTNVESSVLKTLVKDDNGFLRPAFDNKFPSMNRQQLPLAYKPNGAIYIINKKLFLNNPTLFQKDTAMYEMKENKSIDVDSINDIHTIEKLNLI

SEQ ID NO: 112038 - protein, 436 aa, Unknown
  Bacterial polypetide isolated from the Sargasso Sea
MSDRQQVTNAKGERIAIVAGLRTPFAKQATAFHGVSALDMGKMVVNELLARSELDPKLIEQLVYGQVVQMPAAPNIAREIVLGTGMDVSTDAYSVTRACATSFQSAVNVAESIMTGNIEIGIAGGADSSSVLPIGVSKKLAHALVDLNKARSFGQKLQIFRRLGIKDLLPVPPAVAEYSTGLSMGQTAEQMAKTYNISRADQDALAHRSHTLASETWASGHLRDEVMVAHVPPYKQFIERDNNIRENSDLSSYAKLRPAFDKKHGSVTAANSTPLTDGASAIILMSEGRAKALGYQPIGYIKSYAFTAIDVWQDMLMGPSYATPLALKRAGMELEDLTLIEMHEAFAAQTLANMQMFASKKFAEEKLGRNRAIGEIDMSKFNVLGGSLAYGHPFAATGTRLITQVCRELKRRGGGTGLATACAAGGLGAAMIVEVE

SEQ ID NO: 112039 - protein, 249 aa, Unknown
  Bacterial polypetide isolated from the Sargasso Sea
DPTPELDKNNPNVYMSMGVTAENVAKKFNISRKEQQEFAILSHEKAYQAQKDKNFDNEITPININNNEIKLDGAIRPNTTQEILDGLKLVFDENGTVTAGTSSPLTDGASATLVCEEDYAKANNLDILAKIKSMAVQGCPPELMGLGPINASKKALRRANLNIDDIDIVELNEAFASQSIACIKDLDINPSKINLNGGAIALGHPLGATGSRITAKAASLLLDKNKKYALATQCIGLGQGIATILENPN

SEQ ID NO: 112040 - protein, 320 aa, Unknown
  Bacterial polypetide isolated from the Sargasso Sea
MNVYLCNPNRSAIGRYAGGLASIRPDDLLAQVIRAVLTQCPQLPAESIDDAFFGCANQAGEDNRNVARMATLLAGVPFSVPATTINRLCGSGMDAIGLAYRSIAAGEADLILAGGVESMSRAPFVMGKAQSRFDRSQILEDTTMGWRFINPALKQQYGTETMPETAENVAAKFSISREAQDNFAYQSQQKAAAAQASGRFAKEITPVTFQPRKGDAIVIDKDEHIRPQTTLEALAKLKAPFRENGSVTAGNASGINDGASAMLVASEAAVERYNLTPVAQIKGMTTAGVEPTIMGIGPVPAVNKLLAKQKLSLDDIGTIE

SEQ ID NO: 112041 - protein, 83 aa, Unknown
  Bacterial polypetide isolated from the Sargasso Sea
IDVVELNEAFASVALAWLAELGYPHEKTNPNGGAIALGHPLGATGARLMTTLLHELERTQGRYGLQAMCEGGGLANVTIIERL

SEQ ID NO: 112042 - protein, 100 aa, Unknown
  Bacterial polypetide isolated from the Sargasso Sea
MHLKKLLKRANLSITDIDIVELNEAFASQSLACIKELNMDISKVNIHGGAIALGHPLGATGARITGKVATLLQNNNKKYGLATQCIGLGQGIATVLENIN

SEQ ID NO: 112043 - protein, 354 aa, Unknown
  Bacterial polypetide isolated from the Sargasso Sea
NLNKNTNLKNLKILHVTNFNERHNGRLFYNSGRRINNGFIRLDHSVLELSDRDIVSYSRKFNDFKGANKLNNKLLEIISNYLPDIIVFGHADLIENETIEFIKKNYPDIKLCQWFLDRMDGEWLKNKNRFIKKIDLMHANFCTTEPKSLKFSKYKNVFYMPNCVDQSLEKLEIYNNNYFKSDVFFAMSHGVHRGVLKKGKTDAREHLIKNLINITPNIKFDCYGLDGNQPIWSDDFLKIMSQNKIGLNLSQGKSSNYYSSDRFSQLIGNGLLVMIDEKTKIGDFFEKDEIVTYNNISDLSEKIIKYSEDNYARKKIAKKGRVKYFKYFNSKIVADFIINKTFGINKKYFWEKFL

SEQ ID NO: 112044 - protein, 243 aa, Unknown
  Bacterial polypetide isolated from the Sargasso Sea
PYSDKEKQNPNLYLSMGITAENVAKKYNISRTEQQEFALESHRKANEAQQKEKFVGEITKIDNCEKDENIRPNSTMEKLDSLKLAFDQNGTVTAATSSPLTDGAAATLICEENFAKENGLEIFGRIKSIAVEGCDPKFMGLGPISASKKALNRAKLRIEDIDIIELNEAFASQSLACIKDLKINTKKVNLDGGAIALGHPLGATGARITGKAAQLLKRENKKYALSTQCIGLGMGIATIIESI

SEQ ID NO: 112045 - protein, 365 aa, Unknown
  Bacterial polypetide isolated from the Sargasso Sea
KSIESRNNLDTADVDDVVLGCVHPIGEQGADIARTAVLEAKWDQTVSGVQVDRFCASGLEAVNIAAAQVMSGQSDLSVGGGVESMSRVPLGSSGGAWMADPTVAYNSYFVPQGISADLLATKYNYSRNDVDSYAVSSQQRASEAWKNNKFKNSIIPVKDQNNLPILEVDEYMRPDTTMQSLGALEPSFEKMGNHGFDDVAILKYPELESIKHVHHAGNSSGIVDGAAGVLLGNKKMADKYELKARAKIRSFASIGSEPTIMLTGPADSAEKALKKANMNASDIDLFEMNEAFAAVVLRFMEALNIDHSKVNVNGGAIALGHPLGATGAIILGTVLDELERRDLSTGLITLCVGAGMGTATIIERI

SEQ ID NO: 112046 - protein, 375 aa, Unknown
  Bacterial polypetide isolated from the Sargasso Sea
MIESVIIGAKRSPIGIKNGKMVGIRPDDLASQVVRGLMEKIKIEPSHVNDLVLGCAFPEGSQGMLMAKGVAILAGLPETVGGSVVNRFCGSSMDAVHQISSRIETGDIEMGIAVGVEDMFSVPMGGFNPDFHPELAEQEYYIGMGETAEILAREGSIPRDEQEEFAIKSHEKALDAWKNGRFDDEVIPTDMYDEDIIHKDEGPRVPDLEKIKSLSPAFLENGTITAATSSPVSIGASAIMITSRTYAEKNSIQIKAAIKGRSIVGVDWRRMGMGPLPATENVLKSLNMTINDIDVIELNEAFSAQALYVIKEGGWDARKVNLNGGAIALGHPLGCSGARIITTLLSVMEQKNSRTGLATMCIGTGQGIATILERD

SEQ ID NO: 112047 - protein, 260 aa, Unknown
  Bacterial polypetide isolated from the Sargasso Sea
MNHGSIIDGVRLTKASRAVYPHNDMEALERVLRQNKDSERKLIITDGVFSMDGDIAPLDEIADLAEEYGAMTFVDDCHGEGVLGEGRGIVSHFGLQGRVTFEVGSFSKALGVQGGILAGSDDVRTHALNHSRSWLLSGSQPPGVAAAQKAAIEVLMSEPEHVRRLWDNTTYFRDELKSMGFDTGVSETPIVPVMCGESRKAQELSSLMRDEGVMVGAIVFPMVARDMARVRTQMSAGLSRDELDSVLESFDRCGRKIGLI

SEQ ID NO: 112048 - protein, 375 aa, Unknown
  Bacterial polypetide isolated from the Sargasso Sea
MYNSVIVGYSRSPFAMANKGKLIDVKPVNLLAEVIKNLVSQSKINPKEIDDVVIGCAFQVGEQCFNIGRLVTFLSDLDMRVPGMSVDRWCGSSMEAIHIAAGKIAMGSGKIFICGGVESMTRVRTGFDPLPYPYSDEGKQNPHLYLSMGITAENVAKKYNISRTEQQKFSLESHRKANEAQQKEKFISEITKIGDCETDENIRPNSTMEKLDNLKLAFDQNGTVTAATASPLTDGAAVTLICEENFAKENGLEIFGRIKSTAVEGCDPNYMGLGPISATKKALERAKLSMKDIDIVELNEAFASQSLACIKDLEIDIKKVNLDGGAIALGHPLGATGARITGKAAQLLKRENKKYALATQCIGLGMGIATIIEAV

SEQ ID NO: 112049 - protein, 168 aa, Unknown
  Bacterial polypetide isolated from the Sargasso Sea
MEKLNSLNLVFDQNGTVTAATSSPLTDGAAATLICEENFAKENGLEILGRIKSTAVEGCDPNFMGLGPIVASKKALERAKLSIKDIDIVELNEAFASQSLACIKDLDIDINKVNLDGGAIALGHPLGATGARITGKAAQLLKRENKKYALATQCIGLGMGIATVIEAV

SEQ ID NO: 112050 - protein, 203 aa, Unknown
  Bacterial polypetide isolated from the Sargasso Sea
MLPLDYFLFLQIILFLFITPGTPRIVIISLSISFGVRNCVWVALGDVTANILQASLIIFLLHSFFIDNPNLLNFIKWIGVAYLFYLATDVYFSKVKNLKNVNSEKSRLSLFKDGFLVAGTSPKAWAFFPLIFPQFINFETNYVVQFLILIITYVVLDFLSLICYAFLANKLIDWLKANPKTINTISACVLFSIGVFIALTQQY

SEQ ID NO: 112051 - protein, 675 aa, Unknown
  Bacterial polypetide isolated from the Sargasso Sea
MAELKEVFVPDIGGDEVQVIEICASVGDTLAAEESILTVESDKATMDIPAPFAGVLAELKVAVGDKVSEGTLIAMMQAAGASAQAAAPVAQAAAPAPAPAAPAPVQAAPAPVAAATATGATQVVEVTVPDIGGDTDVSVIEVLVAAGDKIEVDAGLITLETDKATMDVPSPFAGVVKEVKVAVGDKVSQGSLVIMLEVGGAAPAAAPQASAPAASAPVAQAAPAAPIAPVAAAAPVVAVKEIQVPDIGDASNVDVIEVLVSVGDMITADQGLITLETDKATMEVPAPFAGKLLSLTVKVGDKVSQGSVIATIETVTAGTAPVPVAQAAAPVSAPVAQEAAPAPVAAAPSRPPVPHHPSAGAPVSTGAVHASPAVRRLAREFGVDLTQVTGSGRKGRIMKEDVQAYVKYELSRPKATAATSVAAGNGGGLQVIAAPKVDFSKFGEVEEIPLSRIQKISGPNLHRNWVTIPHVTQFDEADITEMEEFRKQQNDAAAKKKADYKITPLVFMMKAVAKTLQQFPVFNSSLSSDGESLIQKKYYHIGVAVDTPNGLVVPVVRDVDKKGIIELSRELADISIRARDGKLKSADMQGSCFTISSLGGIGGTAFTPIVNYPDVAILGVSKSEIKPKWNGKEFEPKLMLPLSLSYDHRVIDGAMAARFSVTLSGILSDIRTLIL

SEQ ID NO: 112052 - protein, 337 aa, Unknown
  Bacterial polypetide isolated from the Sargasso Sea
MRNAVIVGYKRSPFTFARKGEMANIRPEDILSQTINQLLNEIQINKNDIEDIITGCAYPEGAQGNNIAKIVSFMTDMPEHVAGMTVNRWCGSSMQAIHDATGAIAINSGDVFLCCGVESMTFIPMNGLTYDPHPQLNKDNPNVYMSMGITAENVAKKFNISRKEQQDFAISSHSKANLARESNLFDNEIVSITNNDEKINKDGGIRPNTSHEILDGLKLAFDENGTVTAGTASPLTDGASAVIVCEEEYAKKNNLNILARIKSTAVVGCPPELMGLGPINASKKALKRANLSITDIDIVELNEAFASQSLACIKELNMDTSKVNIHGGAIALGHPLG

SEQ ID NO: 112053 - protein, 192 aa, Unknown
  Bacterial polypetide isolated from the Sargasso Sea
DAGGKKKTRSETIDTDEGPRKETSIDALSKLRPAFRLNGQVTAGNSSQTSDGSAFVVVTSEKMVKELNVKPIARMAAYSTAGVEPRIMGIGPAKAVPKALLQAGLKLQQIDQVELNEAFAAQALSVMKAMDLDKEIVNVNGGVVALGHPLGMTGAMLSIKLINEMKRRKQKYGIVTACVGGGQGVCGVFENL

SEQ ID NO: 112054 - protein, 326 aa, Unknown
  Bacterial polypetide isolated from the Sargasso Sea
SLNNTDNHLDVSDNLKTNSNEKENIIDSSNLNNDNSSIEQTEISRKAISPLAKRIAIQNNIDINLIIGTGPRGRIVKDDVRNYLNKNNNLNKKHYIKNKEDIIKKPSLMRKVIAERLSYSKKEVPHFYLTVDCNVDELLKGRHLINNDVEVKDKISINDIVIKALGMALYTVPEANCSWKEDEITYYGSVDISVAVAVDDGLFTPVLKNVDFLKLSEISAKMKDFVVRANSGKLLPNEYEGGNFSISNLGMYEINNFSAIINPPQSGILAVGSITKKPIIINDEIKIANIMTCQLSGDHRVIDGAVGAKLLKEFKSIIENPIKMIV

SEQ ID NO: 112055 - protein, 53 aa, Unknown
  Bacterial polypetide isolated from the Sargasso Sea
KWRYWGVSRTKEKNEKLILPLSLSYDHRVIDGAAGAAFVVAFSNVLKDIRKFK

SEQ ID NO: 112056 - protein, 55 aa, Unknown
  Bacterial polypetide isolated from the Sargasso Sea
TFEKIRKVDGQFIARKMLPVSLSYDHRVIDGAEGARFCVHLAESLGKDFAFKLAV

SEQ ID NO: 112057 - protein, 286 aa, Unknown
  Bacterial polypetide isolated from the Sargasso Sea
TPTGGLFETILGAEDAVISDSLNHASIIDGVRLCKAKRYRYANNDMAELEAQLKQADADGARFKLIATDGVFSMDGVIADLKSICDLADKYNALVMVDDSHAVGFVGKNGRGTHEYCDVLERVDIITGTLGKALGGASGGYTSGKKEIIEWLRQRSRPYLFSNSLAPSIVTASIKVLDLLANGDALRAKLWDNVSYFREKMSAAGFTLAGKDHAIIPVMLGDAKVAAEMARRMLAEGIYVVGFSFPVVPKDQARIRTQISAAHDKEHLDKAITAFIRIGKEMGVIA

SEQ ID NO: 112058 - protein, 283 aa, Unknown
  Bacterial polypetide isolated from the Sargasso Sea
NNGSSTPDVPVIIDGVRTPFLRSNGAFSNFMAYDLGRLAISGLMGKTGLSPKEVDQVIYGIVVPDPSTPNIARECMLGAGLSDSTPAHTISMACITSNMAATTAADQIRLGKCKTAVIGGVDHMSDPPIRVSRNLRQALIRLQKAKSPVQVFNQIRKLSLKDLMPQVPSITEFSNGLTMGQGCERMAMAMGATREESDEFAARSHQLASKAQQEGIYEGDIIPIKVPPKFGVVDQDNGPRGDTTVENLSKLRPAFDKKFGIVTAGSASFLTDGASAVLMMGQK

SEQ ID NO: 112059 - protein, 105 aa, Unknown
  Bacterial polypetide isolated from the Sargasso Sea
GLRSINASKKALQRAELTIDDIDIIELNEAFAAQSLACIRELNMDENKINIHGGAIALGHPLGATGSRITGKTASLLKKNGKKYGLSTQCIGLGQGIATVLENIN

SEQ ID NO: 112060 - protein, 297 aa, Unknown
  Bacterial polypetide isolated from the Sargasso Sea
MRELLNRNPHLDASVIDDVIFGCANQAGEDNRNVAHMATLLAGYPYGVSGTTINRLCGSGLDAIGFAARAIKAGDADLMIAGGVESMSRAPFVMGKATAPYQRQAEMFDTTIGWRFVNPLMQQQFGTDSMPETAENVAELLNISRRDQDAFAYRSQQRTAKAQRDGILAQEIVPVQIIGKKGAVSAVREDEHPRAETTLEQLASLKTPFRKGGVVTAGNASGVNDGAAALIIASQQQAAAQGLTPRARIVAMATAGVEPKYMGLGPVPAVRKVLERAGLNINDMDVIELNEAFAAQA

SEQ ID NO: 112061 - protein, 266 aa, Unknown
  Bacterial polypetide isolated from the Sargasso Sea
RRWTRCIQSSHWGETADNIAKEMQISREEQDAFAVESHRRAVNAMNTGKFADEIVPISVPQRKGDAIVVDTDEHPRYKKDGDNYVLTTDADDMARLRPAFTKNGTVTAGNSSGVNDGAAAVLMMSKKKTEELGLKPKLRWVASNVAGVDPGVMGYGPVPATEKLLARQRLKIEDIDLIELNEAFAAQIIGCMKRLGVDHTNTNVNGGAIALGHPTGASGARIMVTLMHEMERRAPDRDKSKPFYGLCSLCVGVGMGVSTLVEWIGD

SEQ ID NO: 112062 - protein, 73 aa, Unknown
  Bacterial polypetide isolated from the Sargasso Sea
TLLGSHDAIISDELNHASIIDGIRLIKAKRYRFKNRDMNDLELKLSERNEYRNVMIATYGVFSMDGHIAKIDK

SEQ ID NO: 112063 - protein, 130 aa, Unknown
  Bacterial polypetide isolated from the Sargasso Sea
RAKELEVKPLAKIVDAELVGCDPVLMLEGPIPVTEKMLAKTGLDINDIDVFEINEAFASVVISWAKSVGADMDKVNPNGGAIALGHPLGATGCFLTTKAVHELHRTNGKYGLIAMCCGGGLGTGTIISKV

SEQ ID NO: 112064 - protein, 217 aa, Unknown
  Bacterial polypetide isolated from the Sargasso Sea
MRTTPFLAHLQQQIEDVKVQGLYKAERVISSQQQATVTVGHEQVLNFCANNYLGLANNPELIKAAQQGLDSHGFGVASVRFICGTQDIHKELEQKISGFLGTEDTILYSSCFDANGGLFETILGAEDAVISDSLNHASIIDGVRLCKAKRYRYANNDMAELEAQLKQADADGARFKLIATDGVFSMDGVIADLKSICDLADKYNALVMVDDSPCCRF

SEQ ID NO: 112065 - protein, 193 aa, Unknown
  Bacterial polypetide isolated from the Sargasso Sea
KIVQKKKKKFLDRDEHPRSDTLLEKLSTLPTPFRNNGSVTAGNASGVNDGSAALIIASEKAIKEYNLTPKARILSSAATGVEPSVMGIGPVSATKKVLSLSNINLNNINIIELNEAFASQALATMRDLSLSDDDERVNINGGAIALGHPLGMSGARLVLTATEQLHQSKNNKLALCTMCVGVGQGSAIILENL

SEQ ID NO: 112066 - protein, 211 aa, Unknown
  Bacterial polypetide isolated from the Sargasso Sea
QKALKAISNGRMSKEITYVKVKQKRSDDLQIDKDEHPRETTNEKLSNLPTPFKINGTVTAGNSSGVNDGAAALIIADEEAIKKHNLTPIAKIISAASSGVQPSYMGIGPVTASQKVLKKSNISIDNIDVLEINEAFAAQVLACLREFGVPDNDERVNPNGGAIALGHPLGMSGTRLVLTAAKELEITNKKYALCTMCVGVGQGSAIILEKV

SEQ ID NO: 112067 - protein, 285 aa, Unknown
  Bacterial polypetide isolated from the Sargasso Sea
MSFDLATRLAERQAADLFRQRPLLQTPQGPHVRADGQELLAFCSNDYLGLANHPEVIRAMQQGAEKWGVGGGASHLVIGHSTPHHELEEALAAFTGRPRALLFSTGYMANLAVVTALLGQGDSVLQDRLNHASLLDAGLLCGARFSRYLHNDAVSLANRLRKVTGNCLVVTDGVFSMDGDLADLPALCAEARAAQAWVMVDDAHGFGPLGTTGGGIVEHFGLGQDDVQVLVGTLGKAFGTAGAFVAGSEELIETLIQFARPYIYTTSQPPAVACATLKSLELLRS

SEQ ID NO: 112068 - protein, 321 aa, Unknown
  Bacterial polypetide isolated from the Sargasso Sea
PALTVNRLCASGLAAVNIAANKIKTGEADLMIAGGVESMTRAPFIMPKPEQAFSRAALVEDTTIGWRMVNPRMKVEFGIDSMPETAENVAEDYDISRADQDAFAARSQERAAKAQSSGRFAKEIVPVTIPQRRGDDILFDRDEHPREVSLEKLSKLRASFRQGGSVTAGNASGVNDGAAATLIASAAACKAYGLKPRARILGGASAGVTPRVMGIGPVPAVQKLLARLNQSIEAFDVIELNEAFASQSLAVLRELGLSDDAEHVNPNGGAIALGHPLGMSGTRLIGTALIEMEEREARLALATMCVGVGQGEALAIERMTV

SEQ ID NO: 112069 - protein, 255 aa, Unknown
  Bacterial polypetide isolated from the Sargasso Sea
DVKTLDMMLGALNCPFGTGHMGVTAENVAREQNVSRREQDEFALESQKRAASAASNNLFDSQINPIEIKVKRDLVPFEKDEHPKATTLDDLASLRPVFEKDGTVTAGNASGINDGAAAIVLSSAEAVEKYGLKPKAKILGYGHAGVRPEVMGVGPIPAVQNLLKKTGLVVSDFDVIESNEAFAAQAIAVNRGLSLDPAIVNPNGGAIALGHPVGATGAIITLKALYQLDNINGKRALITMCIGGGQGIALAIERI

SEQ ID NO: 112070 - protein, 276 aa, Unknown
  Bacterial polypetide isolated from the Sargasso Sea
ERYEELVAGGLNWDPPTLESASEPECTVDGQQMIMLSANNYLNLTTHPKVVAAMIEATQKYGAGSGSVRAISGTMDIHLQAEEAVAKFKGVEASLIYSAGYTANVGLIPTLVQGKQDVIISDELNHGSIIDGVRLTKAQREVYPHNDMDGLEQALKNHSDADRKLIITDGVFSMDGDICPLDEITELAEAHDAMVMVDDCHGEGVMGSRGAGIVDHFSLQGRVDFEVGSFSKALGVQGGILAGSAQMRLHALNHSRSWLLSGSQPPGVAAAQKAAV

SEQ ID NO: 112071 - protein, 295 aa, Unknown
  Bacterial polypetide isolated from the Sargasso Sea
GTEAMSRAPLIFKPQMANWFSRLSRAKTFGAKMGTAMQFRPGFLAPIISLLHGLTDPLCGYNMGQTAEKVAYQFGVTREDMDAFAAHSHQLAVQAREKGYYGSLATLYSHRGRAFEKDDGVRDDSSIAKLSKLKPVFDRKYGMVTAANSSQITDGAALLLLASEEAVKQHNLDVLGIIKDVEWAGLDPTVMGLGPVMASTPILQRHDLSLDDVDYWEINEAFAAQVLGCLGAWEDKAFCHKHFGMDEALGTVDRAKLNVDGGAIALGHPVGATGARLVLRMLDILNREKKHEVLP

SEQ ID NO: 112072 - protein, 192 aa, Unknown
  Bacterial polypetide isolated from the Sargasso Sea
DANGALIKVLHDEVIRPETSMESLAALRPVFDPANGTVTAGTSSALSDGASAMLVMEESKARALGLPIRARIRSMAVAGCDAAIMGYGPVPATQKALARAGITVNDLDVIELNEAFAAQSLPCVKDLGLLDVVEDKINLNGGAIALGHPLGCSGARISTTLINLMEHKDATLGLATMCIGLGQGIATVFERV

SEQ ID NO: 112073 - protein, 261 aa, Unknown
  Bacterial polypetide isolated from the Sargasso Sea
MPFDLAARLAQRQAEDLYRRRPLLESPQGPEVVIDGQPMLAFCSNDYLGLANHPEVIAALRAGAERWGVGGGASHLVNGHCAPHHELELALAEFTGRPRALLFSTGYMANLGTVTALVGKGDSVLEDRLNHASLLDAGLLSGARFSRYLHNDAASLASRLEKAEGNTLVVTDGVFSMDGDLADLPSLCATARQQNAWVMVDDAHGFGPLGATGGGIVEHFGLSMEDVPVLVGTLGKAFDTAGAFVAGSEELIETLIQFARP

SEQ ID NO: 112074 - protein, 232 aa, Unknown
  Bacterial polypetide isolated from the Sargasso Sea
NTEDEVLLKDGLVDAFGSYHMGITAENVAEKWQITRSMQDEFSINSQLKALKAMKENKFKEEIAGGLINHDDDEHPRAGLTLEKLNQMSPVFKKDGTVTVANSSGINDGAAGVVVMSEKETKKRSLKPLAKIISWATSGVEPAVMGTGPIPASKKALSKAGWGINDVDLVEANEAFAAQSLAVMQELNIPKEKLNVNGGAIALGHPIGATGTRILVTLIHEMKKRKSNKGLA

SEQ ID NO: 112075 - protein, 298 aa, Unknown
  Bacterial polypetide isolated from the Sargasso Sea
PEGPQGMLMARSISILADLPLSTGGKVVNRFCGSSMDSVHQVSQAVIAGDIKAGIASGVEDMFTVPMGGFVPDFNEQLNEKEFYIGMGETAENLAKELDISREDQENFSILSHKKALDAIGSNKFDNEIIPVEFNGQTFSKDEGPRVPDVDKMKSLSPAFDAAGSITAATSSPISLGASAILIGGQGMADSSNSAFEIVSRSIVGVDWKTMGEGPLPATDKALKNAGLSMDDIDVIELNEAFAAQSLYVIRKGGWDMDKINLNGGAIALGHPLGCSGARILTTLTNVMMQKDVELGLA

SEQ ID NO: 112076 - protein, 284 aa, Unknown
  Bacterial polypetide isolated from the Sargasso Sea
MPWRSVRTLFGAEDAIISDALNHASIIDGVRLCKAKRYRYANNDMAELEAQLKQADADGARFKLIATDGVFSMDGVIADLKSICDLADKYDALVMVDDSHAVGFIGENGRGTHEYCGVMDRVDIITGTLGKALGGASGGYTSGKKEVIDWLRQRSRPYLFSNSLAPSIVAATIKVIDMLAEGHALRSSLKENSQYFRERMSAAGFTLAGADHAIIPVMLGDAKLAAEMASRMLAAGIYVVGFSFPVVPKGQARIRTQMSAAHTREQLDKAIDAFIRIGRELDII

SEQ ID NO: 112077 - protein, 266 aa, Unknown
  Bacterial polypetide isolated from the Sargasso Sea
KERTITTSQNININTEEGGEVLNFCANNYLGLANNNEIINETKKALDQNGFGMASVRFICGTQDIHKKLQKRISDFFGTDDTILYTSCFDANGGLFETLLGQEDAIISHSLNHASIIDGIRLCKAKRLRYKNNDMNDLQSKLLECQDSRIRLIATDGVFSMDGYIAKLDKITELAKKYDAMVMVDDSHATGFIGKTGRGSAEHCGVMNKIDIWTSTLGKALRGASGGFTTGRQEIIDLLRQRSRPYIFSNTVAPSIVAASIKVFDI

SEQ ID NO: 112078 - protein, 288 aa, Unknown
  Bacterial polypetide isolated from the Sargasso Sea
MQAIQEWGFGLGSVRFICGTQTIHKELEQSVSNFLNKDDTILYSSCFDANGGLFETILDEEDAVFSDELNHASIIDGIRLCKAQKHRYKNCDMNDLQEKLSDSDARVKLIVTDGVFSMDGTIAPVDSIVQLAKKYNALVMVDDCHATGFIGANGKGSGEHCGVLDKVDIISSTFGKALGGASGGFISASKNIVDTLRQKSRPYLFSNSLAPPLVVACFKALEIINDNKNLITKLHDNTLYFREKIKEIGYEVKGDSHPIVPIMIYDAKQAVALSEMLLEKKYLCNSIF

SEQ ID NO: 112079 - protein, 179 aa, Unknown
  Bacterial polypetide isolated from the Sargasso Sea
NPKMKESYGIDSMPETAENVAEKYQISREDQDRMALSSQQKAANSISSGRLAKEITSVKIPQRKGEPIIFDNDEHPRGTSLEKLSSLPSPFRQNGSVTAGNASGVNDGAAAIIIASEAGVKRNHLTPKARIISAASAGVEPAYMGIGPVPASIKALKIAGLNIEDVDVIEINEAFAAQG

SEQ ID NO: 112080 - protein, 273 aa, Unknown
  Bacterial polypetide isolated from the Sargasso Sea
VTKAFGRDAQMYDSSFGWRFVNPKMKEFYGVDGMGTTAENLAEKYNISRKDQDIFAFNSQMKASKAQNEGRFDEEIVEVVIPQRKKESIIFCKDEFIKPNTSLEILSKLRTAFKKEGGSVTAGNSSGLNDGAAAMLLSSEKGVKENNLAPIARIVSSAVVGVEPRIMGIGPVKASNKALEKAGLTMEDMDIIELNEAFSAQALACIRKWGLKDNDERINPNGGAIALGHPLGVSGTRILQTAAIELKKKNKQYALVCMCIGVGQGYATIIEKV

SEQ ID NO: 112081 - protein, 280 aa, Unknown
  Bacterial polypetide isolated from the Sargasso Sea
PAKVVNRFCGSAMDALHQVSTAIESGDIEVGIAAGVEDMFSIPPGGFAPDFHPELAEQEYYIGMGETAENLANDGNISRDAQEDFAMNSHKKALAAWEAGKFDNEIIPIDMYGESTVSKDEGPREPDGEKIKSLNPAFVEGGSVTAATSSPFSLGAAALLVTSESFAKENGLTIRAEIVSRAVAGVDWTRMGMGPLPATEKALKKADLTMDDIEVIELNEAFAAQSLYVINEGGWDPNKINLNGGAIALGHPLGCSGARIIGTLINVMEQKEKQIGLATM

SEQ ID NO: 112082 - protein, 112 aa, Unknown
  Bacterial polypetide isolated from the Sargasso Sea
WAPRIMGIGPVPASQKLMSQLGLSQSDFDVIELNEAFASQGLATLRGLGIADDDPRVNPNGGAIALGHPLGMSGARITGTAALQLSLTGGNRALATMCVGVGQGIAIALEGI

SEQ ID NO: 112083 - protein, 215 aa, Unknown
  Bacterial polypetide isolated from the Sargasso Sea
FPSAYTANQSTLWTLCKKLSGCEVYSDELNHASMIQGIKNANVPTHVFKHNDTDHLEELLKTSNANTPKIIVFESLYSMEGLRSPIKKIVSLAKKYNALTYLDEVHSVGLYGPEGRGIAAELNVSDDIDIINGTLSKAFGQMGGYVAASRDIIDFIRSFAPGFIFTSSANPSIAAASLVAIDLAKGANLLRKNIKNNSDLIRQGMRDSEIPFLEN

SEQ ID NO: 112084 - protein, 263 aa, Unknown
  Bacterial polypetide isolated from the Sargasso Sea
MNNVYIMSANRSAIGGFGGTLKNHCPVDLGTLVANEAITRSGYEANEVEHAVFGNVIHTEPRDMYVSRVIALQAGMDKASAALTVNRLCGSGLQAIVSASQIIMLGDASVAMAGGVEVMSNGAHIVQGFRWGSRMGDGQVHDMMLGALHDPFGHGHMGITAENISSRYQISREMQDEFALTSQKRAHKAIQNGIFKDQILPIEIKTRKGIEVFEVDEHPKPDTSIETLSGLKTAFKKDGVVTAGNASGINDGASALVLANEEK

SEQ ID NO: 112085 - protein, 284 aa, Unknown
  Bacterial polypetide isolated from the Sargasso Sea
GTLKSFCPVDLGTLVAKDAIARSGYDANEVEHAVFGNVIHTEPRDMYVSRVIALQAGMSKESAALTVNRLCGSGLQAIVSAIQLLILGDAKISIAGGVEVMSNGAHIVEGFRWGSRMGDGKVHDMMLGALHDPFGHGHMGITAENISSRYQISRDMQDQFALSSQQRASKAINNGSFKEQILPIEIKTRKGIEIFETDEHPKPDTSIDTLSSLRTAFKKDGVVTAGNASGINDGASALILANEDKAKKGTPLARIVSYGFGGVDPDEMGMGPVPASKMALNKAG

SEQ ID NO: 112086 - protein, 89 aa, Unknown
  Bacterial polypetide isolated from the Sargasso Sea
TLDDIGTIELNEAFAAQALACMQELGLSADDPRVNPNGGAIALGHPLGMSGARLLHTAALQFEQTSADYALCSMCIGVGQGIATLLKRI

SEQ ID NO: 112087 - protein, 275 aa, Unknown
  Bacterial polypetide isolated from the Sargasso Sea
TQTIHKQLEDSVSKFLGKDDTILYSSCFDANGGFFETILNDQDAVFSDELNHASIIDGIRLCKAQKYRYKNCDMNDLEEQLSQSSARIKLIVTDGVFSMDGTIAPIDKIVNLASKYDALVMVDDCHATGFIGENGRGSGEYYNVLDRVDIISSTFGKALGGASGGFVSASKNIIDTLRQKSRPYLFSNSLAPALVVACIKALEIIDSNKNLLKQLQQNTLFFRKQIKEIGYEVKGDSHPIVPIMIYDAKKAVALSEMLLERNIYVIPFSFPVVPK

SEQ ID NO: 112088 - protein, 186 aa, Unknown
  Bacterial polypetide isolated from the Sargasso Sea
KLIDYDEVVRPESTAESMAALRPVFDPVNGTVTAGTSSALSDGASGMLLMSADRAKELGLTPRAKIRAMAVAGCDAAIMGYGPVPATQKALKRAGLTMDDIELAEFNEAFAAQALSCIKQLGWMDHLDTKINLNGGAIALGHPLGCSGSRISGTLINLMESQDVSLGLATMCIGLGQGIATVFERV

SEQ ID NO: 112089 - protein, 265 aa, Unknown
  Bacterial polypetide isolated from the Sargasso Sea
GFRWGTKMGDAKIFDMMLGSLQDPFGHGHMGITAENISDRYQISRVMQDEFAYSSQKKAHNAIKKGFFKDQIVPIEIKSRKGIDIFDTDEHIKPDTTLEILSNLKSAFKKDGSVTAGNASGINDGSSALILADEKRAKNGMPLARIVSYGFGGVEPDEMGMGPIPASKMALQKSGLKVDDIDLVESNEAFAAQACAVNKQLGLDPEKVNVNGGAIALGHPVGATGSIIMTKLVYELRKRKGKYGLATMCIGGGQGIAVLIEAIYN

SEQ ID NO: 112090 - protein, 152 aa, Unknown
  Bacterial polypetide isolated from the Sargasso Sea
AGNASGVNDGAAALIIASEQQARAQGLTPRARIVAMATAGVEPRFMGLGPVPAVRKVLERAGLNINDMDVIELNEAFAAQALGVLRQLGLADDAGHVNPNGGAIALGHPLGMSGARLALSASLELQRRNGRYALCTMCIGVGQGIAMILERV

SEQ ID NO: 112091 - protein, 146 aa, Unknown
  Bacterial polypetide isolated from the Sargasso Sea
MANTPSVGDEVAADDACAPPMELALFSSNDYLGLSTHPEVRAAAAAAAAAHGCGPRSSSLVAGFTCLHQELETELARLKEAEAALLLPTGYAANTAVLGALADSPSCAIFSDELNHASIIDGARLASKGAGAALHVYRHNDMEHLD

SEQ ID NO: 112092 - protein, 266 aa, Unknown
  Bacterial polypetide isolated from the Sargasso Sea
HPVVIMESTKVTKELGTGSGGTRNISGTSTYHADLEKSLAELHNKEASLLFPSAYTANQSTLWTLCKKLSGCEVYSDELNHASMIQGIKNANVPTHVFKHNDTDHLEELLKTSNANTPKIIVFESLYSMEGLRSPIKKIVSLAKKYNALTYLDEVHSVGLYGPQGRGIAAELGVSDEIDIINGTLSKAFGQMGGYVAASKDIIDFIRSFAPGFIFTSSANPSIAAASLVAVDLAKGADLLRKNIKNNSDLIRQGLRDSKIPFLEND

SEQ ID NO: 112093 - protein, 304 aa, Unknown
  Bacterial polypetide isolated from the Sargasso Sea
MDAVGSAFRAIASGEMELAIAGGVESMSRAPYVMGKAATAFGREQKIEDTTIGWRFINPLMKAQYGVDAMPQTADNVADDYQVSRADQDLFALRSQQRAARAQAQGFFAEEIVPVVIKGKKGDTVVDTDEHPRADTSLEALTKLKPVNGEGKTVTAGNASGVNDGAVALILASAEAVKKHGLTPRAKVLGMASAGVAPRVMGIGPVPAVRKLLERLNLSIDQFDVIELNEAFAAQGLAVMRELGLADDSAKVNPNGGAIALGHPLGASGARLVQTALHQLEKSGGKLGLATMCVGVGQGLALAI

SEQ ID NO: 112094 - protein, 279 aa, Unknown
  Bacterial polypetide isolated from the Sargasso Sea
EAASEPRCTIDGRQMIMLSANNYLNLTTHPRVVEAAVEATRKYGAGSGSVRAIAGTMDLHLEAERTCAEFKEVEASLIYSAGYTANVGLIPTLVRGPQDVIISDELNHGSIIDGVRLTKASRAVYPHNDMEALERVLRENKDSERKLIITDGVFSMDGDIAPLDEIADLAEEYGAMTFVDDCHGEGVLGEGRGIVSHFGLQGRVTFEVGSFSKALGVQGGILAGSDDVRTHALNHSRSWLLSGSQPPGVAAAQKAAIEVLMSEPEHVRRLWENTTYFMR

SEQ ID NO: 112095 - protein, 286 aa, Unknown
  Bacterial polypetide isolated from the Sargasso Sea
NTEPKDMYLSRVAAINGGCAEGTPAFNVNRLCGSGLQAIVSASQSILLGDTDVAIGAGAENMSRVPFASLNMRWGARMGDTKMVDMMIGALHDPFHNIHMGVTAENIAAKWGISREDQDKLAVESHNRAERATQNGLFKDQIVPVTLKSKKGDVLYATDEHFRPGATMDDLAKLKPVFLKENGTVTAGNASGINDAAAAVVLMEAGAAKARGAKPLARLVAYAHAGVDPKYMGIGPVPATQLALKKAGLTVNDLDVIEANEAFAAQACAVTKDLGLDPAKVNPNGS

SEQ ID NO: 112096 - protein, 208 aa, Unknown
  Bacterial polypetide isolated from the Sargasso Sea
KRAKEALDLGLFKEQIKPIEIKTRKGITIFDTDEHLKPETTLETLSGLRSAFKKDGSVTAGNASGINDGASALILANEKQAQKTKPLARIVSYGFGGVDPDEMGMGPIPASKMALNKSGLKLDDLDLVESNEAFAAQACAVNKQLGLDPGKVNVNGGAIALGHPVGATGSIIMTKLIYELRRRKGKYGLATMCIGGGQGIAVIIEAIY

SEQ ID NO: 112097 - protein, 257 aa, Unknown
  Bacterial polypetide isolated from the Sargasso Sea
PLMKAQYGVDPMPVTGDNVAEDYGVSRADQDAFGLRSQQRAAAAQESGYYAEEIVPVVIKTKKGEIVVDRDEHPRADTTAEGLAKLKPVNGEGKTVTAGNASGLNDGASAMILASAEAVQKYGLKPRAKVLGMASGGVAPRLMGVGPVPAVRKLLTRLNLDINAFDVIELNEAFAAQGLAVTRDLGLPDDSPKVNPNGGAIALGHPLGMSGNRLVLTAAHHLEKTGGKLGLATMCVGVGQGLALAIERVCPEASSGA

SEQ ID NO: 112098 - protein, 203 aa, Unknown
  Bacterial polypetide isolated from the Sargasso Sea
GRFAKEITAVTYQPRKGEPVVIDTDEHLRPQTTLEALASLKAPFRDNGSVTAGNASGINDGAAAMIVAGEAAVEKYNLQPVAQIKGMATAGVEPSVMGIGPVPAVRKLLAKQQLSLDDIGIIELNEAFAAQGLACMQELGIASGDPRVNPNGGAIALGHPLGMSGARLLQTAALQLQQTNADYALCTMCIGVGQGIATLLKRI

SEQ ID NO: 112099 - protein, 246 aa, Unknown
  Bacterial polypetide isolated from the Sargasso Sea
GALNCPFGTGHMGVTAENVAREQNVSRREQDEFALESQKRAASAAANNLFDSQINPIEIKVKRDLVPFEKDEHPKATTLDDLASLRPVFEKDGTVTAGNASGINDGAAAIVLSSAEAVEKYGLKPKARILGYGHAGVRPEVMGVGPIPAVQNLLKKTGLVVSDFDVIESNEAFAAQAIAVNRGLNLDPAIVNPNGGAIALGHPVGATGAIITLKALYQLENINGKRALITMCIGGGQGIALAIERI

SEQ ID NO: 112100 - protein, 291 aa, Unknown
  Bacterial polypetide isolated from the Sargasso Sea
LLNESVKGLNIIPDGIYVDVTYGGGGHSKVILKKLGPRGRLIAFDQDIDAHKNKITDNRLKLIESNFKFLNNHLNYLHIAQIDGLLADFGVSSYQIDTKNRGFSIRFDAKLDMRMDQSQDIDAQFIINKYDREKLENIFQNYGELRNYRRIVDIIVSERKNNEIKTSGDLKRILEPLSNSSEKNKFLAKVFQAIRIEVNDEINIIKTLLIQSSKILKKGGRLVCISYHSLEDRLVKRFIQNGTFESDVISDIYGNKDLKFKKIGNLISPDKEEVRLNNRSRSAKLRVAEKI

SEQ ID NO: 112101 - protein, 256 aa, Unknown
  Bacterial polypetide isolated from the Sargasso Sea
VTIATREGGEVLNFCSNNYLGLSDNAEIKGVAQDALENHGFGMSSVRFICGTQDIHKELEQKISKFFNTEDTILYTSCFDANSGLFETLLGPDDAIISDTLNHASIIDGIRLCKAQRFRYNNSDMADLDIKLQAAQDSRLRMIATDGVFSMDGYIAKLDEITELANKYDALVMVDDSHATGFIGQTGRGSAEHHGVMDKVDVWTSTLGKALGGASGGFTTGRQEIIDMLRQLSRPYLFSNTLAPSIVAASLKVFDM

SEQ ID NO: 112102 - protein, 289 aa, Unknown
  Bacterial polypetide isolated from the Sargasso Sea
FGFGMASVRFICGTHEVHEKLEKQISHFLNTEDTILYSSCFDANAGLFETLLGPEDAIISDELNHASMIDGIRLCKAKRFRYLNNNMKDLEEKLKQASSARFKLICTDGVFSMDGTVANLPEICNLADEYQALTMVDDSHAIGFIGPNGRGTPEAFNVQNKIDIITGTLGKALGGASGGYTSGKKEVIQWLRQRSRPYLFSNSIAPIIAHVGSIVFERLESSHSPRQKLMENTNYFRKNIKALGFDIIDGNHPIIPIMIGDAEKAKKMADLLLQEGIYVISFSYPVVPK

SEQ ID NO: 112103 - protein, 242 aa, Unknown
  Bacterial polypetide isolated from the Sargasso Sea
GVDSMPETAENVAVEFGISRADQDAFAMSSQKKAARAQRDGTLAQEIVGVEIAQKKGDPVHVTLDEHPRETSLESLGKLKGVVRPDGSVTAGNASGVNDGACALLLASQEAADQYGLRRRARVVGMATAGVEPRIMGIGPAPATQKLLKQLNMTLEQFDVIELNEAFASQGLAVLRTLGLRDDDPRVNPNGGAIALGHPLGASGARLITTALYQLERINGRFALCTMCIGVGQGIALVIERV

SEQ ID NO: 112104 - protein, 101 aa, Unknown
  Bacterial polypetide isolated from the Sargasso Sea
MLITWKINEAFAAQVLANITAFSSNHFSQRYLNQAKALGSIDQDKLNINGGAIALGHPLGMTGTRIVLTLLNSMKRDNKQHGIASLCIGGGQGAAIWLESN

SEQ ID NO: 112105 - protein, 287 aa, Unknown
  Bacterial polypetide isolated from the Sargasso Sea
WENLEEVFYGNANQAGEDNRNIARMALLLADLPHTVPGITLNRLCASGMEAISSASRMIKSNEADMTVAGGAESMSRAPFVMPKASSAFSRNAEIYDTTIGWRFVNPKMKTNYGIDSMPETAENVAEKYQVSRDDQDKMALSSQIKASTAIQNGRLAKEITPVEIPQKKGMALIFEKDEHPRSTSIEKLSSLPTPFRNNGTVTAGNASGVNDGAAAMIIASEVGIKRNHLTARARIISAASSGVEPAFMGIGPVPASLKALKIAGIKINDIDVIEINEAFAAQGWLV

SEQ ID NO: 112106 - protein, 94 aa, Unknown
  Bacterial polypetide isolated from the Sargasso Sea
NLSKIRLNEIGVIEINEAFAAQVLTVSRELGMEDDDPRINPNGGAIALGHPLGMSGARLVLTAVEELHQRQEKLALCSMCIGVGQGISMLLERV

SEQ ID NO: 112107 - protein, 157 aa, Unknown
  Bacterial polypetide isolated from the Sargasso Sea
MEKGTVTAGNSSGLNDGAAALVLSTAAAAGSNGLKVKAKILGYSHSGVRPEVMGIGPIIAVKKLFEKTGLCEKDFDVIESNEAFAAQACAVSKELKLNPEKVNPNGGAIALGHPIGATGAILTIKAIHELERIDGTFGLITMCIGGGQGISLAIERV

SEQ ID NO: 112108 - protein, 63 aa, Unknown
  Bacterial polypetide isolated from the Sargasso Sea
EYAVKKSGIKLNDIGLVEINEAFASVAMAWQKEMEYPMNQINVNGGAIALGHPLGATGARLMT

SEQ ID NO: 112109 - protein, 294 aa, Unknown
  Bacterial polypetide isolated from the Sargasso Sea
GSGMRATMDGLSKIYSGESELLIVGGQESMSRARHTYLSRTGENKLGNNVFIDTLVNDGLTDAFSKEHMGITAENVSRRYTVTRQDQDHFAFQSYLKTYKAIKNNYFKNELIKSPYKDEVRKDTTLVKLAQLKTVFKKSGTVTAGNASSLNDGASFIALASENYINSNKIKPIAKILSWASSAGNPDYMGVTPITAIQKLMKKMGVNIGYFDLVEINEAFAATSVAVQRSLKIDPNKLNIAGGAIALGHPIGCSGARIVTTLAHQLRRTKQKIGVASMCIGGGQGLAIAIEKLN

SEQ ID NO: 112110 - protein, 126 aa, Unknown
  Bacterial polypetide isolated from the Sargasso Sea
RSNAVSEIVASGVSSLNPEVMGLGPIDAINQTLQRAGMAISDIDLVEINEAFAAQVIPSAEETGIDHDKLNVNGGAIALGHPFGMTGARIMTTLINGLEDADKEFGLETMCVGGGQGMAMIVQRMS

SEQ ID NO: 112111 - protein, 289 aa, Unknown
  Bacterial polypetide isolated from the Sargasso Sea
VFGNVIHTEPRDMYVSRVIALQAGMDKASAALTVNRLCGSGLQAIVSASQILMLGDASVAMAGGVEVMSNGAHIVQGFRWGSRMGDGQVHDMMLGALHDPFGHGHMGITAENISSRYQISREMQDEFALTSQKRAYDAIGNGAFKDQILPIEIKTKKGIEIFEIDEHPKPETSMETLTGLRTAFKKDGVVTAGNASGINDGASALILANEEKAKKGKPLARIVSYGFGGVDPDEMGMGPIPASKMALNKGQLTVADLDLIESNEAFAAQACAVNKQLGLNPEIVNVNGG

SEQ ID NO: 112112 - protein, 316 aa, Unknown
  Bacterial polypetide isolated from the Sargasso Sea
MRSSAFLQHLQQQIDDVKAEVLYKAERIITSQQQASVDVGGEQVLNFCANNYLGLANHADLIAAAKHGLDSHGFGVASVRFICGTQDIHKQLEQSISEFLGTEDTILYSSCFDANGGLFETLLGAEDAIISDALNHASIIDGVRLCKAKRYRYANNDMAELEAQLKQADADGARFKLIATDGVFSMDGVIADLKAVCDLADKYGAMVMVDDSHAVGFVGKHGRGTHEYCGVMDRVDIITGTLGKALGGASGGYTSGKKEVIEWLRQRSRPYLFSNSLAPSIASASIKVLQMLKQGDDLREKLWQNADYFREKMSAA

SEQ ID NO: 112113 - protein, 226 aa, Unknown
  Bacterial polypetide isolated from the Sargasso Sea
MSAAFISHLQSQIEATKEDGLYKKERVITSQQQADIGVAGGEHVINFCANNYLGLANNESLIEAAKEGLDSHGFGVASVRFICGTQDIHKQLEASISDFLGTEDTILYPSCFDANGGLFETLLGPEDAIISDALNHASIIDGVRLCKAKRYRYANNDMAALEEQLKQADADGARFKIIATDGVFSMDGVIADLASICDLADKYDAMVMVDDCHATGFWVKTVKAAT

SEQ ID NO: 112114 - protein, 287 aa, Unknown
  Bacterial polypetide isolated from the Sargasso Sea
PSCFDANGGVFEGLLTSSDAIISDQLNHASIIDGIRLCKAKRYRYQNNNMLDLEEKLKSADSDGSRFKLIVTDGVFSMDGIIADLKSICDLADKYNALVMVDDSHATGFVGDKGIGTPEYCEVLGRVDILTSTLGKALGGASGGFVSASKNIVDILKQRARPYLFSNSLAPILAATSLKVLDIVSENDYLREKLKLNSAKFRKGLSDAGFDLVPGEHPIIPVMLYDEKLASQMAERLLDHGVYVIAFSYPVVPKGLARIRTQMSASHSEEQIDKAVNAFCQVGKELK

SEQ ID NO: 112115 - protein, 236 aa, Unknown
  Bacterial polypetide isolated from the Sargasso Sea
SHYFNSDDTILYTSCFDANGGLFETLLTDKDAVISDSLNHASIIDGIRLCKAERFRYKNSDMEDLEKQLRNSQNANIRMIATDGVFSMDGYIAKLDQITALAKKYDALVMVDDCHATGFLGKTGRGSAEYHNVMDKIDLWTSTLGKALGGASGGFTTGKQELIDLLRQRSRPYLFSNTLSPSIASAGIKAFEMLSDSTSLRDKLEKNTKYFRSEIRKIGFDIKKGEHPIVPIMIYD

SEQ ID NO: 112116 - protein, 108 aa, Unknown
  Bacterial polypetide isolated from the Sargasso Sea
PDTSLLHQPSSAINVALDSAGMKVSDLDLFEINEAFAAVALASMNHLGLSDEIVNVNGGAIALGHPIGMSGTRVVLTLIHELQRRGGGLGAASLCGGGGQGEALILKV

SEQ ID NO: 112117 - protein, 254 aa, Unknown
  Bacterial polypetide isolated from the Sargasso Sea
MGETAEILARDFQISREEQDAYARQSHARAIKASDDLNQEVCPIFPGTGSRKLVERDNGMRTPDQLKKLGRLRPVFDPETGTVTAGNASQITDGAVALLVASKDAAQRLGLPVLGYLRDWQYSGCAPDRMGLGPVYAMNELTDRIGISIDEIDLFEINEAFASQMLAVLKASESAEFARKNLHRSQPLGAIPMEKLNLNGGAIALGHPVGATGSRLVLTALQQLKQRGHECAITSACIGGGQGAALYLERNLKS

SEQ ID NO: 112118 - protein, 374 aa, Unknown
  Bacterial polypetide isolated from the Sargasso Sea
GLYKAERVISSHQQAAVTVGHEQVLNFCANNYLGLANNPDLIKAAQQGLDSHGFGVASVRFICGTQDIHKELEQKISGFLGTEDTILYSSCFDANGGLFETILGAEDAVISDALNHASIIDGVRLCKAKRYRYANNDMAELEAQLKQADADGARFKLIATDGVFSMDGVIADLKSICDLADKYNALVMVDDSHAVGFVGKNGRGTHEYCDVLDRVDIITGTLGKALGGASGGYTSGKKEVIEWLRQRSRPYLFSNSLAPSIVTASIKVLDLLANGDALRAKLWDNVSYFREKMSAAGFTLAGKDHAIIPVMLGDAKVAAEMARRMLAEGIYVVGFSFPVVPKDQARIRTQISAAHSKEYLDKAISAFIRIGKEM

SEQ ID NO: 112119 - protein, 333 aa, Unknown
  Bacterial polypetide isolated from the Sargasso Sea
ARMALLLAGLPQTVPGSTITRLCGSSLDAIGVAARAIKSGETQLMIAGGVESMSRAPFVMGKAENAFSRNMQIEDTTIGWRFINARMKVLYGVDSMPETAENVAADFAVSRADQDAFALRSQMRTAAAQEAGRFADELITVSIAQRKGDPLLFTRDEHPRSTSAEALAKLKGVVRPDGSVTAGNASGVNDGACALLLASESALRANDLHPLARVVGVATAGVAPRIMGFGPAPAVRKVLAQTGLTLEQMDVIELNEAFAAQALAVTRDLGLADDAPHVNPNGGAIALGHPLGASGGRLAMTAAYQLRRTGGRYALCTMCIGVGQGIALIIERV

SEQ ID NO: 112120 - protein, 294 aa, Unknown
  Bacterial polypetide isolated from the Sargasso Sea
GEAGLMIAGGVESMSRAPFVMPKAESAFSRNNAVYDTTIGWRFINKLMKEKYGVDSMPETAENVATDFKIEREAQDHMALRSQLNAVAAIKAGHLAREIVPVHIPQKKGDAIIVSQDEHPRETSLEALAKLKGVVRPDGTVTAGNASGVNDGACALLLADEANAAKYGLKPRARVVGMAVAGVAPRIMGFGPTPATLKVLAQTGLTIDHMDVIELNEAFAAQGLAVLRALGIKDDDARVNAWGGAIALGHPLGASGARLVTTAVNRLHEHAGKYALCTMCIGVGQGIAVILERV

SEQ ID NO: 112121 - protein, 402 aa, Unknown
  Bacterial polypetide isolated from the Sargasso Sea
MNEAFICDAIRTPIGRYGGALSSVRTDDLAAIPISELMNRNTNVDWEKIDDVIYGCVNQSGEDNRNVARMGSLLAGIPDKVSGVTVNRLCGSGMYAAGSGAQAIRSGEANLLIVGGVESMSRSPFVIPKSETGFSRSTEIYDTTIGWRFVNPKMEQLYGTDSMGETAENVAEEHNINREDQDLFAANSQRKTEEAQADGRLAEEIVPITIKQKRKDDTVVSVDEHPRAGTNYEKLSNLKSAFKEDGTVTAGNSSGVNDGACAILIASEKGIKEHKLEPKARILGMASAGVPPRVMGIGPIPSTNKLLDRLGLTIDDLDIIELNEAFAAQSLGVLRGLNIKDNDERVNPQGGAIALGHPLGASGARLITTATYQLLKGNGSKALCTMCVGVGQGISSIMKKFN

SEQ ID NO: 112122 - protein, 407 aa, Unknown
  Bacterial polypetide isolated from the Sargasso Sea
MRARTNRSETMSNAAKEVVVVSGVRTAIGDFGGSLKDFSPTDLGAKVVAEVLSRANVPGDAVGHVVFGHVVNTEPKDMYLARVAAINGGVAQHTPALTVNRLCGSGLQAIVSAAQTIMLGDADIAIGGGSESMSRAPYTVPAARFGQRMGDGKLVDMMLGALHDPFQTIHMGVTAENVAAKYGISRDAQDALALESHRRAARAIAEGRFKDQILPISIRTKKGEVAFDTDEHVRLEASADDFSKLKPVFQKENGTVTAGNASGINDAAAAVLMMSADAARAQGVKPLARLVAYAHAGVDPAYMGIGPVPATQKALERAGLKIGDLDVIEANEAFAAQACAVTQELGLDPAKVNPNGSGISLGHPIGATGALITVKALYELKRIGGRYALVTMCIGGGQGIAAIFENI

SEQ ID NO: 112123 - protein, 414 aa, Unknown
  Bacterial polypetide isolated from the Sargasso Sea
MAAQRTQHINWRHHMTEAFLCDAIRTPIGRYAGSLSSVRADDLGAVPLKALMERNKDVDWSAIDDVIYGCANQAGEDNRNVARMSLLLAGLPQDVPGSTVNRLCGSGMDAVGIAARAIKSGEAALMLAGGVESMSRAPFVMGKASSAFSRQADIFDTTIGWRFVNPLMKQMYGVDSMPETGENVATDYKISRADQDAFALRSQQKAARAQRDGTLAQEIVGVTIAQKKGDPITVLQDEHPRETSLEALAKLKGVVRPDGTVTAGNASGVNDGAAALLLANEATAKRFGLTPRARVLGIATAGVAPRVMGIGPAPATQKLLARLNMTIDQFDVIELNEAFASQGIAVLRALGVADDDARVNPNGGAIALGHPLGMSGARLVTTAMYQLHRTQGRFALCTMCIGVGQGIAIAIERV

SEQ ID NO: 112124 - protein, 376 aa, Unknown
  Bacterial polypetide isolated from the Sargasso Sea
MKPKFGTLEKKLSGIKKNNLLRNLQDSHVEKQFIKQNGRKLLNFSSNDYLGIKSGKMRHAQFQSSSRLVSGNDTSFSLLEKKLARHKSQEQAIIFPTGYMANLGMITSITTKHDTIFSDELNHASIVEACKLSGSKIKIFKHNDIGDLERKVQKTKGKKILITEGVFSMDGDWSKLNEICQVSEKHGMITVLDDAHGDFVLGKDGKGTANFFDVEKKIDLYVSSLSKGLGSFGGYVCGKKKLIDLCINTSKTFIYTSALPSSINQYSLNRFNSKREIYREKLWGKINLFHKRLEEIELHTTSTSQIIPIIIGNEKKAMELSKFLRINGIFAQAIRYPTVKKDQARIRISITGWLSNKEIEYSIQILEKAKRKFNLK

SEQ ID NO: 112125 - protein, 396 aa, Unknown
  Bacterial polypetide isolated from the Sargasso Sea
MNYNNKHYSDVLTSIKEEGLYKKERVISTPQGVEITTHNGEKVLNFCANNYLGLANNPTLIKSAKSAMDKFGFGMASVRFICGTQDLHKVLEEKISEFFGTDDTILYTSCFDANGGLFETILGPDDAVISDSLNHASIIDGIRLCKAKRFRYNNSDMQDLDRKLVEAKDAKIKLIATDGVFSMDGYIAKLDEITQLAEKHNAMVMVDDSHATGFIGNTGRGSAEYHGVMDKVNIFTSTLGKALGGASGGFTTGKKEIISLLRQRSRPYLFSNTVAPAIVAAGAEVLDMISSTTRLRDKLEQNTMYFRQRMSESGFDILEGIHPIVPIMLYDAITAQDMATRMLKEGIYVIGFYFPVVPKGKARIRVQISAAMNKEHLDKAIDAFKKVGKDMGIIES

SEQ ID NO: 112126 - protein, 399 aa, Unknown
  Bacterial polypetide isolated from the Sargasso Sea
MSKQLQDAYIVAASRTPIGKAPRGVFKNTRPDELLVHALKSAVAQVPGFDTKLIEDAIIGCAIPEAEQGLNVARMGALLAGLPQTVGGVTVNRFCASGITALAMAADRIRVGESDAIFAGGCESMSMVPMMGNKPSMSPHIFDRNEDFGIAYGMGLTAERVAEQWKVSREDQDAFSVESHRKALAAQQAGEFNDEIAAYTITERFPNLATGEVDVKTREIKLDEGPRADTSIEGLAKLRTVFANKGSVTAGNSSQTSDGAGALLVVSEKVLKEFNLTPLARFVSFAVRGVPPEIMGIGPKEAIPAALKAAGLKQDDLDWIELNEAFAAQSLAVMRDLGLDPSKVNPMGGAIALGHPLGATGAIRAATVVHGLRRRNLKYGMVTMCVGTGMGAAGIIERL

SEQ ID NO: 112127 - protein, 398 aa, Unknown
  Bacterial polypetide isolated from the Sargasso Sea
MSAAFISHLQSQIEATKEDGLYKKERVITSQQQADIGVANGEHVINFCANNYLGLANNESLIEAAKKGLDSHGFGVASVRFICGTQDIHKQLEASISDFLGTEDTILYPSCFDANGGLFETLLGPEDAIISDALNHASIIDGVRLCKAKRYRYANNDMAALEEQLKQADADGARFKIIATDGVFSMDGVIADLASICDLADKYDAMVMVDDCHATGFLGENGKGSHEYCGVMGRVDIITGTLGKALGGASGGYTSGKKEVVEWLRQRSRPYLFSNSVAPPIVSASLKVFEMMKEGDELRANLWRNANHFRTRMEEAGFTLAGKDHAIIPVMLGDARLASEMADKMLEKGIYVIGFSYPVVPKGQARIRTQMSAGHSLEHVDKAVDAFIEVGRELGVIS

SEQ ID NO: 112128 - protein, 348 aa, Unknown
  Bacterial polypetide isolated from the Sargasso Sea
MTAQIISSLFDRNDNIEPKHIEDLVLGCAFPEGPQGMLMAKGVAILAGIPETTGGSVVNRFCGSSMDAVHQISAKIETGDIQMGIAAGVEDMFSVPMGGFNPDFHPELAEQEYYIGMGETAEILAEEGNISREDQEDFAVGSHEKALKAWENGHFKNEVVPINVYGENTVEQDEGPRQPDLEKIKSLDPAFLENGTITAATSSPISIGASAVLICSRDLAEKNDLKIRAAIKGRSVVGVDWKRMGKGPIPATEKVLQNAGMSMDEIDVIELNEAFAAQSLYVIENGNWDRSRVNLNGGAIALGHPLGCSGARIITTLVNVMEQENAKRGLATMCIGSGQGIATILGRD

SEQ ID NO: 112129 - protein, 365 aa, Unknown
  Bacterial polypetide isolated from the Sargasso Sea
MEEAYLCDGIRTPIGRYGGVLSGIRADDLASIPIRTLMERNSGVDWESVDDVILGCANQAGEDNRNVARMASLLSGLPHTVPGATVNRLCGSGLDAIGIAARAVRSKEQRLVIAGGVESMSRAPFVMGKSTEAFSRSAEIFDTTIGWRFVNEIMKKQYGAESMPETAENLAAEFNISRNDQDEFALRSQQKAAKAITIGRFSEEIVPIKIPQKKGEIFFLDQDEHPRLDSKLENLLKLPTPFRENGSITAGNSSGVNDGAAAVIVSSEKKSLEYNLKPLARIVGMATAGVEPRTMGFGPVPATKKLLISTGIKLDKVGIIELNEAFAAQVLTVTRALNLEDDDERINPNGGCDSTRASSRYERYT

SEQ ID NO: 112130 - protein, 395 aa, Unknown
  Bacterial polypetide isolated from the Sargasso Sea
MYQSLKKRLKIEIEEIKDSGRYKNERIITSPQKAIINANEDEVVNFCANNYLGLASDKRIIDAAKQSLETHGFGLASVRFICGTQDIHKKLEEKISNFLETEDTILYAAAFDANGGLFEPLFDHNDAIISDSLNHASIIDGIRLCKAARFRYNNSDMDDLENKLKEASKYRNRVIVTDGVFSMDGTIAKLDLICDLAKKYDSLVFVDDCHATGFIGSSGKGTQEELDVIGKIDIITGTLGKALGGGSGGFTTGKKEIIDILRQKSRPYLFSNTLAPAIVGASLKSIELIQKDTTIIDNLKKNTSFFREKISQLGFDIKGKSHPIVPVMIYDDKKASLIADYLLDNGIYVVGFSYPVVPKGLARIRVQISSAHTKNQIEKAVQLFEEAGKKFGVLN

SEQ ID NO: 112131 - protein, 88 aa, Unknown
  Bacterial polypetide isolated from the Sargasso Sea
TLNDIDVVEINEAFASVAMAWQKEMDYPMEKINPNGGAIALGHPLGATGARLMTTMIHTMKRSNLKYGLQTMCEGGGQANVTILENCS

SEQ ID NO: 112132 - protein, 363 aa, Unknown
  Bacterial polypetide isolated from the Sargasso Sea
ARIAVGGEQVLNFCANNYLGLANHPDLIAAAHQGLDNHGFGMASVRFICGTQDQHKELEQKLSGFLGTEDTILYSSCFDANGGLFETLFGAEDAIISDALNHASIIDGVRLCKAKRYRYANNDMAELEAQLKQADADGARFKLIATDGVFSMDGVIADLKSICDLADKYDALVMVDDSHAVGFIGENGRGTHEYCGVMDRVDIITGTLGKALGGASGGYTSGKKEVIDWLRQRSRPYLFSNSLAPSIVAATIKVIDMLAEGHALRSSLKENSQYFRERMSAAGFTLAGADHAIIPVMLGDAKLAAEMASRMLAAGIYVVGFSFPVVPKGQARIRTQMSAAHTREQLDKAIDAFIRIGRELDII

SEQ ID NO: 112133 - protein, 297 aa, Unknown
  Bacterial polypetide isolated from the Sargasso Sea
MYHSPVLLDDSVKGLNIIPHGTYVDATYGGGGHSKVILKKLGPKGRLVAFDQDSDAHKNKIIDSRLKLIESNFKFLNNHLNYLQISQIDGLLADFGISSYQIDTKTRGFSIRFDYKLDMRMDQSQDMDAQFIINKYDREKLENIFQNYGELRNYRRIVDTIISERKNNEIKTSGDLKRILEPLSNKSEKNKFLAKVFQAIRIEVNDEINIIKSLLLQSSKMLKKGGRLVCISYHSLEDRLVKRFIQNGTFESDAISDIYGNKELKFKKVGNLISPDEKEVRLNNRSRSAKLRVAEKI

SEQ ID NO: 112134 - protein, 172 aa, Unknown
  Bacterial polypetide isolated from the Sargasso Sea
KKTDLESLKSLKSVFMEKGTVTAGNSSGLNDGAAALVLSTAAAAGSNGLKVKAKILGYSHSGVRPEVMGIGPIIAVKKLFEKTGLCEKDFDVIESNEAFAAQACAVSKELKLNPEKVNPNGGAIALGHPIGATGAILTIKAIHELERIDGTFGLITMCIGGGQGISLAIERV

SEQ ID NO: 112135 - protein, 134 aa, Unknown
  Bacterial polypetide isolated from the Sargasso Sea
MSEDSVESAGISPEFKILSRAVAGIDWTRMGAGPLPATEKALANAKLTIDDIDVIELNEAFAAQSLYVIRKGQWDMEKVNLNGGAIALGHPLGCSGARILTTLMNVMRQNDLSLGLATMCIGSGQGIATIIERI

SEQ ID NO: 112136 - protein, 188 aa, Unknown
  Bacterial polypetide isolated from the Sargasso Sea
MEHINKILTDIKEEGLFKRERTITTPQSVEIRTQNGNRVLNFCANNYLGLANHPDLINAAKNAMDDYGFGMASVRFICGTQDIHKILEKKIAKFFDTEDTILYTSCFDANGGLFETILNEKDAVISDSLNHASIIDGIRLCKATRLRYENNNMNDLEAKLKQVENSRTRIIATDGVFSMDGYIAKLDE

SEQ ID NO: 112137 - protein, 208 aa, Unknown
  Bacterial polypetide isolated from the Sargasso Sea
MIKKQNIFIDDLAKIKAEGLYKNERTITTPQGVIINTLENGEAINFCSNNYLGLSNNIEIKEAAKKALEEYGFGMSSVRFICGTQQIHKILEEKISKFFGTDDSILYTSCFDANGGLFETLLGQDDAIISDELNHASIIDGIRLSKAKRYRFNNNDIDDLELILQDRDKYDNVMIATDGVFSMDGHIAKIDKITKLAEKYNTIVMVDD

SEQ ID NO: 112138 - protein, 376 aa, Unknown
  Bacterial polypetide isolated from the Sargasso Sea
MSKSVIVDALRSPIGLKNGEMIGIRPDDLAAQVVKGLMERNPTIKTEMIEDVVVGCAYPEGPQGHIIGKSVGVLAGLPIDSTGKVINRFCGSSMDAAHQISTAAECGDIDAGIAVGVEDMFAVPMGGFAPDFHPELAEQEFYIGMGETAENLANDLDISREDQEEFAMNSHRKALKAYEEGKFDQELVSIDVNGEATVTKDDGPREPDVEKIKSLSPAFLENGTVTAATSSPISVGAAALIVANESFCNNNDLKPRAEIVSRAIAGVHWDRMGMGPLPAVEKALKKANLTMDDIETIELNEAFAAQSLYVIRKGGWDESKINLNGGAIALGHPLGCSGARILTTLINVMEQQNTNIGLATMCIGSGQGIATIIKRA

SEQ ID NO: 112139 - protein, 227 aa, Unknown
  Bacterial polypetide isolated from the Sargasso Sea
NISRNDQDEFALRSQQKAAKAITIGRLKEEIVPIKIPQKKGEMYSVDQDEHPRLDSKLENLLKLPTPFREEGSITAGNSSGVNDGAAAVIVSSEKKSLEHNLNPLARIVGMATAGVEPRIMGFGPVPATKKLLISTGIKLDKVGIIELNEAFAAQALTVTRALNLEDDDERINPNGGAIALGHPLGMSGARLALTAMRELHSKKERYALCTMCIGVGQGISMLLERI

SEQ ID NO: 112140 - protein, 300 aa, Unknown
  Bacterial polypetide isolated from the Sargasso Sea
MNPLMKNVLIDRLSYSLNEMQREGLFKNEIEIRSPQAARVDVGHQNKVLNLCANNYLGLADNDRLISAAKNALDTYGFGMASVRFICGTQDKHKELEEKLAEFLGKDDAILFASCFDANCGLFEALLGPQDAVVSDNLNHASIIDGIRLSKAQRYRYHNNDPVDLEIKLKQARTAGSENIIIATDGVFSMDGTYANLPEISRLAKIYDALVMVDDCHATGFVGTKGKGTSEYFGVNVDILTGTLGKALGGAIGGYIAGPQRVIDMLRQRATPYLFSNSLPPVAIAAGLEAINIINESDYL

SEQ ID NO: 112141 - protein, 136 aa, Unknown
  Bacterial polypetide isolated from the Sargasso Sea
MKPKFGTVEKKINVIKKNNLLRNLQDSRVEKQHIFQNGKKLLNFSSNDYLGIKPGKIKHTQFQSSSRLVSGNDISFSILEKKLAKHKSQEKTIIFPTGYMANIGAISSIADKNSTIFSDELNHASIVEACKLSNAK

SEQ ID NO: 112142 - protein, 381 aa, Unknown
  Bacterial polypetide isolated from the Sargasso Sea
MRNKFFMQEEVVILSGSRTAIGSFGGSLKSVSPIELGTVVAKKALEISEVDKNEVGQVAFGHVINTEPKDMYLSRVVALNSGLPKSVAAMNVNRLCGSGLQAIVSVIQSLTLGDSNFGLAGGSENMSNSPHILKSNRWGKRMGNTTVEDMMLGALNCPFGTGHMGVTAENVASEYGISREDQDSFSLESQLRASNALEKGYFKNQIVDIKVRKNIFNVDEHPKETDAESLKSLNSVFMENGTVTAGNSSGLNDGAAALVLSTAAAAKSNGLKVKAKILGYSHSGVRPEVMGIGPIFAVKKLLDKTGLSEKDFDVIESNEAFAAQACAVSKELKLNSDKVNPNGGAIALGHPIGATGAILTIKALHELERIDGTLGLITMCI

SEQ ID NO: 112143 - protein, 297 aa, Unknown
  Bacterial polypetide isolated from the Sargasso Sea
MYHNPVLLDDSVKGLNIIPNGTYVDATYGGGGHSRVILKNLGPKGRLIAFDQDNDAHKNKIIDNRLKLIESNFKFLNNHLNYLQISQIDGLLADFGISSYQIDTKTRGFSIRFDYKLDMRMDQSQDIDAQYIINKYDREKLEKIFQNYGELRNYRRIVDIILSERKNNEIKTSGDLKRILAPISNSSEKNKFLAKVFQAIRIEVNDEINIIKSLLIQSSKILKKGGRLVCISYHSLEDRLVKRFIQNGTFESDAISDIYGNKELKFKKVGNLISPDQKEVRLNNRSRSAKLRVAEKI

SEQ ID NO: 112144 - protein, 384 aa, Unknown
  Bacterial polypetide isolated from the Sargasso Sea
MQDAFIVSALRTPIGKKKGSLSGMHPADLGASVLSATFEQIDLDPGLVEDVIFGCVDTVGPQAGDIARTCWLAAGLPEHVPGTTVDRQCGSSQQAVHFAAQAIMSGTSDVVIAGGVQNMNMIPISYAMLAGQSLGFDDPFSGSKGWLERYGKQEVSQFNSAQMIAKKWNLSREEMENYAYQSHQKAMHAIKSGYFENEIISVGTFCQDETPRAETSLEKMASLNPLVEGHDITAAISSQNADASSAILIVSEKILKEHNLNPLARIAHISVRADDPIWMLTAPMPATEYAIQKSGISLNDIDVVEINEAFASVAMAWQKEMNYPMSKINPNGGAIALGHPLGATGARLMTTMVHTMKRNNFRYGLQTMCEGGGQANVTILENCS

SEQ ID NO: 112145 - protein, 302 aa, Unknown
  Bacterial polypetide isolated from the Sargasso Sea
NAIYLAAQMVENGDAEIVIAGGMESMTNAPYLVPKARGGYKYGNAEMMDVIQHDGLFCALEKELMGEGTERYAASADITRSSQDEVAQKSHERASSAIENGNLSEEIVSIEIPQRRGEPISFEHDEGVRPGTDLEGLQKLRPAFAESGNITAGNASQISDGGSAVVITSRDVADRLSVEPLAELISYGQVAGPDTSLLTQPSRAISDALSNSELALSDIDLFEINEAFAAVSVASMADLGIDDSVVNINGGAIALGHPIGMSGNRLALTLAYQLKRQGGGVGAAALCGGGGQGDALILKAIG

SEQ ID NO: 112146 - protein, 400 aa, Unknown
  Bacterial polypetide isolated from the Sargasso Sea
MTEAFLCDAIRTPIGRYGGALSGVRADDLGAVPLKALVERNRDVDWAAIDDVIYGCANQAGEDNRNVARMSALLAGLPQGVPGSTINRLCGSGMDAVGVAARAIKSGEAALMVAGGVESMTRAPFVMGKAASAFARQADIYDTTIGWRFVNPLMKQLHGVDSMPETAENVAVDYNISRADQDLFALRSQQKAARAQQDGTLAEEIVAVTIAQKKGDPLVVSRDEHPRETSLETLAKLKGVVRPDGSVTAGNASGVNDGAAALLLANEETAKRFGLTPRARVLGIATAGVAPRVMGIGPAPATQKLLARLGMTIDQFDVIELNEAFASQGLAVLRMLGVADDDPRVNPNGGAIALGHPLGASGARLVTTAMYQLHRTNGRFALCTMCIGVGQGIAIAIERV

SEQ ID NO: 112147 - protein, 154 aa, Unknown
  Bacterial polypetide isolated from the Sargasso Sea
IAGNSSAISDGASAVVMMSRKRAKELGLKPMAKVRAMASTGVDPSIMGYGPVPAVRKALKRGGLEINDIELLELNEAFAAQSLPVLRDLKLEDSMEERVNLNGGAIALGHPLGCSGARITTTLLHEMKEKDAQLGVATMCVGLGQGVATVYERI

SEQ ID NO: 112148 - protein, 274 aa, Unknown
  Bacterial polypetide isolated from the Sargasso Sea
GEEDAVISDSLNHASIIDGIRLCRAKRLRYQNNDMLDLEEKLIEAKNTRLKLIATDGVFSMDGSIARLGEITKLAKKYGAMVMVDDSHATGFIGKTGRGSAEHYGVMGDIDIFTSTLGKALGGASGGFTTGNKEIISLLRQRSRPYLFSNTVAPAIVSAGIKVLDMISSTTELRDKLEKNTIYFRQKMSKAGFDILPGAHPIVPIMLYDAITAQEMAAKMLGEGIYVIGFYFPVVPKGKARIRVQISAAMNERQLDEAIHAFTKVGNEMGIISS

SEQ ID NO: 112149 - protein, 428 aa, Unknown
  Bacterial polypetide isolated from the Sargasso Sea
MSDRIAIVDGIRTPFCKAGTELKGFSAQKLGSLVIRELLDRSSIDGNAVDEVVMGCVANPVDAANVARVAALMAGLPERSRAYTVSRNCASGFESVTSAYEKIASGFDDIVIAGGTESMTNIPLIYNEHMTALFAGLMRSKTAFQKLQTILSFRPHYLKPIVGVVCGLSDPVCGLNMGQTAENIAKQCGITREQQDEFALASHNKAVASRAKLVEEIMAVPVQPKYETVCETDNGPREGQSLEALAKLKPYFDRNSGTVTVGNACPITDGASAVLMMKESKADELGLPPLGYVKSYSYEGLSPTVMGLGPVYAISTVLKKSGMELDQMSFVEINEAFAAQVLGCVQLIESDQFAKKELGRTKAIGKLEHERLNVNGGAIALGHPVGVTGNRLILTALKELHRRREQHALVSLCIGGGQGGAIILERAS

SEQ ID NO: 112150 - protein, 375 aa, Unknown
  Bacterial polypetide isolated from the Sargasso Sea
MSKSVIIDAVRSPIGLKNGPMIGIRPDDLAGQVVKGLLNRNDSVDSKMVEDVIVGCAYPEGPQGHIIGKSVGVLAGLPIESTGKVVNRFCGSSMDAAHQVSTAIESGDIDLGIAAGVEDMFSVPMGGFAPDFHPELAEQEFYIGMGETAENLANDLNISREEQEEFAISSHKKALGAIEEGNFKNEIIPIDKYGECTVEKDDGPREPDVEKIKSLNPAFVEGGTITAATSSPISVGASAVLVASEDFASQNGLKTRAEFVSRAVSGVHWDRMGMGPLPAVEKALKKANLTIDDVETIELNEAFAAQALYVIRKGGWDENKVNLNGGAIALGHPLGCSGARIITTLLNVMEQQDTNIGLATMCIGSGQGIATVIKR

SEQ ID NO: 112151 - protein, 392 aa, Unknown
  Bacterial polypetide isolated from the Sargasso Sea
MKNIDQILNAQLNEIKEQGTYKDERIIETAQEAQISVKGKTVLNFCANNYLGLANNSEIKKAAVDAIQEWGFGLGSVRFICGTQTIHKQLEDSVSKFLGKDDTILYSSCFDANGGFFETILSDKDAVFSDELNHASIIDGVRLCKAQKHRYKNCDMNDLEKKLNQSSARIKLIVTDGVFSMDGTIAPVDEIVKLAKKYDALVMVDDCHATGFIGENGKGSGEFYNVLDKVDIISSTFGKALGGASGGFVSASKNIIDTLRQKSRPYLFSNSLAPTLVVACLKALEIINSNKNLLKQLQQNTLFFREQIKEIGYEIKGDSHPIVPIMIYDAKKAVALSEMLLEKNIYVIPFSFPVVPKDQARIRVQLSSIHSREQLVYAVDTFKDCGKALNII

SEQ ID NO: 112152 - protein, 266 aa, Unknown
  Bacterial polypetide isolated from the Sargasso Sea
SAEIYDTTIGWRFINPKLDGQYGSDSMPETGENVAEKFQIRREDQDKFALGSQIKAGRAMENGRMAKELLTVEIPGRRGDVTVVDKDEHPRPDTTLEGLSKLPAPFRKDGGSVTPGNASGVNDGSAAMIIASEDAAKQHGLTIRARVVACATAGVEPRIMGIGPAPASQKVLERVGLKISDMDVIELNEAFASQALATLRELGVEDDDPRVNPNGGAIALGHPLGASGARLILTAAQELEETGGKYGLCTMCIGVGQGMATIIERV

SEQ ID NO: 112153 - protein, 400 aa, Unknown
  Bacterial polypetide isolated from the Sargasso Sea
MDAFICDAIRTPIGRFGGALSSIRADDLAALSIKELKERNTSIDWSMVDEVIFGCANQSGEDNRNIARMSLLLAGLPQTVPGITINRLCASGLEAVTYASRMIKSNEAHLIIAGGVESMSRAPFVIPKSTTPFSRNAEIYDTTIGWRFINPIMRQMYGVDSMPETAENVAERWNISREDQDKFAFWSQKKAAEAISKGRFDTEIFKVKIIQKKEENFLDKDEHPRSDTLLEKLSTLPTPFRNNGTVTAGNASGVNDGSAALIIASEKAIKEYNLIPKARLLSSAATGVEPSVMGIGPVSATKKVLSLSNINLANINIIELNEAFASQALATMRDLSLSDDDERVNINGGAIALGHPLGMSGARLVLTATEQLHQSKNNKLALCTMCVGVGQGSAIILEKL

SEQ ID NO: 112154 - protein, 413 aa, Unknown
  Bacterial polypetide isolated from the Sargasso Sea
MNYEKFFSDELKSLKSQGLYRKFREINRTRSTFPKATERDGDSKRQVEVWCSNDYLNLSQHPAIVNETIKVTQELGTGSGGTRNISGTSSYHADLERTLAELHKKDSALIFPSAYTANQSTLWTLCKKLEGIEIYSDELNHASMIQGIKNANVKVHIFRHNDTEHLEELLKTSNANTPKMIVFESLYSMEGLRSPIEKIIWLAEKYNALTYLDEVHSVGLYGPEGRGIAAEAGVSDKIDIINGTLSKSFGQLGGYVAANADIIDFIRSFAPGFIFTSSVNPSIVASSIKAIKLSKKADHLRREIKFNSDQIRSGLRNLKIPFIENDSHIIPILIKDPVLCKDAANLLVDKHGIYIQPVFFPTVPKGDERFRVTITPKHNASDIQNFLNAIDDIWTEMSLERIEADSKVVNLNS

SEQ ID NO: 112155 - protein, 395 aa, Unknown
  Bacterial polypetide isolated from the Sargasso Sea
MIKENNNFAEDLAKIKAEGLYKNERTITTPQGVTINTEEHGDALNFCSNNYLGLSNNNEIKEAAKNALEKYGFGMSSVRFICGTQDIHKRLERKISKFFGSDDTILYTSCFDANGGLFETLLGSDDAIISDELNHASIIDGIRLSKAKRYRFKNRDMNDLELKLSERNEYRNVMIATDGVFSMDGHIAKIDKIAELAQQYNAMVMVDDSHATGFIGKTGRGSAEFHGVMDKVDIWTSTLGKALGGASGGFTTGKQEIIDLLRQRSRPYLFSNTLAPSIVAAGLKAFEILSSSTVLRDRLENNTNFFRDEMTKAGFEIKVGTHPIIPVMIHDAVLAQKMAEMLIKKGIYVVGFFYPVVPRGQARIRVQISAEMDMQQLTKAISIFTQVGQELNIIK

SEQ ID NO: 112156 - protein, 399 aa, Unknown
  Bacterial polypetide isolated from the Sargasso Sea
MIVSKSFYNHIDHEIEQILSDDLYKNERFIKSPQQTAIKLKDGKEVMNFCANDYLGLANNKEIKDAAAASIEQDGFGMASVRFICGTNDLHRTLEQKLSSFLGFDDCILYVACFDANGGLFEPLFGPDDAIISDSLNHASIIDGIRLCKAKRYRYQHSDMDDLEKCLKQADADSAKHKVIVSDGVFSMDGTYAKLDKIVELAEKYDALVMLDDCHATGFVGEKGKGTAEHFGLEGKVDILSGTLGKALGGASGGFICAKENVIKLLKQRSRPYLFSNALSPSIVSASLKALEIVQDQPERRKRIKENTTYFRDSIKSLGFTIKGDMHPITPVMLGEAKIAQEMSKKLLEDGLYAIGFFYPVVPKGEARIRLQITSEHTKQQLDEAIKIFDKVGKELKVI

SEQ ID NO: 112157 - protein, 311 aa, Unknown
  Bacterial polypetide isolated from the Sargasso Sea
MPVDMSWMRDRYSELRDQGLDWNPPTLEAASEPRCTIDGREMIMLSANNYLNLTTHPRVVEAAVEATRKYGAGSGSVRAIAGTMDLHLEAERTCAEFKEVEASLIYSAGYTANVGLIPTLVRGPQDVIISDELNHGSIIDGVRLTKASRAVYPHNDMEALERALRENKDSERKLIITDGVFSMDGDIAPLDEIADLAEEFGAMTFVDDCHGEGVLGEGRGIVSHFGLQGRVTFEVGSFSKALGVQGGILAGSDDVRTHALNHSRSWLLSGSQPPGVAAAQKAAIEVLMSEPEHVRRLWENTTYFRDELESM

SEQ ID NO: 112158 - protein, 399 aa, Unknown
  Bacterial polypetide isolated from the Sargasso Sea
MIVSKSFYNHIDHEIEQILNDDLYKNERFINSPQQTAIKLKDGKEVMNFCANDYLGLANNKEIKDAAAASIQEDGFGMASVRFICGTNDLHRKLEEKLSSFLGFDDCILYVACFDANGGLFEPLFGPEDAIISDSLNHASIIDGIRLCKAKRYRYQHSNMEDLEKCLQQADSDSANHKVIVSDGVFSMDGTYAKLDKIVELAEKYDALIMLDDCHATGFVGENGRGTAEHFGLEGKVDILTSTLGKALGGASGGFVCAKENVIKLLKQRSRPYLFSNALSPSIVSASLKALEIIKDEPERRERIKENTIYFRDSMKSLGFKIKGDMHPITPVMLGDAKKAQEMSKKLLEEGLYAIGFFYPVVPKGEARIRLQITSEHTKQQLEQAIKIFGKVGRELKVI

SEQ ID NO: 112159 - protein, 401 aa, Unknown
  Bacterial polypetide isolated from the Sargasso Sea
MEDAVIVSVARTPIGKAFRGMFNDTEAPALGGHVVRTALERAGVAPADVDDVLIGCAAQQGTQGYNIGRLSAAAAGLPASVPGMAIDRMCSSGLMSIASAARSIGAGDARIVVAGGVESISLTQNKHKNVYRARSQAVLDHQPAAYMAMMETAEIVSRRYGISRAAQDEFALQSHQRTADAQAAGRFDAEIAPLDVRRALFDKEGNPAGYEDVNAARDEGVRADTTAERLAGLKPSWSGGKVVEQGAFVTAGNASQLSDGAAAVVVMSRSEAVRRGLTPLGAFRGLAVAGCEPDEMGIGPVFAIPKLLARFGMTVGDIGLWELNEAFACQALYCRDTLGIPDDRLNVDGGAIALGHPFGMSGTRMTMHALLEGARRGVRHAVVTMCIGGGMGAAALFEVGA

SEQ ID NO: 112160 - protein, 186 aa, Unknown
  Bacterial polypetide isolated from the Sargasso Sea
DVNGEVTVNKDEGPREPDIEKIKSLNPAFLEGGTVTAATSSPISIGAAAVLMTSDTFADKNNLNPRAEISSRAVAGVHWNRMGMGPLPATEKALAKAEITMDDVETIELNEAFAAQALYVIREGGWDQNKINLNGGAIALGHPLGCSGARIITTLINVMEQQNTKVGLATMCIGGGQGIATVIKRS

SEQ ID NO: 112161 - protein, 246 aa, Unknown
  Bacterial polypetide isolated from the Sargasso Sea
FKNLYGIDSMPEPAENVAEDFSISREDQDLFAFRSQEKAALAIGSGRLAHEIIPINLEGKSPEVVSKDEHPRKADLEKLAQLSTPFRKDGTVTAGNASGVNDGAAALIIASTSAVEKYQLEPFAKILGMATAGVEPRIMGIGPVPATKKLLERLNLKISDFDIIEINEAFAAQSLAVMRLLGLKDNSDFVNPNGGAIALGHPLGMSGARLALTSGLELKLSGLNRALCTMCIGVGQGISLAIERVN

SEQ ID NO: 112162 - protein, 260 aa, Unknown
  Bacterial polypetide isolated from the Sargasso Sea
DTTIGWRFINPKMEKLFGIDSMPETAENLAEQFNISREDQDSFALSSQQKTSKAMASGRLAIEMIPVSIPRRKQEPLQVEQDEHPRGDTTLEKLTKLPAPFRSGGSVTAGNASGVNDGAAALIIASEKAVLEHNLKPRARILASSTAGVEPRIMGYGPVPSVKKLLNLSKIRLDEIGVIEINEAFAAQVLTVSRELGMEDDDPRINPNGGAIALGHPLGMSGARLVLTSVEELHQRQEKLALCSMCIGVGQGISMLLERV

SEQ ID NO: 112163 - protein, 295 aa, Unknown
  Bacterial polypetide isolated from the Sargasso Sea
TVNRLCSSGMAAIIHANRAIKAGEGEVFISGGVEHMTRGPWVISKVSKPFGRDAQMHDSSFGWRFVNPKMKEMYGTDAMGQTAENLVDKYGISREDQDKFAAWSQAKATEAQNNGRLAKEIVSVEIPQRKTDPIIFSKDEFIRPGTTEEKLAKLRPAFRKEGGTVTAGNASGLNDGAAATIIASEDAVKQYELKPLARIVSAAVHGVEPRIMGIGPVGASEKALKRAGLTLDDMDIIELNEAFAAQVLACTREMGLADDNPRINPNGGAIALGHPLGVTGTRILHTAALQCKKQA

SEQ ID NO: 112164 - protein, 307 aa, Unknown
  Bacterial polypetide isolated from the Sargasso Sea
KVPGTTINRLCGSGMDAIGQRARAIRCGEADLVLAGGVESMSRAPFVMPKSEKGFSRDLSIYDTTIGWRFINERMHALYGTDSMPETAENIAQDFKISRLDQDLYAARSQERTHEARDWLQGEITAVTVPQPRKGPKIVMQDEHPRPGTLLEDLARLPAPFRENGTVTAGNASGVNDGAAAVILATEQAAKENGLQCLARISGMASAGVEPRIMGIGPVPATRKLMDHLDLSIDDFDVIEINEAFAAQVLAVIREFGLDDSAEQVNRNGGAISLGHPLGASGARLVGTAARMLSEGGHKRALCTMCI

SEQ ID NO: 112165 - protein, 274 aa, Unknown
  Bacterial polypetide isolated from the Sargasso Sea
MPKANSAFSRNAEIYDTTIGWRFVNPKMKENFGIDSMPETAENVAEKYQISREDQDRMALSSQQKAANSISSGRLAKEITSVKIPQRKGKPIIFDNDEHPRGTSLEKLSSLPSPFRQNGSVTAGNASGVNDGAAAIIIASEAGVKRNHLTPKARIISAASAGVEPAYMGIGPVPASIKALKIAGLNVEDMDVIEINEAFAAQGLASLRSLGIQDNDERVNPNGGAIALGHPLGMSGTRLILTATQELIEKSKKYALCTMCVGVGQGSAVIIEKV

SEQ ID NO: 112166 - protein, 287 aa, Unknown
  Bacterial polypetide isolated from the Sargasso Sea
MYKDFKAHLVNEIENTKKAGLYKSERIITSPQSSVINTNNQKNIINLCSNNYLGLSSDPSVLEAAKESIDTHGYGMSSVRFICGTQNIHKDLEDTISEFLGTEDTILYAAAFDANGGLFEPLFGPEDAIISDELNHASIIDGIRLCKASRHRYSHNNMKDLEEKLQETQDSRARIIVTDGVFSMDGTIAQLDKICALAEKYNALIMIDECHSTGFMGENGKGVHELKDVMGKIDIITGTLGKALGGASGGFTSGRKEMIDLLRQKSRPYLFSNTLAPSIVGASLKVL

SEQ ID NO: 112167 - protein, 289 aa, Unknown
  Bacterial polypetide isolated from the Sargasso Sea
TVNRLCASGMAATINAYRAIATGDGDMYISGGIEHMTRGPWVISKVSKPFGRDAQMFDTSFGWRFINPIMAKSYGTEGMGQTAENLVEKYNIRREDQDQFAYWSQMKATQAQNNGRLDEEITSVSIPQRKKDDLIFKKDEFIKPKSTLEKLNSLNPAFKKENGSVTAGNASGLNDGAAALLLGTDQAAVKNHLKPIARIVSSGVAGVEPRIMGIGPVKASEKALKRAGLTINDMDVIELNEAFAAQSLACTRELGLQDNDPRINPNGGAIALGHPLGMTGARILQTAAI

SEQ ID NO: 112168 - protein, 190 aa, Unknown
  Bacterial polypetide isolated from the Sargasso Sea
RRKQEPIQVEQDEHPRGDTTLEKLSKLPAPFRSGGSVTAGNASGVNDGAAALIIASEKAALEHNLKPRARILASSTAGVEPRIMGYGPVPSVKKLLNLSKIRLNEIGVIEINEAFAAQVLTVSRELGMEDDDPRVNPNGGAIALGHPLGMSGARLVLTAVEELHQRQEKLALCSMCIGVGQGISMLLARV

SEQ ID NO: 112169 - protein, 206 aa, Unknown
  Bacterial polypetide isolated from the Sargasso Sea
MASGRLAIEMIPVSVQRKKLEPLEVEQDEHPRGDTTLEKLSKLPASFRSGGSVTAGNASGVNDGAAALIIASEKAALEHNLKPRARILASSTAGVEPSIMGYGPVPSVKKLLDISKIRLDEIGVIEINEAFAAQVLTVTRELGMEDDDSRINPNGGAIALGHPLGMSGARLVLTAVEELHQRQEKLALCSMCIGVGQGISMLLERV

SEQ ID NO: 112170 - protein, 276 aa, Unknown
  Bacterial polypetide isolated from the Sargasso Sea
RNARIQRHRLCGSGLQAVVSAAQTVLLGDADIAIAGGAESMSRAPYLAPAARWGSRMGDAKMVDMMLGALHDPFHTIHMGVTAENVAREFGISREQQDQTALESHQRASRAIQAGYFKDQIVPVTIKSRKGDIQFDTDEHVRHDATIDDMTKLKPVFTKENGTVTAGNASGLNDAGAALVLMERSVAEKRGLKPLARLVSYGHAGVDPKIMGIGPVPATRKALERAGLSVKDLDVIEANEAFAAQACAVTKELGLDPAKVNPNGSGISLGHPIGAT

SEQ ID NO: 112171 - protein, 225 aa, Unknown
  Bacterial polypetide isolated from the Sargasso Sea
MYVDLWSEWGASRGPTAYSIPGREVGGLRRGASSVRSFVPPRFWGPRAGCYAGGVLRGPGATRAGCYAGRVLRGRGATRAGCYAGGVLRRPGATRAGCYAGRVLCGPGATRAGCYADRVLRGRGATRAGCYAGGVLRGPGVTRAGCYAGEVLRGWGATRAGCYAGEVLRGPGFTRARCYAGRVLRGPGCYAGCYAGGVLRGRGSTRAGCYAGGVLRGPGATRAGC

SEQ ID NO: 112172 - protein, 396 aa, Unknown
  Bacterial polypetide isolated from the Sargasso Sea
MYGKIKNFLSDELQGVSDAGLFKKERIITTPQGAEVSVSSGDEVVIMCANNYLGLSSNSEVIDAAKQALDTHGFGMSSVRFICGTQDIHKELENKIANFYKTEDTILYAAAFDANGGLFEPLFGPEDAIISDELNHASIIDGVRLCKAKRYRYKHSDMSDLEAQLIESQSQRHRIIVTDGVFSMDGDIAKMDEICDLADKYDALVMTDECHSAGFIGETGRGVPEYHNVMDRVDIVTGTLGKALGGAMGGYTTGKKEVIEMLRQRSRPYLFSNSLAPSIVGAANKVFDILSASTELRDKLEDNTNYFKSKIIEAGFDVKEGDSPIVPIMLYDAALSQSFADKLLEEGVYAIGFFYPVVPKGKARIRTQISAAHEKHHLDKAISAFIKVGKELGVIS

SEQ ID NO: 112173 - protein, 347 aa, Unknown
  Bacterial polypetide isolated from the Sargasso Sea
VDLGTLVSKEAISRSNLNSEEINHAVFGNVIHTEPRDMYVSRVIGLQSGLKKESAALTVNRLCGSGLQAIVSATQLILLEDAEVVLAGGVEVMSSGTHVVQGFRWGSRMGDAKVFDMMLGSLQDPFGHGHMGITAENISERYQISREMQDKFALTSQTRAVDAIKNGKFKEQIIPIEIKTRKGIEIFDKDEHVKPDTTLDTLSNLKAAFKKDGSVTAGNASGINDGASALVLANEKKAKKGKPLARIVSYGFGGVEPDEMGMGPIPASKMALKKSGLNVDDIDLVESNEAFAAQACAVNKQLGLDPAKVNVNGGAIALGHPVGATGSIIMTKLIHELKSINGRYGLA

SEQ ID NO: 112174 - protein, 218 aa, Unknown
  Bacterial polypetide isolated from the Sargasso Sea
RAINAINEGSFKDEIIEVSVSQRKGNPIIFDTDEYPRYRQENGKLILNTSIEKLSDLKPAFRKGGTVTAGNSSGINDGAAAILMMSKERSEELGLKPIAKWKGSAVAGVDPSIMGIGPVPSTKKLLARLSLDKEDVGLIEINEAFAAQTIGVMKELELDHEKVNVNGGAIALGHPLGCSGARIFTTLLHEMKRKDVRYGLATLCVGVGQGVSTVVELM

SEQ ID NO: 112175 - protein, 297 aa, Unknown
  Bacterial polypetide isolated from the Sargasso Sea
KSGEQSLLIAGGVESMSRAPFVIGKATSAFSRQNSMEDTTIGWRFINPKMEELFGTDSMPETAENLAEQFNISREDQDSFALSSQQKTSKAMASGRLAIEMIPVSIPRRKQEPLQVEQDEHPRGDTTLEKLSKLPAPFRSGGSVTAGNASGVNDGAAALIIASEKAALEHNLKPRARILASSTAGVEPRIMGYGPVPSVKKLLNLSKIRLDEIGVIEINEAFAAQVLTVSRELGMEDDDPRINPNGGAIALGHPLGMSGARLVLTAVEELHQHQEKLALCSMCIGVGQGISMLLERV

SEQ ID NO: 112176 - protein, 288 aa, Unknown
  Bacterial polypetide isolated from the Sargasso Sea
VEQQWISRIHKALNTAADRGDIEYTYSENVANTDYERVMREYAEQGQQLIVGEVFGLERAARKVAKDYQNTAFLMGSSFGGVGPNFAVFDNWIHEPSYLSGMIAGSMTKSNKIGMVGGYAIPEVNRLMHAFMDGARDVNPDVKFMVNFIDSWYDPPKAKESAFAMMDAGADIMYAERFGVSDAAVERGVKAIGNVIDTSGDYPGTILASALWHMEATIDKAISNVVSGNFEAADYGQYSFMAYGGGSLVMDESLVPADVATSVKAKQQEILDGLFRVNVNDARPQSDG

SEQ ID NO: 112177 - protein, 151 aa, Unknown
  Bacterial polypetide isolated from the Sargasso Sea
RVLVHGSRPQIETRLEARGLTPAYHEGLRITDAATLECVIDAVGHLRIAIEARLSMDMASSPMQGSRLRVASGNLVTARPIGVLEGVDYHHTGEVRRVDRKGINRLLDERSIVLLSPLGYSPTGEIFNLACEDVATRAAIDLGADKLLLFG

SEQ ID NO: 112178 - protein, 142 aa, Unknown
  Bacterial polypetide isolated from the Sargasso Sea
MHDYVNWLRHASPYINAHRDCTFVVMLPGEGIAHPNFANIVHDLVLLHSLGVRLVLVHGSRPQIEARLTARGLTPHYHRDLRITDAPTLECVIDAVGQLRIAIEARLSMDMAASPMQGSRLRLTSGNFVTARPIGVLDGIDY

SEQ ID NO: 112179 - protein, 330 aa, Unknown
  Bacterial polypetide isolated from the Sargasso Sea
MTLTHQISRRLALALVASASLFSSVGIAAADKIKVAAIYTLPVEQQWISRIHKALNTAADRGDIEYTFSENVANTDYERVMREYAEQGQQLIVGEVFGLERAARKVAKDYQNTAFLMGSSFGGVGPNFAVFDNWIHEPSYLSGMIAGSMTKSNKIGMVGGYAIPEVNRLMHAFMDGARDVNPDVKFMVNFIDSWYDPPKAKESAFAMMDAGADIMYAERFGVSDAAVERGVKAIGNVIDTSGDYPGTILASALWHMEATIDKAIANVVSGNFEAADYGQYSFMAYGGGSLVMDESLVPADVASSVKAKQQEILDGLFRVNVNDARPQSDG

SEQ ID NO: 112180 - protein, 249 aa, Unknown
  Bacterial polypetide isolated from the Sargasso Sea
MHDYVTWLRHASPYINAHRDCTFVVMLPGEGVAHPNFANIVHDLVLLHSLGVRLVLVHGSRPQIEARLAARGLIPHYHRDLRITDAPTLECVIDAVGQLRIAIEARLSMDMAASPMQGSRLRLTSGNFVTARPIGVLDGVDYHHTGEVRRIDRKGINRQLDERSIVLLSPLGYSPTGEIFNLACEDVATRAAIDLGADKLLLFGAEDGLLDEQGRLVRELRPQQVPAHLTRLGSNYQGELLDAAAEACR

SEQ ID NO: 112181 - protein, 287 aa, Unknown
  Bacterial polypetide isolated from the Sargasso Sea
MQGAHINVVSGNFIIAQPLGVDDGVDYCHSGRIRRIDEEAIHRQLDNGAIVLMGPVAVSVTGESFNLTSEEIATQLAVKLKAEKMIGFCSSQGVYNQDGVIVSELFPNEAQARVEELEAEEDYNSGTVRFLRGAVKACRSGVRRCHLISYQEDGALLQELFSRDGIGTQIVMESAEQIRRATINDIGGILELISPLEQQGILVRRSREQLEMEIDKFTIIQRDNTTIACAALYPFPEEKIGEMACVAVHPDYRSSSRGEVLLNRIATQAKQMGLSKLFVLTTRSIHW

SEQ ID NO: 112182 - protein, 445 aa, Unknown
  Bacterial polypetide isolated from the Sargasso Sea
MRCKQRVRTTELVDGFRHSAPYVNAHRGKTFVVMLGGEALAQNQFRGILNDVALLHSLGIKVVLVYGARPQIDAALAANGIEPAYHEGVRITDEDSLKVIKQVAGALQFDITARLSMSLSNTPMQGAQINLVSGNFVIAQPLGVDNGVDFCLSGKVRRIDTQGLKRQLDNHCIVLMGPIAASVTGESFNLTAEEIATQVAIKLKADKMIGFSSQNGILDRNGDVIAELMPNDAQNILTKLAEQGSACVGTMAFLKASIDACRNGVPRCHLVSYLDDGALLQELFSREGIGTQIVTESAERLRRASISDIGGVLNLIRPLEEQGILVRRSREQLEIEIEQFMLIERDGLVIGCAALYPFEEDNAGEFACLVVHPDYRDADRGSLLLKNIIGQARSRGYSRLFALTTRSIHWFLEHGFVIEDVEALPQKKKQLYNYQRRSKILALDL

SEQ ID NO: 112183 - protein, 445 aa, Unknown
  Bacterial polypetide isolated from the Sargasso Sea
MRCKQRVRTTELVDGFRHSAPYVNAHRGKTFVVMLGGEALAQNQFRGILNDVALLHSLGIKVVLVYGARPQIDAALAANGIEPAYHEGVRITDEDSLKVIKQVAGALQFDITARLSMSLSNTPMQGAQINLVSGNFVIAQPLGVDNGVDFCLSGKVRRIDTQGLKRQLDNHCIVLMGPIAASVTGESFNLTAEEIATQVAIKLKADKMIGFSSQNGILDRNGDVIAELMPNDAQNILTKLAEQGSACVGTMAFLKASIDACRNGVPRCHLVSYLDDGALLQELFSREGIGTQIVTESAERLRRASISDIGGILNLIRPLEEQGILVRRSREQLEIEIEQFMLIERDGLVIGCAALYPFEEDNAGEFACLVVHPDYRDADRGSLLLKNIIGQARHRGYSRLFALTTRSIHWFLEHGFVIEDVDALPQKKKQLYNYQRRSKILALDL

SEQ ID NO: 112184 - protein, 98 aa, Unknown
  Bacterial polypetide isolated from the Sargasso Sea
MTKNSITLHNTFAEAFPMKASRLIVTAYSKKWALEAANSFTGFATSVIACGCEAGIESILNPEDTPDGRPGVSLLVFSMSEKDLAKQILNRAGQCIMT

SEQ ID NO: 112185 - protein, 282 aa, Unknown
  Bacterial polypetide isolated from the Sargasso Sea
MYVEVMVPHEIQHPYPIVFLHGAGQTGVDYMQTPDGRPGWAFDFLEMGYVVYVQDFPARGRSQYVPGVDGDIRIRNGHNLEEIFTASAATADFPQASKHTQWPGTGRMGDPIADNFMKTQVQFIGGRQAQLTIDANVALLDMIGTPVILLTHSQGGWFGWNIADERPELVHTIVTLEPAAPPIRGVNTSTATYRDGGGLSWGVGNTPITYDPPVNNSSELQVELQSQSEGPGLVPCYQQVEPARQLVNLADIPVLFMNGEGGYHRIFDHCLANWLNQAGVQT

SEQ ID NO: 112186 - protein, 103 aa, Unknown
  Bacterial polypetide isolated from the Sargasso Sea
MIINGIKIEDTFAEAFPMKVVRLIITADSKYWLKQAANNITGFATSVIACGCEAGIEKEIKSSKTPDGRPGIAVLLFAMDSKGLAKQILRRVGQCILTSPTTA

SEQ ID NO: 112187 - protein, 298 aa, Unknown
  Bacterial polypetide isolated from the Sargasso Sea
MKINGLAIENTFAEAFNMKASRIIVTADNTKWARNAAVSFTGFATSVIACGVEAGIEKQLTTKDTPDGRPGFSILLFSMSRSQLEKQLETRAGQCILTCPTTALFSGLDGEDMIPLGKNLKYFGDGYQIAKRIDKKRFWRIPVMDGEFMCEEMTARIPAIGGGNFLLLSKNRSSCLLACELAVNVMSKIDNIITPFPGGVVRSGSKVGSKYKALIASTNDAFCPSLSGITGSKLHKSVNCVMEIVINGLTRDDIDKGIRESLIAISKSKYKKDIVSVSAGNYGGKLGQHHFHLRKILK

SEQ ID NO: 112188 - protein, 331 aa, Unknown
  Bacterial polypetide isolated from the Sargasso Sea
MAFWKNSALRTVRRGHMWISGDRIERDGQTHQCGPLFVEWEAPEEVTRPWPIVLVHGGGYQGTEWFDTPDGRPGWAQRLVEAGYAVLVVDRPGQGRSPYHVETMGPMGPGFSYEHGRDIYFPTKYESQHTQWPFARDDEAAMDEFIAGYGPLPADLAFSEDMEADRIAKLLDRIGPAILLTHSASGPVGWLVADRRPGLVKGIVAVEPMGPPFAHIPNIGSLAWGLAAAPLSWEPPVATPEELRAALPGTYRLPALAGLPIVAVTAEASAFAAASRPAIEQLKAAGSRAEVLHLPDHGVFGNGHGLIYEKNSDDALVPVLRWLVENTEKPN

SEQ ID NO: 112189 - protein, 298 aa, Unknown
  Bacterial polypetide isolated from the Sargasso Sea
MIYKGIKIDNTFAEAFNMKASRIIVTADNSKWARNACDSFTGFATSVIACGIEAGIEMALKKSETPDGRPGYSILLFSMSRSQLEKQLETRVGQCILTCPTTAIFSGMNGEDMIPLGKNLRYFGDGYQISKKINNKRFWRIPVMDGEFLCEELTARVPAIGGGNFLVLSSNRKSCLEACEVAVDAIKNLPNVITPFPGGVVRSGSKVGSKYKALIASTNDAFCPTLRSFTKSSLSENVNCVMEIVINGLTFEDISLATKKCIESISKSTIKKDILSISAGNYGGKLGQYQFHLRKIMK

SEQ ID NO: 112190 - protein, 103 aa, Unknown
  Bacterial polypetide isolated from the Sargasso Sea
MSAIIDDTYAEAFKSIYVEILITAVNQKWVKHAVDAATGNASSSILCDCEAGFDRFVGPGGDESVETPDGRPGAIIQLHIPKFWKDPKKLEKSALVRISQNIL

SEQ ID NO: 112191 - protein, 298 aa, Unknown
  Bacterial polypetide isolated from the Sargasso Sea
MKIKGIEIHNTFAEAFNMKAARIIVTADNNKWAKNACLSFTGFATSVIACGIEAGIEKQLNKNETPDGRPGFSILLFSMSRSQLEKQLETRVGQCLLTCPTTAVFSGIDSEDKIPLGKNLRYFGDGYQISKKINSKRYWRIPVMDGEFMCEEYTSRISAIGGGNFLILSKSRKSCLEACEIAIEAIKNEANIITPFPGGVVRSGSKVGSKYKALIASTNDAFCPTLKSLTQSKLPSTVSCVMEIVINGISHNDIASATKKSILAISNSKVKKDIVAVSAGNYGGKLGQHKFYLRKILK

SEQ ID NO: 112192 - protein, 154 aa, Unknown
  Bacterial polypetide isolated from the Sargasso Sea
MNIEKLKENIENIDAENISSEDITSIRQTIEALDNGKIRVAEQVDGEWLVNEWVKKSILHYFTIENLKVISSGDVTYFDKLEPKKNYEDLKIRVVPPGVVRYGAFCEPGVVVMPGFVNIGAYVGSGTMVDTWATVGSCAQIGKNVHLSGGVGIG

SEQ ID NO: 112193 - protein, 46 aa, Unknown
  Bacterial polypetide isolated from the Sargasso Sea
VVVPDSLPGKSLPDGSQGPSLYCAVIVKKVDAQTRSKTSVNELLRD

SEQ ID NO: 112194 - protein, 138 aa, Unknown
  Bacterial polypetide isolated from the Sargasso Sea
MSIENIINKAWEIKDQVGPNSDQNLKDAINQIIEDLDCGKSRVAEKIDGKWVTHQYLKKAIMLSFRIYPMENLNGPYSSWYDKAHLLKGKTAGWTKQDHEKAGFRMVPNSPVRKGSFVGKNAVLMPCYVNIGAYIDEG

SEQ ID NO: 112195 - protein, 161 aa, Unknown
  Bacterial polypetide isolated from the Sargasso Sea
MSDNTELKNKIESAWENITKISPTDTDIADAVNEVIKKLDNGQSRIAEKNGNDWIVNQWLKKAVLISFRINDNKILKGPYTSWYDKVKGKTVDWNEDQWKEAGYRHVPNGTVREGSFIGKGVVLMPSFVNIGAYIDEGTMVDTWATVGSCAQMEKTVTYQV

SEQ ID NO: 112196 - protein, 188 aa, Unknown
  Bacterial polypetide isolated from the Sargasso Sea
MSNLENIINQAWEKKDQINQNSDQAFKDAINQVIKDLDSGKSRVAEKINGNWVTHQYLKKAIMLSFRIYPMENLNGPYSSWYDKSHLLKGKTAGWSKEDHEKAGFRMVPNSPVRKGSFVGKNAVLMPCYVNIGAYIDEGTMIDTFARAGSCCQIGKNCHISAGSGVGGVLEPAQALPTIIEDQCFFGC

SEQ ID NO: 112197 - protein, 189 aa, Unknown
  Bacterial polypetide isolated from the Sargasso Sea
MSLEKIINDAWENKDQVSPNSDQSLKDAINQVISDLDSGKSRVAEKINGDWVTHQHLKKAIMLSFRIYPMENLNGPYSSWYDKSHLLKGKTAGWTKEDHEKAGFRMVPNSPVRKGSFIGKDAVLMPCYVNIGSYIGAKTMMDTFSRAGSCCQIGENCHISAGSGVGGVLEPAQALPTIIEDNVFLGAMS

SEQ ID NO: 112198 - protein, 189 aa, Unknown
  Bacterial polypetide isolated from the Sargasso Sea
MTDLEKIINDAWENKNDVTQNSDGSLLNSINQIIDDLDKGKIRVAEKINNEWVTHQYIKKAIMLSFRIHSMEALSGPYSSWYDKSHLLKGKTAGWGKDDFEKAGFRMVPNSPVRKGAHIAPNVVLMPCFINIGAYVGSGTMMDTFSRAGSCCQIGENCHISAGSGVGGVLEPAQALPTIIEDNVFLGAM

SEQ ID NO: 112199 - protein, 93 aa, Unknown
  Bacterial polypetide isolated from the Sargasso Sea
CFVGARAELLKVLLLAKDLFYLWEFTFGASTRIIDRATGEIHYGKVPPYSVIVPGAMPSKNNPDGPSLYCVIIVKKVDEKTRSKTSINDLLRD

SEQ ID NO: 112200 - protein, 95 aa, Unknown
  Bacterial polypetide isolated from the Sargasso Sea
RIIYDRETGRSKGIAFVHFAEKESIAIAAERTHGVEIDGRAVRCNPAADGPTQHPPPRTADRGRGGRRDDRRGRDRDDSRRGGDRGRYSRRSRSR

SEQ ID NO: 112201 - protein, 151 aa, Unknown
  Bacterial polypetide isolated from the Sargasso Sea
MSLEKIINDAWDKKDQVNQNSDQSLKDAINQVIRDLDSGKSRVAEKIDGRWITHQHLKKAIMLSFRIYPMENLNGPYSSWYDKAHLLKGKTAGWTKEQHESAGFRMTPNSPVRPGSFIGNNAVLMPCYVNIGAYIGAGTMMDTFSRAGSCC

SEQ ID NO: 112202 - protein, 87 aa, Unknown
  Bacterial polypetide isolated from the Sargasso Sea
MSIENIINKAWENKDQVNPNSDQSLKDTINNIINDLDSGKVRVAEKIDGNWITHQYLKKAIMLSFRIYPMENLNGPYSSWYDKAHLL

SEQ ID NO: 112203 - protein, 118 aa, Unknown
  Bacterial polypetide isolated from the Sargasso Sea
MDNLENFINEKFDKRSEINSSQDNNELKNTVKNIIQKLDNGELRIAEKINGEWIVNQWLKKAVLLSFILDENTVIEGSHANYFDKITNKFFDYNKANFIKTGARVVPTAIVRHGSFIG

SEQ ID NO: 112204 - protein, 41 aa, Unknown
  Bacterial polypetide isolated from the Sargasso Sea
VPGSLPDKNNPTAPSLYCAVIIKEVDEKTRSKTSINDLLRE

SEQ ID NO: 112205 - protein, 261 aa, Unknown
  Bacterial polypetide isolated from the Sargasso Sea
IENIDAENISSEDITSIRQTIEALDNGKIRVAEQVDGEWLVNEWVKKSILHYFTIENLKVISSGDVTYFDKLEPKKNYEDLKIRVVPPGVVRYGAFCEPGVVVMPGFINIGAYVGSGTMVDTWATVGSCAQIGKNVHLSGGVGIGGVLEPPSAMPVIIEDGAFIGSRAIIVEGVRIGKGAVIGANVTITSSTPVIDVSGEKPIEHKGIVPENSVVIPGTRPKKFPSGEFEVQCALIIGQRKESTNEKTSLNEALRTFGVDV

SEQ ID NO: 112206 - protein, 68 aa, Unknown
  Bacterial polypetide isolated from the Sargasso Sea
MSNIEKIINDAWEIKDQINKNSDKSIIKSINKIIDDLDQGKVRVAEKIDGEWKTHQYIKKAVMLSFRI

SEQ ID NO: 112207 - protein, 258 aa, Unknown
  Bacterial polypetide isolated from the Sargasso Sea
IDAENISSEDITSIRQTIEALDNGKIRVAQQVDGEWLVNEWVKKSILHYFTIENLKVISSGDVTYFDKLEPKKNYEDLKIRVVPPGVVRYGAFCEPGVVVMPGFVNIGAYVGSGTMVDTWATVGSCAQIGKNVHLSGGVGIGGVLEPPSAMPVIIEDGAFIGSRAIIVEGVRIGKGAVIGANVTITSSTPVIDVSGEKPIEHKGIVPENSVVIPGTRPKKFPSGEFEVQCALIIGQRKESTNEKTSLNEALRTFGVDV

SEQ ID NO: 112208 - protein, 130 aa, Unknown
  Bacterial polypetide isolated from the Sargasso Sea
MSYDKLEKIINESFDIKEKIGPKSDKRLIKSIHETIDLVDKGKIRVANKKNGKWEVNQWIKKAILLSFRINKMKMLKGPYTSWYDKVPGKTVKWKETDWKKAGYRHVPNGVVRKGAFIAKNVVLMPSFVN

SEQ ID NO: 112209 - protein, 143 aa, Unknown
  Bacterial polypetide isolated from the Sargasso Sea
MVDTWATVGSCAQIGKDVHLSGGVGIGGVLEPVQAAPVIIEDGAFVGSRCIVVEGVRVGKEAVLGAGVTLTMSTKIVDVTGDKPVITQGYVPERSVVIPGTMPKEFAAGTYDVPCALIIGKRKESTDKKTSLNDALRENNVAV

SEQ ID NO: 112210 - protein, 170 aa, Unknown
  Bacterial polypetide isolated from the Sargasso Sea
MSNIEKIINDAWEIKDQINKNSDKSIIEAVSNILKELDEGKIRVAEKIDGKWTTHQYIKKAIMLSFRTYEKEVLQGPYSSWTDLSVYLKGKTAGWGAEEFKKAGFRMLPNSPVRFGSFINKNVVLMPCFVNVGAYIDQNTMMDTFSRAGSCCQIGKNCHISAGSGVGGVL

SEQ ID NO: 112211 - protein, 37 aa, Unknown
  Bacterial polypetide isolated from the Sargasso Sea
MQSKNNPNGPSLYCVVIVKKVDEKTRSKTSINDLLRD

SEQ ID NO: 112212 - protein, 48 aa, Unknown
  Bacterial polypetide isolated from the Sargasso Sea
MGEITKGRIPPFSFVVPGTHKDLYAVHIIKTVDSKTRSKTSINDLLRD

SEQ ID NO: 112213 - protein, 248 aa, Unknown
  Bacterial polypetide isolated from the Sargasso Sea
MSVIEFTIQELDKGNIRVASYNEDEWIINEWVRDTILLFFSIRNLKEISANDLLYYDKLEPKKNYKELGIRVVPPGVVRYGAFCEPGVVVMPGFVNIGAYVGSGTMVDTWATVGSCAQIGKNVHLSGGVGIGGVLEPAGAMPVVVEDGAFIGSRSIIVEGVRIKKGAVIGANVTLTASTPIIDVTGKDPVEVKGVVDENSVVIPGTRPKEFPSGVFNTPCALVIGKRKESTDEKTSLTDALRTFGVEV

SEQ ID NO: 112214 - protein, 324 aa, Unknown
  Bacterial polypetide isolated from the Sargasso Sea
MSETDTEKSNPIGRLKRYANVTSAVGGLAARMAGERYLGIKIDRENHAKVLTEALGGLKGPLMKVAQILSTIPDALPPEYREELSKLQADAPSMGWLFVKRRMATELGIDWQKKFKSFEKQSCSAASLGQVHKAISLDQKNLACKLQYPDMQSAIEADLKQLKLGFTLYERADKAISTKSIHKELSARLSEELDYNREASNIKLYSAILESESSVNVPEVIEDLSTKRLLTMTWLQGEKLTKWLEQDPNLKSRNNVAINMFKAWYIPFYFYGVIHGDPHLGNYSITKNENINLLDFGSIRFFNPTFVEGVIVLYKALKTKNSKL

SEQ ID NO: 112215 - protein, 422 aa, Unknown
  Bacterial polypetide isolated from the Sargasso Sea
MIDLVRIQIPVSMEYMVEIYDRETGRLTGGEVDISLFHQYGCKLAAGSVDRDDNGVTTVHRLYHPFESIPSSNSSLAFKIRAGGHNYFPHVELNASPAKLLTGQNVYGTADFEKCISSLLYVFSTSFPGIESVLDYHLAEVCQMDFTYSAMVENLFIAKQIVQALRHVSSGQIRSSRETYETSVLWNAGSSHCVREVYLKHFEVKRQIERLTKLQKQSPKDYQAFQLEQLNKPEVLAFAQNAVRFEAKVKKRMFERLGIPTRVTDLVNYAESYKGDLAQFMWNQSFKDIFDTFKGSDVNVYDDEKVLEALKARYYTVNKTGKVNYSKALRIMRFFRSIKNEGFVQVKATTPHRTFYDNLKEVSAVVPKATLQNMHTVKNNVVPLIRLVNVDFAKQHPVGWQEPIHMSQQIDNSLKQPLRLVG

SEQ ID NO: 112216 - protein, 215 aa, Unknown
  Bacterial polypetide isolated from the Sargasso Sea
MPFLLFFSIRNLKEISANDLIYYDKLEPKKNYKELGIRVVPPGVVRYGAFCEPGVVVMPGFVNIGAYVGTGTMVDTWATVGSCAQIGKNVHLSGGVGIGGVLEPAGAMPVVVEDGAFIGSRSIIVEGVRIKKGAVIGANVTLTASTPIIDVTGEEPVEVKGVVDENSVVIPGTRPKEFPSGVFNTPCALVIGKRKESTDEKTSLTDALRTFGVEV

SEQ ID NO: 112217 - protein, 241 aa, Unknown
  Bacterial polypetide isolated from the Sargasso Sea
MKKSFRIAAAALAIAAVTMGCSAQADQATDKLKATLQTRLADVTIKSVTKSPIAGLYEVNLGTQIIYSDANGDYLMLGDMVDAKTRKNLTEARLAETNRIDFASLPFGNAVKVVKGNGARKIAVFSDPNCPYCKQLETSLKSLDNVTVYTFLYPVLSPDSTAKSKSIWCSTDRAKAWESWMQDHQAPTAAGTCDTAALDKNLALGHAMGVDGTPTVFLADGRRLPGAVSADRLDKEMSAVH

SEQ ID NO: 112218 - protein, 61 aa, Unknown
  Bacterial polypetide isolated from the Sargasso Sea
RATGEIFIGRVPSYSVVVPGSLPGPNLPDGSPGPALSCAVIIKRVDEKTRSKTSLNDLLRD

SEQ ID NO: 112219 - protein, 506 aa, Unknown
  Bacterial polypetide isolated from the Sargasso Sea
MKANFLLLFFLLFYSCGNEKNVQPNVVLIYLDDLGYGDVSSYELGTLETPNIDKIANGGIRFTNGYASSATCSPSRYALMTGTYPWRNKRAKIITGGNLIIDESEMTLPKMFKSLGYETGVVGKWHLGLGKGGPVDYNSLIKPGPNEVGFDHSYIMADTQDRVPTVYIENGNVVNLDPNDPIEINFGNDDYGLPSGTKNPELLTMKWHHGHNKAIVNGVPRIGYMKGGEKAKWSDIDMADEFINKAKEYLDTVKDKPFFLFYSLQQPHVPRTPHPRFEGTSGMGPRGDVIKEADWCIGEMYDYLEENGILENTIIIISSDNGPVLNDGYYDDAVEKLGDHTPAGNLRGGKYSLYEAGTRVPFITYWKGKIKPQVSDEVVTQIDFLNSFSSLLGSDTKSKDGVDLSSVFFENSGKGRDELVIEATSRTAFRQNNWVMIPPYNLPATNPRVNIELGNSKDYLLFNLDEDISQQNDLSKSNPEKLNEMITRYDEILGNNKKKAEKLELE

SEQ ID NO: 112220 - protein, 86 aa, Unknown
  Bacterial polypetide isolated from the Sargasso Sea
MSDIEKIINDAWENRDNVNQDSDQSLKDTINQMIDDLDSGKVRVAEKIDGEWVTHQHIKKAIMLSFRIYPMENLNGPYSSWYDKAH

SEQ ID NO: 112221 - protein, 233 aa, Unknown
  Bacterial polypetide isolated from the Sargasso Sea
MKIEELENIINEAFEKKQNISEKSDRKILDSINETIELTDKGSIRVAEKKNGQWMVNQWVKKAILLSFRVNKMTMSKGPYTTWYDKVPGKSVSWNEDDWKKAGYRHVPNGVVRKGSFIAKGVVLMPCFVNLGAYVDEGTMIDTWASVGSCAQVGKNCHVSGGAGIGGVLEPLQAGPVIIENNCFIGARSEIAEGVLVEEGAVISMGVYIGASTKIVDRETGKITYGKVQLTQL

SEQ ID NO: 112222 - protein, 169 aa, Unknown
  Bacterial polypetide isolated from the Sargasso Sea
MSDIEKIINEAWEIKDQINKNSDKSIIDTINQIIEDLDQGKKRVAEKINGKWTTHQYIKKAVMLSFRIHEMEALTGPYSSWYDKAHLLKGKTANWKKSDFEAAGFRMVPNSPVRRGSYIGKNVVLMPCFVNIGAYVDSGTMMDTGSRAGSCAQIGKNCHISAGTGIGRV

SEQ ID NO: 112223 - protein, 63 aa, Unknown
  Bacterial polypetide isolated from the Sargasso Sea
TKIVDRKTGEITYGKIPPYSVVVPGSLPDKNNPAAPSLYCAVIIKQVDEKTRSKTSVNDLLRE

SEQ ID NO: 112224 - protein, 194 aa, Unknown
  Bacterial polypetide isolated from the Sargasso Sea
MNLEKIEKTINEAFKNKEKIDSSDKALNDVVRETINLLDNGKIRVAEKKSGKWQVNQWIKKSILLSFRVNKMKASKGPYSTWYDKVDGKTQGWSEEQVKKAGFRYVPNGVIRKGAHIAKNVVLMPSFINVGAYVDEGTMIDTWASVGSCAQVGKNCHISGGAGIGGVLEPMQANPTIVEDNCFLGARAEIAEGG

SEQ ID NO: 112225 - protein, 150 aa, Unknown
  Bacterial polypetide isolated from the Sargasso Sea
PCYVNIGAYIDEGTMIDTFARAGSCCQIGKNCHISAGSGVGGVLEPAQALPTIIEDNVFLGAMSEVVEGVIVGEGSVLSMGMYIGQSTKIVDRKSGKISYGKIPPYSVVIPGTLPDKKNLSAPSLYCAVIIKQVDEKTRSKTSVNDLLRE

SEQ ID NO: 112226 - protein, 210 aa, Unknown
  Bacterial polypetide isolated from the Sargasso Sea
MNLEKIEKTINETFEKKDKIDSSDKTLNDLVRETIDLLDNGKIRVAEKKGDKWQVNQWIKKAILLSFRVNKMKASKGPYSTWYDKVDGKTQGWSEEQVKKAGFRYVPNGVIRKGAHIAKNVVLMPSFINVGAYVDEGTMIDTWASVGSCAQVGKNCHISGGAGIGGVLEPMQANPTIVEDNCFLGARAEIAEGVIVEKGSVLSMGVYIGT

SEQ ID NO: 112227 - protein, 156 aa, Unknown
  Bacterial polypetide isolated from the Sargasso Sea
MSHQDIIEKLWDQRDQINFIEDNEAKKNVESVLNLLDEGKLRVCEKIENDWHVNQWLKKAILLSFRIQDMELITGGPSVKDGSTAWWDKVPSKFQDWKSENFQSAGFRAVPNCVVRRSAFIAKSAVLMPCFVNLGAYVDEGTMVDTWATVGSCAPV

SEQ ID NO: 112228 - protein, 95 aa, Unknown
  Bacterial polypetide isolated from the Sargasso Sea
FIGARSEVAEGVIIEDGVVLSMGVFLGASTKIIDRNTGEVYIGTVPSYSVVVPGTISGRALPDGTAGPSLYCAVIVKRVDEKTRSRTSINELLRD

SEQ ID NO: 112229 - protein, 33 aa, Unknown
  Bacterial polypetide isolated from the Sargasso Sea
NNSAAPSLYCAVIIKQVDEKTRSKTSINDLLRD

SEQ ID NO: 112230 - protein, 182 aa, Unknown
  Bacterial polypetide isolated from the Sargasso Sea
WTKEDHEKAGFRMVPNSPVRKGSFVGKNAVLMPCYVNIGAYIDEGTMMDTFSRAGSCCQIGKNCHISAGTGVGGVLEPAQALPTIIEDNVFLGAMSEVVEGIIVGEGSVLSMGMYIGQSTKIVNRKTGEITYGKIPPYSVVVPGSLPDKNNPQAPSLYCAVIIKQVDEKTRSKTSVNDLLRE

SEQ ID NO: 112231 - protein, 116 aa, Unknown
  Bacterial polypetide isolated from the Sargasso Sea
METEDLIQIIETAWDERDNLSQNTSGSIRDAIEMSLAGMDSGKFRVAEKKDDSWVVNEWLKKAVLLSFRLNDMEIIPGGPGDTVSWFDKVKSKFSSWTDEQFRTAGFRAVPNAIVR

SEQ ID NO: 112232 - protein, 52 aa, Unknown
  Bacterial polypetide isolated from the Sargasso Sea
IYGKIPPYSVLVPGSLPDKNNPSAPSLNCAVIIKQVDEKTRSKTSINDLLRD

SEQ ID NO: 112233 - protein, 235 aa, Unknown
  Bacterial polypetide isolated from the Sargasso Sea
MNNIEKIIDDAWKNKDNISQNSDQLIINTINQIIDDLDQGKARVAEKINGEWITHQHIKKAIMLSFRIHGMDALSGPYSSWYDKSHLLKGKTAGWTKKDFEKAGFRMVPNTPVRKGSYIAKNVVLMPCFINTGAYIGSGTMMDTFSRAGSCCQIGKNCHISAGSGVGGVLEPAQALPTIIEDNVFLGAMSEVVEGVIVGEGSVLSMGMFIGQSTKIVDRKTGEIIYGKIPPYSVL

SEQ ID NO: 112234 - protein, 167 aa, Unknown
  Bacterial polypetide isolated from the Sargasso Sea
NSPVRKGSFIGKNAVLMPCYVNIGAYIDEGTMIDTFARAGSCCQIGKNCHISAGSGVGGVLEPAQALPTIIEDNVFLGAMSEVVEGVVVGEGSVLSMGMYIGQSTKIVDRKTGEISYGKIPPYSVVVPGSLPNKNDSSKPSLYCAVIIKQVDEKTRSKTSVNDLLRE

SEQ ID NO: 112235 - protein, 244 aa, Unknown
  Bacterial polypetide isolated from the Sargasso Sea
KIINDAWEIKDKINQNSDESIKNAINQVIEDLDSGNSRVAEKINGEWVTHQHLKKAIMLSFRIYPMENLNGPYSSWYDKAHLLKGKTAGWTKEDHEKAGFRMVPNSPVRKGSFIGKNAVLMPCYVNIGAYIDSGTMIDTFARAGSCCQIGKNCHISAGSGIGGVLEPAQALPTIIEDNVFLGAMSEVVEGIIVGEGSVLSMGMYIGQSTKIVNRSTGEITYGKIPPYSVVVPGALPDKKNPSAP

SEQ ID NO: 112236 - protein, 228 aa, Unknown
  Bacterial polypetide isolated from the Sargasso Sea
LWQWITHQHIKKAIMLSFRIYPMENLSGPYSSWYDKAHLLKGKTANWTKKQHEEAGFRMTPNSPVRPGSFIGKNAVLMPCYVNIGAYIGAGTMMDTFSRAGSCCQIGENCHISAGSGIGGVLEPAQALPTIIEDNVFVGAMSEVVEGIIVGEGSVLSMGMYIGQSTKIVNRKTGEITYGKIPPYSVVVPGSLPNKNNSSAPSLYCAVIIKQVDEKTRSKTSVNDLLRE

SEQ ID NO: 112237 - protein, 100 aa, Unknown
  Bacterial polypetide isolated from the Sargasso Sea
RPSFVNLGAYVGSGTMVDTWATVGSCAQIGENVHLSGGAGIGGVLEPLQANPVIIEDDCFIGARSEVAEGVIVEEGAVLSMGVYLGASTKIVDRETGDVT

SEQ ID NO: 112238 - protein, 233 aa, Unknown
  Bacterial polypetide isolated from the Sargasso Sea
MNNLENIIDEAWKNKDQVNQNSDKVLKDAINQVISDLDNGKSRVAEKINGKWVTHQHLKKAIMLSFRIYPMENLNGPYSSWYDKAHLLKGKTAGWSKEDHEKAGFRMVPNSPVRKGSFVGKNAVLMPCYVNIGAYIDEGTMIDTFARAGSCCQIGKNCHISAGSGVGGVLEPAQALPTIIEDNVFLGAMSEVVEGVIVGEGSVLSMGMYIGQSTKIVNRKTGEITYGKNSTIL

SEQ ID NO: 112239 - protein, 47 aa, Unknown
  Bacterial polypetide isolated from the Sargasso Sea
SVIVPGSNPGKKLSDGSEGPGLYCAVIVKRVDERTRSKTSINDLLRD

SEQ ID NO: 112240 - protein, 184 aa, Unknown
  Bacterial polypetide isolated from the Sargasso Sea
LCKLGVRVVPPATARYGSYMQSGVVLMPSYVNIGAWIGANTMVDTWATVGSCAHIGCDVHLSGGVGIGGVLEPAHAQPVIIEDGAFIGSRSIIVEGVKVGKEAVVAAGVTITASTPIIDLRGAEASSTKGSVPPRSIVVPGTRKKVISGYEAHMGCAYIIGERNESTDRKTSLNEALREFKLSV

SEQ ID NO: 112241 - protein, 32 aa, Unknown
  Bacterial polypetide isolated from the Sargasso Sea
NPNGPSLYCAVIVKKVDEKTRSKTSINDLLRD

SEQ ID NO: 112242 - protein, 56 aa, Unknown
  Bacterial polypetide isolated from the Sargasso Sea
MVNCGVRCSDRQKCSFIRWCWNWWSFGTSSASPTIIEDNCFIGARSEVAEGVMSEK

SEQ ID NO: 112243 - protein, 57 aa, Unknown
  Bacterial polypetide isolated from the Sargasso Sea
RSTGEISYGEVPAYSVVVPGSLPNEDSKKPSLYCVVIVKTVDENTRKKTSINDLLRE

SEQ ID NO: 112244 - protein, 171 aa, Unknown
  Bacterial polypetide isolated from the Sargasso Sea
RYGAYLGSNVVLMPCFVNVGSYVDDDTMLDTWCTIGSCAQIGKRVHISGGTGIGGVLEPATATPTIIEDDCFIGARSEIAEGVIVKKGAVLASGTFITQSTKIYDRHSGRIYKGYIPENAVVVPGTLPSTEGNYSLQAAIIVKYADQQTRGKTALNNWLRSEQTLTTDSNH

SEQ ID NO: 112245 - protein, 212 aa, Unknown
  Bacterial polypetide isolated from the Sargasso Sea
MSIEKIINEAWENKDQVNQNSDKSLKDAVNQIIDDLDSGKARVAEKINGEWVTHQHIKKAIMLSFRMYPMENLNGPYSSWYDKAHLLKGKTAGWSKEDHEKAGFRMVPNSPVRRGSFIGKNAVLMPCYVNIGAYIDEGTMIDTFARAGSCSQIGKNCHISAGSGVGGVLEPAQALPTIIEDNVFLGAMSEVVEGVIVGEGSVLSMGMYIGQS

SEQ ID NO: 112246 - protein, 159 aa, Unknown
  Bacterial polypetide isolated from the Sargasso Sea
MSDNTELKNKIESAWENIAKISPNDTDIADAVNEVIKKLDNGQFRIAEKNGNDWIVNQWLKKAVLISFRINDNKILKGPYTSWYDKVKGKTVDWNEDQWKEAGYRHVPNGTVREGSFIGKGVVLMPSFVNIGAYIDEGTMVDTWATVGSCAQIGKNCHL

SEQ ID NO: 112247 - protein, 26 aa, Unknown
  Bacterial polypetide isolated from the Sargasso Sea
MYCAVIVKRVDERTRSKTSINDLLRD

SEQ ID NO: 112248 - protein, 71 aa, Unknown
  Bacterial polypetide isolated from the Sargasso Sea
MGVYIGASTRIVDRATGEIHYGKVPAYSVVVPGSMPSKNNPKGPSLYCVVIVKKVDEKTRSKTSINDLLRD

SEQ ID NO: 112249 - protein, 179 aa, Unknown
  Bacterial polypetide isolated from the Sargasso Sea
HIKKALMLSFRIYPMDNLSGPYSSWYDKAHLLKGKTAGWTKEDHEKAGFRMVPNSPVRKGSFVGKNVVLMPCYVNIGAYIDEGTMIDTFARAGSCCQIGKNCHISAGTGVGGVLEPAQALPTIIEDNVFLGAMSEVVEGVIVGEGSVLSMGMYIGQSTKIVNRKSGEITYGKIPPYSVV

SEQ ID NO: 112250 - protein, 131 aa, Unknown
  Bacterial polypetide isolated from the Sargasso Sea
MSIENIINEAWENKDQVNQNSDQKLKDTINQVIEDLDSGKSRVAEKIDGEWVTHQHLKKAIMLSFRIHGMETLDGPYSAWRDKAHLLKGKTAGWSNADFEKAGFRMVPNTAMRKGSYVAKNVVLMPSYVNI

SEQ ID NO: 112251 - protein, 45 aa, Unknown
  Bacterial polypetide isolated from the Sargasso Sea
YSVVVPGSMPSKNNPDGPSLYCVVIVKKVDEKTRSKTSINDLLRD

SEQ ID NO: 112252 - protein, 42 aa, Unknown
  Bacterial polypetide isolated from the Sargasso Sea
VVSGNLPSACGKYSLYAAIIVKKVDAKTRGKVGINELLRIVD

SEQ ID NO: 112253 - protein, 162 aa, Unknown
  Bacterial polypetide isolated from the Sargasso Sea
KGSFVGKNAVLMPCYVNIGAYIDEGTMMDTFSRAGSCCQIGKNCHISAGTGVGGVLEPAQALPTIIEDNVFLGAMSEVVEGIIVGEGSVLSMGMYIGQSTKIVNRKTGEITYGKIPPYSVVVPGSLPDKNNPQAPSLYCAVIIKQVDEKTRSKTSVNDLLRE

SEQ ID NO: 112254 - protein, 248 aa, Unknown
  Bacterial polypetide isolated from the Sargasso Sea
MNEIEKIINQAWENKEEINQNSEQSIISVINQIIEDLDQGKVRVAEKINGQWVTHQHIKKAIMLSFRVNGMDALSGPYSSWYDKAHLLKGKTAGWTKKDFEKAGFRMVPNTPVRKGSYIAKNVVLMPCFINTGAYIGSGTMMDTFSRAGSCCQIGKNCHISAGSGVGGVLEPAQALPTIIEDNVFLGAMSEVVEGVIVGEGSVLSMGMFIGQSTKIVDRKTGEIIFGKIPPYSVLVPGSLPDKNNPSA

SEQ ID NO: 112255 - protein, 227 aa, Unknown
  Bacterial polypetide isolated from the Sargasso Sea
MTVEKIINEAWENKDQVNQNSDQSLKDAINQVINDLDTGKSRVAEKINGEWKTHQHLKKAIMLSFRIYPMENLNGPYSSWYDKAHLLKGKTAGWTKEQHEAAGFRMTPNSPVRPGSFIGKNAVLMPCYVNIGAYIGAGTMMDTFSRAGSCCQIGENCHISAGSGIGGVLEPAQALPTIIEDNVFVGAMSEVVEGVIVGEGSVLSMGMYIGQSTKIVNRKTGDISYGK

SEQ ID NO: 112256 - protein, 77 aa, Unknown
  Bacterial polypetide isolated from the Sargasso Sea
EGSVLSMGMYIGQSTKIVNRSTGEITYGKIPPYSVVVPGTLPDKKNPSAPSLSCAVIIKQVDEKTRSKTSINDLLRE

SEQ ID NO: 112257 - protein, 240 aa, Unknown
  Bacterial polypetide isolated from the Sargasso Sea
LLDTGKERVAEYDNENGVQVNEWLKLAILLLFRQSEMSIQEVGPFEFVDKIPLKKNYSESKVRVVPGASARWGSYQAPGVVMMPSYINIGAYVGENTMVDTWATVGSCAQIGKNVHLSGGVGIGGVLEPPNAVPVFIGDECLIGSRCIVAEGASVGEGSVLGAGAVLTGSIPVIDAESGNELSRGIVPPWCVAVQASRERQFTGGTFGLPCVLVVRYLEPGERHDKSTLNEVLRTHGVTT

SEQ ID NO: 112258 - protein, 68 aa, Unknown
  Bacterial polypetide isolated from the Sargasso Sea
YIGQSTKIVNRKTGEITYGKIPPYSVVVPGSLPDKNNPQAPSLYCAVIIKQVDEKTRSKTSVNDLLRD

SEQ ID NO: 112259 - protein, 206 aa, Unknown
  Bacterial polypetide isolated from the Sargasso Sea
MQDIIESAWENRSLLEEPKTQETIRKVIDQLDLGEIRVAVPTEEGWKLNEWVKKAVVLYFPIQKMETLKAGPLEFYDKIPLKSGYQKKGIRVVPNAISRHGAYIAKGVIMMPSFVNIGAYVDSGTMVDTWATVGSCAQIGENVHLSGGVGIGGVLEPLQAAPVIIEDNVFLGSRSIVVEGVRVEKEAVLGANVVLTSSTKIIDVTG

SEQ ID NO: 112260 - protein, 212 aa, Unknown
  Bacterial polypetide isolated from the Sargasso Sea
MSIENIINDAWENRDQVSPSSEQSLKDTINQVIDDLDSGKSRVAEKINGEWVTHQHLKKAIMLSFRLYPMENLNGPYSSWYDKSHLLKGKTAGWTKEDHEKAGFRMVPNSPVRKGSFVGKNAVLMPCYVNIGAYIDEGTMIDTFARAGSCSQIGKNCHISAGSGVGGVLEPAQALPTIIEDNVFLGAMSEVVEGVIVGEGSVLSMGMYIGQS

SEQ ID NO: 112261 - protein, 103 aa, Unknown
  Bacterial polypetide isolated from the Sargasso Sea
QANPTIIEDDCFVGARAEIAEGVIVGKGSVLSMGVYIGASTRIFDRASGEIHYGKVPNYSVVIPGTMPSKNNPDGPSLYCVVIVKKVDEKTRSKTSINDLLRD

SEQ ID NO: 112262 - protein, 210 aa, Unknown
  Bacterial polypetide isolated from the Sargasso Sea
MKVDELEKIINDAFEDRQNISDTSNQKILDAINETINLTDKGSVRVAEKKNGNWTVNQWVKKAILLSFRTNKMTMSKGPYTTWYDKVPGKSVNWNEADWKKAGYRHVPNGVVRRGSYIAKNVVLMPCFVNLGAYVDEGTMIDTWASVGSCAQVGKNCHVSGGAGIGGVLEPLQAGPVIIEDDCFIGARSEIAEGVLVEKGAVISMGVYIG

SEQ ID NO: 112263 - protein, 215 aa, Unknown
  Bacterial polypetide isolated from the Sargasso Sea
MKELEKIINDAWENKEDINQNSHVSILNAVNQIIEDLDQGKIRVAEKINSEWITHQYIKKAIMLSFRIHNMEALSGPYSSWYDKAHLLKGKTAGWGKDQFEKAGFRMVPNSPVRKGSYIAKNVVLMPCFINTGAYVGSGTMMDTFSRAGSCCQIGANCHISAGSGVGGVLEPAQALPTIIEDNVFLGAMSEVVEGVIVGEGSVNSMGMYIGQSTK

SEQ ID NO: 112264 - protein, 60 aa, Unknown
  Bacterial polypetide isolated from the Sargasso Sea
WIVQLGKIHYGKVPAYSVVVPGSMPSTNNPKGPSLYCVVIVKKVDEKTRSKTSINDLLRD

SEQ ID NO: 112265 - protein, 198 aa, Unknown
  Bacterial polypetide isolated from the Sargasso Sea
MSIENIINEAWKNKDQVNPNSDKSLKDTINQIIDDLDKGKVRVAEKINGEWITHQYLKKAIMLSFRIYPMENLNGPYSSWYDKAHLLKGKTAGWTKEDHEKAGFRMVPNSPVRKGSFVGKNVVLMPCYVNIGAYIDEGTMIDTFARAGSCSQIGKNCHISAGSGVGGVLEPAQALPTIIEDNVFLGAMSEVVEGVIVG

SEQ ID NO: 112266 - protein, 229 aa, Unknown
  Bacterial polypetide isolated from the Sargasso Sea
MSLEKIINDAWEKKDQVSPNSEQSLKDTINQVINDLDSGKVRVAEKIKGQWITHQHIKKAIMLSFRIYPMENLSGPYSSWYDKSHLLKGKTANWTKSDHEKAGFRMVPNSPVRKGSYVGKNAVLMPCYVNIGAYIDEGTMIDTFARAGSCSQIGKNCHISAGSGVGGVLEPAQALPTIIEDNVFLGAMSEVVEGVIVGEGSVLSMGMYIGQSTKIVDRKTGEIYYGKIP

SEQ ID NO: 112267 - protein, 150 aa, Unknown
  Bacterial polypetide isolated from the Sargasso Sea
MNNTDIINEAFENGITDDNKNDVLNAVTETISSLDRGKLRVAENKDGQWTVNEWAKKAILLSFRLNQNKAIDTGYTKFYDKVDSKFLHTPEDYLKEKNIRIVPQAIARHGSFIDKNVVLMPSFVNIGAYVGEGTMVDTWATVGSCAQIGA

SEQ ID NO: 112268 - protein, 199 aa, Unknown
  Bacterial polypetide isolated from the Sargasso Sea
TSGPYSVWYDKVGFKTAGWTEEDHKRAGFRYVPNGMTRKGCFVAPGCILMPSFLNIGCHVDSGTMVDTWSTVGSGAQVGKNCHLSGGVGIGGVLEPVQAGPTIIEDNCFIGARSEIVESVIVRKNSVISMGVFLGASTKIIYRDTGKVIMGEVPEGSVVVPGTLPSKKPGMPSLYCAVIIKTVDEKTRSKTSLNDLLRD

SEQ ID NO: 112269 - protein, 67 aa, Unknown
  Bacterial polypetide isolated from the Sargasso Sea
YIGQSTKILDRQTGEITYGVIPEGSVVVSGNLPSKDGKYSLYCAVIVKKVDEKTRSKVGINELLREA

SEQ ID NO: 112270 - protein, 215 aa, Unknown
  Bacterial polypetide isolated from the Sargasso Sea
MNLEKIEKSINEAFENKAKLDSSNKEVSELIQETIDLLDNGKIRVAEKRGDKWQVNQWIKKSILLSFRVNKMKASKGPYSTWYDKVDGKTQGWSEEQVKKAGFRYVPNGVIRKGAHIGKNVVLMPSFINVGAYVDEGTMIDTWASVGSCAQVGKNCHISGGAGIGGVLEPMQANPTIVEDNCFLGARAEIAEGVIVEKGSVLSMGVYIGASTRIV

SEQ ID NO: 112271 - protein, 127 aa, Unknown
  Bacterial polypetide isolated from the Sargasso Sea
MNLKIEDLKNNIESIWENKENISSSTSGKEREVIEDCLTLLDSGQARVSEKIEKNWVVNEWLKKAVLLSFRLWPMDLISGGPGDSNWWDKVPSKFLNGALKTSRIIILELCLALSLDTVLIFHLKLY

SEQ ID NO: 112272 - protein, 76 aa, Unknown
  Bacterial polypetide isolated from the Sargasso Sea
GSVLSMGMYIVNPTKIVDRKTGEIIYGKIPPYSVVVPGSLPDKNNPAAPSLYCAVIIKQVDEKTRSKTSVNDLLRE

SEQ ID NO: 112273 - protein, 136 aa, Unknown
  Bacterial polypetide isolated from the Sargasso Sea
MMDTFSRAGSCCQIGKNCHISAGSGIGGVLEPAQALPTIIEDNVFVGAMSEVVEGVIVGEGSVLSMGMLITQSTKIVNRATGEITYGKIPQYSLVVPGSLPDKNNPSAPSLSCAVIIKQVDEKTRSKTSVNDLLRD

SEQ ID NO: 112274 - protein, 35 aa, Unknown
  Bacterial polypetide isolated from the Sargasso Sea
MPDGSEGPGLYCAVIVKKVDERTRSKTSINDLLRD

SEQ ID NO: 112275 - protein, 75 aa, Unknown
  Bacterial polypetide isolated from the Sargasso Sea
SVLSMGMYIGQSTKIVNRSTGEITYGKIPPYSVVVPGTLPDKKNPSAPSLSCAVIIKQVDEKTRSKTSINDLLRE

SEQ ID NO: 112276 - protein, 223 aa, Unknown
  Bacterial polypetide isolated from the Sargasso Sea
MNLNNIEKSINEAFANKDNIDSSDKNLNDLVRETIDLLDAGKIRVAEKKGDKWEVNQWIKKAILLSFKVNKMKASKGPYSTWYDKIEGKTQGWDEKKIREAGFRYVPNGVIRKGSFIARNVVLMPSFINVGAYVDEGTMIDTWASVGSCAQVGKNCHISGGAGIGGVLEPMQANPTIVEDNCFVGARSEIAEGVIVERGSVLSMGVYIGGSTRIVDRATGEIH

SEQ ID NO: 112277 - protein, 87 aa, Unknown
  Bacterial polypetide isolated from the Sargasso Sea
AEIAEGVIVEKGSVLSMGVYIGASTRIIDRATGEIHYGKVPAYSVVVPGSMPSKNNPKGPSLYCVVIVKKVDEKTRSKTSINDLLRD

SEQ ID NO: 112278 - protein, 44 aa, Unknown
  Bacterial polypetide isolated from the Sargasso Sea
SVLVPGSLPDKNNPSAPSLNCAVIIKQVDEKTRSKTSINDLLRD

SEQ ID NO: 112279 - protein, 219 aa, Unknown
  Bacterial polypetide isolated from the Sargasso Sea
LKKAIMLSFRLYPMENLNGPYSSWYDKAHLLKGKTAGWTKEDHEKAGFRMVPNSPVRKGSFVGKNAVLMPCYINIGAYIDEGTMIDTFARAGSCSQIGKNCHISAGSGVGGVLEPAQALPTIIEDNVFLGAMSEVVEGVIVGEGSVLSMGMYIGQSTKIVNRKTGEITYGKIPPYSVVVPGSLPDKNNPAAPSLYCAVIIKQVDEKTRSKTSINDLLRE

SEQ ID NO: 112280 - protein, 194 aa, Unknown
  Bacterial polypetide isolated from the Sargasso Sea
DKSHLLKGKTAGWTREDHEKAGFRMVQNSPVEKGSFVGKNAVLMPCYVNIGAFIDEGTMIDTFARAGSCSQIGKNCHISAASGVGGVLEPAQALPTIIEDNVFLGAMSEVVEGVIVGEGSVISMGMYIGQSTKIVNRKTGEITYGKIPPYSVVVPGSLPDKKNPEAPSLYCAVIIKQVDEKTRSKTSINDLLRD

SEQ ID NO: 112281 - protein, 232 aa, Unknown
  Bacterial polypetide isolated from the Sargasso Sea
IRVAEKKGNKWQVNQWIKKAILLSFRVNKMKASKGPYSTWYDKVDGKTQGWSEEQIKKAGFRYVPNGVIRKGAHIAKNVVLMPSFINVGAYVDEGTMIDTWASVGSCAQVGKNCHISGGAGIGGVLEPMQANPTIVEDNCFLGARAEIAEGVIIEKGSVLSMGVYIGASTRIVDRATGEIHYGKVPAYSVVVPGSMPSKNNPNGPSLYCVVIVKKVDEKTRSKTSINDLLRD

SEQ ID NO: 112282 - protein, 188 aa, Unknown
  Bacterial polypetide isolated from the Sargasso Sea
MSYDRLEKIINKSFEKKEKVGPKSDQKLVRAINETIDLVDSGKIRVANKLNGSWIVNQWIKKAILLSFRINKLEMMKGPYTTWYDKVKGKTVKWKERDWKKAGYRHVPNGVVRKGAYIAKNVVLMPSFVNLGAYVDEGTMIDTWASVGSCAQVGKNCHISGGAGIGGVLEPLQAGPVIIEDNCFIGAR

SEQ ID NO: 112283 - protein, 204 aa, Unknown
  Bacterial polypetide isolated from the Sargasso Sea
MNTEKLENIINRAFEDMQNVSDKSEREVLNAVKETIELTDKGEIRVANKRDGSWHVNQWVKKAILLSFKINKMTMSKGPYTTWYDKVPGKSVSWNEDDWKKAGYRHVPNGVVRKGSYIAKGAVLMPCFVNLGAYVDEGTMIDTWASVGSCAQIGKNCHVSGGAGIGGVLEPLQAGPVIIEDNCFIGARSEIAEGVLVEEGAVIS

SEQ ID NO: 112284 - protein, 272 aa, Unknown
  Bacterial polypetide isolated from the Sargasso Sea
MSIENIINEAWENKDQVNQNSDQKLKDTINQVIEDLDSGKSRVAEKIDGKWVTHQHLKKAIMLSFRIHGMETLDGPYSAWRDKAHLLKGKTAGWSNADFEKAGFRMVPNTAMRKGSYVAKNVVLMPSYVNIGAYIDEGTMMDTFSRAGSCCQIGKNCHISAGTGIGGVLEPAQALPTIIEDNVFVGAMSEVVEGVIVGEGSVLSMGMYIGQSTKIVNRKTGEVTHGKIPPYSVVVPGSLPDKNNPAAPSLYCAVIIKQVDEKTRSKTSVNDL

SEQ ID NO: 112285 - protein, 96 aa, Unknown
  Bacterial polypetide isolated from the Sargasso Sea
EDNCFIGARSEIAEGVLVEEGAVLSMGVYIGASTKIVDRNSGEIHYGKVPAYSVVVPGSLPNKSNPNGPSLYCAVIVKKVDEKTRSKTSINDLLRD

SEQ ID NO: 112286 - protein, 146 aa, Unknown
  Bacterial polypetide isolated from the Sargasso Sea
FVNLGAYVDEGTMVDTWATVGSCAQVGKNCHISGGAGIGGVLEPLQANPVIIEDNCFIGARSEVAEGVIVGEGSVLSMGVFIGASTKIYNRETKEIYMGKVPPYSVVVPGSLPSSKGDASLYCVVIVKTVDEKTRSKTSVNELLRD

SEQ ID NO: 112287 - protein, 175 aa, Unknown
  Bacterial polypetide isolated from the Sargasso Sea
KAGFRMVPNSPVRKGSFVGKNAVLMPCYVNIGAYIDEGTMMDTFSRAGSCCQIGKNCHISAGTGVGGVLEPAQALPTIIEDNVFLGAMSEVVEGVIVGEGSVLSMGMYIGQSTKIVNRKTGEITYGKIPPYSVVVPGSLPDKNNVKAPSLYCAVIIKQVDEKTRSKTSVNDLLRE

SEQ ID NO: 112288 - protein, 228 aa, Unknown
  Bacterial polypetide isolated from the Sargasso Sea
MNRTELEGVINVAWENRDEISSATQGEIRKAVDQALNAMDRGELRVAEKTGGKWVVNQWAKKAVLLSFRLNDMTTIAGGPGENTNWWDKVPSKFEGWGEAEFKQAGFRAVPGSIVRRSAYVAPGTVLMPSFVNLGAYVDTGVMVDTWATVGSCAQIGKNVHLSGGAGIGGVLEPLQAGPVIIEDNAFIGARSEIVEGVIVEEGAVISMGVFIGASTKIIDRTTGETLS

SEQ ID NO: 112289 - protein, 171 aa, Unknown
  Bacterial polypetide isolated from the Sargasso Sea
MKNLEEIITVTFEDREKITKDTIGEAREAVELTLNLLDNGSIRVCEKIDGKWIVNQWIKKAILLSFRLSDNEIIKASHATWFDKVESKTANWTKDDHLKAGFRYVPDAVVRKSAFIAKGVVLMPSFVNLGAYVDEGTMIDTWATVGSCAQIGKNCHISGGAGIGGVLEPLQ

SEQ ID NO: 112290 - protein, 213 aa, Unknown
  Bacterial polypetide isolated from the Sargasso Sea
MSIENIINDAWENKDQVTQNSDKSLKDAVNEIIDDLDSGKARVAEKINGEWVTHQHLKKAIMLSFRMYPMENLNGPYSSWYDKAHLLKGKTAGWTKEDHEKAGFRMVPNSPVRKGSFVGKNAVLMPCYVNIGAYIDEGTMMDTFSRAGSCCQIGKNCHISAGTGVGGVLEPAQALPTIIEDNVFLGAMSEVVEGVIVGEGSVISMGMYIGQST

SEQ ID NO: 112291 - protein, 187 aa, Unknown
  Bacterial polypetide isolated from the Sargasso Sea
MQQLQNVIESAFERRADITPANVDTVTREAVNQVIALLDSGALRVAEKIEGQWVTHQWLKKAVLLSFRINDNQVIEGAESRYFDKVPMKFANYDEARFQKEGFRVVPPAAVRQGAFIARNTVLMPSYVNIGAYVDEGTMVDTWATVGSCAQIGKNVHLSGGVGIGGVLEPLQANPTIIEDNCFIGAR

SEQ ID NO: 112292 - protein, 276 aa, Unknown
  Bacterial polypetide isolated from the Sargasso Sea
MSDIEKIINDAWENKDQINPNSDKKIKDTINQIIAELDSGKVRVAEKINGEWVTHQYLKKAIMLSFRIYPMENLNGPYSSWYDKAHLLKGKTAGWTKEDHEKAGFRMVPNSPVRKGSFVGKNAVLMPCYVNIGAYIDEGTMIDTFARAGSCSQIGKNCHISAASGVGGVLEPAQALPTIIEDNVFLGAMSEVVEGVIVGEGSVISMGMYIGQSTKIVNRKTGEITYGKIPPYSVVVPGSLPDKNNPSAPSLYCAVIIKQVDEKTRSKTSIYDLLRD

SEQ ID NO: 112293 - protein, 109 aa, Unknown
  Bacterial polypetide isolated from the Sargasso Sea
GVLEPAQALPTIIEDNVFLGAISEVVEGVIVGEGSVLSMGMYIGQSTKIVNRKTGEIHYGKIPPYSVVVPGSLPDKNNPSGPSLYCAVIIKQVDEKTRSKTSINDLLRD

SEQ ID NO: 112294 - protein, 192 aa, Unknown
  Bacterial polypetide isolated from the Sargasso Sea
VNLKTSGWVEDEWTKRNFRSVPGAVVRYSSFIAANVVLMPSFVNLGAYVDSGTMIDTWATVGSCAQIGKNVHISGGAGIGGVLEPLQANPVIIEDNCFIGARSEIAEGVIVETGSVISMGVYIGASTKIIDRDSGEIFYGKVPSYSVVVPGTLGGKTLKDGTTGPNLYCAVIVKKVDEKTRSKTSINELLRE

SEQ ID NO: 112295 - protein, 210 aa, Unknown
  Bacterial polypetide isolated from the Sargasso Sea
MSIENIINKAWENKDQVGPNSDQNLKDAINQIIEDLDCGKSRVAEKIDGKWVTHQYLKKAIMLSFRIYPMENLNGPYSSWYDKAHLLKGKTAGWTKRDHEKAGFRMVPNSPVRKGSFVGKNAVLMPCYVNIGAYIDEGTMIDTFARAGSCSQIGKNCHISAASGVGGVLEPAQALPTIIEDNVFLGAMSEVVEGVIVGEGSVISMGMYIG

SEQ ID NO: 112296 - protein, 164 aa, Unknown
  Bacterial polypetide isolated from the Sargasso Sea
MKDLKSFIDAQFDKRSEIKSSDENQELKNVIKDIIKKLDNGELRIAEKINEKWTVNQWLKKAVLLSFIADENFVIKGEHTNYFDKIPNKFYDYDNTKFVKTGARVVPTATVRRGSFIGKNVVLMPSFVNIGAYVDDGTMVDTWATVGSCAQIGKNVHLSGGVGI

SEQ ID NO: 112297 - protein, 129 aa, Unknown
  Bacterial polypetide isolated from the Sargasso Sea
AGSCGQIGKNCHISAGSGIGGVLEPAQALPTIIEDNVFVGAMSEVVEGVIVGEGSVLSMGMLITQSTKIVNRATGEITYGKIPPYSVVVPGSLPDKNNPSAPSLSCVVIIKQVDEKTRSKTSVNDLLRD

SEQ ID NO: 112298 - protein, 209 aa, Unknown
  Bacterial polypetide isolated from the Sargasso Sea
KAIMLSFRIYPMENLNGPYSSWYDKAHLLKGKTAGWTKEDHEKAGFRMVPNSPVRKGSFVGKDAVLMPCYVNIGAYIGAKTMMDTFSRAGSCCQIGESCHISAGSGIGGVLEPAQALPTIIEDNVFVGAMSEVVEGVIVEEGSVLSMGCYIGQSTKIINRSNGEITKGRIPPYSVVVPGTYKDLYAVHIIKTVDSKTRSKTSINDLLRD

SEQ ID NO: 112299 - protein, 141 aa, Unknown
  Bacterial polypetide isolated from the Sargasso Sea
VDEGTMIDTWASVGSCAQVGKNCHISGGAGIGGVLEPMQANPTIVEDDCFLGARAEIAEGVIVEKGSVLSMGVYIGASTRIVDRTTGEIHYGKVPAYSVVVPGSMPSKNNPKGPSLYCVVIVKKVDEKTRSKTSINDLLRD

SEQ ID NO: 112300 - protein, 127 aa, Unknown
  Bacterial polypetide isolated from the Sargasso Sea
GSGAQIGKNCHLSGGVGIGGVLEPVQAGPTIIEDNCFIGARSEIVESVIVRKNSVISMGVFIGSSTKIVRRDTGEVIMGEVPEGSVVVPGTMPSKKPGMPSLYCAVIIKTVDEKTRSKTSLNELLRD

SEQ ID NO: 112301 - protein, 214 aa, Unknown
  Bacterial polypetide isolated from the Sargasso Sea
MLSFRIHGMETLAGPYSSWRDKSNILKGKTAGWGDKEFEQAGFRMVPNSPVRKGSFIGKNVVLMPCFVNIGAYIDSGTMMDTFSRAGSCCQIGKNCHISAGSGVGGVLEPAQALPTIIEDNVFLGAMSEVVEGIIVGEGSVLSMGMYIGQSTKIVNRSTGEISYGKIPPYSVVVPGTLPDKKKPSGPSLSCAVIIKQVDEKTRSKTSINDLLRE

SEQ ID NO: 112302 - protein, 71 aa, Unknown
  Bacterial polypetide isolated from the Sargasso Sea
MGVYIGQSTRIYDRETGEVHYGRVPAGSVVVAGNLPSADGKYSLYAAIIVKKVDAKTRAKVGINALLRGVE

SEQ ID NO: 112303 - protein, 272 aa, Unknown
  Bacterial polypetide isolated from the Sargasso Sea
MSNNYEQIINDVFDNNSSTNIEEVSIIVDDVLEQLDSGALRVCEKINGNWVVNQWIKKAILLSFRTKSNSTLSGPYATWFDKVAGKTADWDEDKYNLAGFRNVPNAVIRKSAFVAKDCIIMPSFINVGAYVDQGTMIDTWSTIGSCAQIGKNCHISGGVGIGGVLEPLQANPVIIEDNCFIGARSEIAEGVLVEEGSVISMGVFIGASTKIVDRDSGDIYYGNVPSYSVVVPGTLPSEKMKDDGLGLYCAVIVKRVDEKTRLKTSINELLRP

SEQ ID NO: 112304 - protein, 102 aa, Unknown
  Bacterial polypetide isolated from the Sargasso Sea
ALPTIIEDNVFLRAMSEVVEGVVVGEGSVLSMGMYIGQSTKIVDRKTGKITYGKIPPYSVVVPGSLPNKNNSSAPSLYCAVIIKQVDEKTRSKTSINDLLRD

SEQ ID NO: 112305 - protein, 192 aa, Unknown
  Bacterial polypetide isolated from the Sargasso Sea
MIKYLGKTVKWKEKDWKKAGYRHVPNGVVRRGAYIGKNVVLMPSFVNLGAYVDEGTMIDTWASVGSCAQVGKNCHISGGAGIGGVLEPLQAGPVIIEDNCFIGARSEIAEGVLVEEGAVLSMGVYIGASTKIVDRHSGEIHYGKVPAYSVVVPGSLPNKSNPSGPSLYCAVIVKKVDEKTRSKTSINDLLRD

SEQ ID NO: 112306 - protein, 132 aa, Unknown
  Bacterial polypetide isolated from the Sargasso Sea
MQEQVAVVKSGKNCHISAGSGVGGVLEPAQALPTIIEDNVFLGAMSEVVEGVIVGEGSVLSMGMLITQSTKIVNRSTGEIMYGKIPPYSVVVPGSLPDKKNPSAPSLSCAVIIKQVDEKTRSKTSINDLLRE

SEQ ID NO: 112307 - protein, 107 aa, Unknown
  Bacterial polypetide isolated from the Sargasso Sea
LEPAQALPTIIEDNVFVGAMSEVVEGVIVGEGSVLSMGMYIGQSTKIVNRKTGEVTNGKIPPYSVVVPGSLPDKNNPAAPSLYCAVIIKQVDEKTRSKTSVNDLLRD

SEQ ID NO: 112308 - protein, 258 aa, Unknown
  Bacterial polypetide isolated from the Sargasso Sea
NPNSDKKIKDTINQIIADLDSGKVRVAEKINGEWITHQHLKKAIMLSFRIYPMENLNGPYSSWYDKAHLLKGKTAGWTKEDHEKAGFRMVPNSPVRKGSFVGKNAVLMPCYVNIGAYIDEGTMIDTFARAGSCSQIGKNCHISAASGVGGVLEPAQALPTIIEDNVFLGAMSEVVEGVIVGEGSVISMGMYIGQSTKIVNRKTGEITYGKIPPYSVVVPGSLPDKNNPSAPSLYCAVIIKQVDEKTRSKTSINDLLRD

SEQ ID NO: 112309 - protein, 240 aa, Unknown
  Bacterial polypetide isolated from the Sargasso Sea
MSIEKIINDAWENKEQVNQNSDQSIKNAINQVISDLDSGKSRVAEKINGEWKTHQHLKKAIMLSFRIYPMDNLSGPYSSWYDKSHLLRGKTANWTKEQHEAAGFRMTPNSPVRPGSFIGKNAVLMPCYVNIGAYIGSGTMMDTFSRAGSCCQIGENCHISAGSGIGGVLEPAQALPTIIEDNVFVGAMSEVVEGVIVEEGSVLSMGCYIGQSTKIINRSNGEITKGRIPPYSVVVPGTYK

SEQ ID NO: 112310 - protein, 195 aa, Unknown
  Bacterial polypetide isolated from the Sargasso Sea
WNDFEHLPGKTAGWTEKEFAKAGFRLVPNCVVRNGSFIGKGAVIMPNSFINIGGYCGENSMVDTGARIGSAARLGANCHLSAGCGLGGILEPVGSKPTIIEDDSFIGALSEIVEGVIVRKGSVVSMGCYIGKSTKIVNRETGEINTGEVPAGSVVVPGSLPSKKPGGPNLYCVVIIKTVDEKTRSKTSLNDLLRD

SEQ ID NO: 112311 - protein, 281 aa, Unknown
  Bacterial polypetide isolated from the Sargasso Sea
FIENCVMNTKSFENIINEAWENKGQVNSKSSKKLLNAISKIIELLDSGEIRVAEKKSDGWVVNQWIKKAILLSFRVNKMKISKGPYAAWFDKIEGKTHKWNEKRFIKEGFRYVPNGVVRKGAFIAKNVVLMPSFINIGAYVDEGSMVDTWASVGSCAQVGKNCHISGGAGIGGVLEPMQSNPTIIEDNCFVGARSEVVEGVIVGKGSVLSMGVFIGKSTKIVNRSTGEILYGKIPPYSVVVPGSLPSKSNPDGPALYCVVIIKQVDEKTRSKTSINDLLRE

SEQ ID NO: 112312 - protein, 150 aa, Unknown
  Bacterial polypetide isolated from the Sargasso Sea
PCYVNIGAYIDEGTMMDTFSRAGSCCQIGKNCHISAGTGVGGVLEPAQALPTIIEDNVFLGAMSEVVEGVIVGEGSVLSMGMYIGQSTKIVNRKTGDITYGKIPPYSVVVPGSLPDKNNPQAPSLYCAVIIKQVDEKTRSKTSVNDLLRE

SEQ ID NO: 112313 - protein, 59 aa, Unknown
  Bacterial polypetide isolated from the Sargasso Sea
NRKTGEISYGKIPPYSVVVPGSLPDKKDPANASLYCAVIIKQVDEKTRSKTSINDLLRE

SEQ ID NO: 112314 - protein, 230 aa, Unknown
  Bacterial polypetide isolated from the Sargasso Sea
MNTNSFEKIINEAWNNKSKINSKSDKKIINAINKTIDLLDSGKIRVAEKKNNQWHVNQWIKKAILLSFRVNKMKASKGPYSTWYDKIDGKTQGWNEKKIAAAGFRYVPNGVIRKGAFVAKNVVLMPSFLNIGAFVDEGSMIDTWASVGSCAQVGKNCHISGGAGIGGVLEPMQANPTIIEDNCFVGARAEIAEGVIVGKGSVLSMGVYIGTSTRIVDRATGEIYFGKVPE

SEQ ID NO: 112315 - protein, 79 aa, Unknown
  Bacterial polypetide isolated from the Sargasso Sea
ERCSTINGVYLLGASTKIVDRDTGEIYMGKVPPYSVVVPGTLPGKKEGDINPSLYCAVIVKKVDEKTRSKTSINDLLRD

SEQ ID NO: 112316 - protein, 88 aa, Unknown
  Bacterial polypetide isolated from the Sargasso Sea
MSEVVEGVIVGEGSVLSMGMYIGQSTKIVDRKTGEITYGKIPPYSVVVPGSLPDKNNPTAPSLYCAVIIKQVDEKTRSKTSVNDLLRE

SEQ ID NO: 112317 - protein, 103 aa, Unknown
  Bacterial polypetide isolated from the Sargasso Sea
AAGHPVIIEDNCFIGARSEVVEGVIVEENSVISMGVYLGQSTKIYDRETGEVSYGRIPAGSVVVAGNLPSKDGSHSLYCAVIVKKVDAKTRAKVGLNELLRGD

SEQ ID NO: 112318 - protein, 170 aa, Unknown
  Bacterial polypetide isolated from the Sargasso Sea
NCVVRRSAFIAPGVVLMPSFVNLGAYVDSGTMVDTWATIGSCAQVGKNCHISGGAGIAGVLEPMQADPVIIEDNCFIGARSEVAEGVIVETGSVLSMGVYIGASTKIVNRETGEIFTGRVPAYSVVVPGAMPGKTLPDRSQGPSLYCAVIVKQVDEQTRTKTSINELLRD

SEQ ID NO: 112319 - protein, 254 aa, Unknown
  Bacterial polypetide isolated from the Sargasso Sea
DKSLKDAVNQIIDDLDSGKVRVAEKINGEWVTHQHLKKAIMLSFRMYPMENLNGPYSSWYDKSHLLKGKTAGWTKEDHEKAGFRMVPNSPVRKGSFVGKNAVLMPCYVNIGAYIDEGTMMDTFSRAGSCCQIGKNCHISAGTGVGGVLEPAQALPTIIEDNVFLGAMSEVVEGVIVGEGSVLSMGMYIGQSTKIVNRKTGEITYGKIPPYSVVVPGSLPDQNNPQAPSLYCAVIIKQVDEKTRSKTSVNDLLRE

SEQ ID NO: 112320 - protein, 84 aa, Unknown
  Bacterial polypetide isolated from the Sargasso Sea
VEGVIVGEGSLLSMGMYIGQSTKIVNRKTGDITYGKIPPYSVVVPGSLPDKNNASAPSLYCAVIIKQVDEKTRSKTSINDLLRE

SEQ ID NO: 112321 - protein, 162 aa, Unknown
  Bacterial polypetide isolated from the Sargasso Sea
MVPNSPVRKGSFVGKDVVLMPCYVNIGAYIGAKTMMDTFSRAGSCCQIGESCHISAGSGIGGVLEPAQALPTIIEDNVFVGAMSEVVEGVIVEEGSVLSMGCYIGQSTKIINRSNGEIIKGRIPPYSVVVPGTHKDLYAVHIIKTVDSRTRSKTSINDLLRD

SEQ ID NO: 112322 - protein, 187 aa, Unknown
  Bacterial polypetide isolated from the Sargasso Sea
GKTAGWTKDDHEKAGFRMVPNSPVRKGSFVGKNAVLMPCYVNIGAYIDEGTMIDTFARAGSCCQIGKNCHISAGSGVGGVLEPAQALPTIIEDNVFLGAMSEVVEGVIVGEGSVLSMGMYIGQSTKIVDRKTGKITYGKIPPYSVVVPGSLPDKNNSSAPSLYCAVIIKQVDEKTRSKTSINDLLRD

SEQ ID NO: 112323 - protein, 107 aa, Unknown
  Bacterial polypetide isolated from the Sargasso Sea
LEPMQANPTIIEDNCFIGARAEIAEGVIVGKGSVLSMGVYIGASTRIIDRATGEVHYGKVPDYSVVVPGAMPSKNNPDGPSLYCVVIVKKVDEKTRSKTSINDLLRD

SEQ ID NO: 112324 - protein, 275 aa, Unknown
  Bacterial polypetide isolated from the Sargasso Sea
MSEIEKIIEDAWKNKENINQNSEPTIIDSINQIIEDLDAGKIRVAEKINNEWVTHQYIKKAIMLSFRIHGMEALSGPYSSWYDKAHLLKGKTAGWNKEDFEKAGFRMVPNSPVRKGSYIAKNVVLMPCFINTGAYIDSGTMMDTFSRAGSCCQIGKNCHISAGSGVGGVLEPAQALPTIIEDNVFLGAMSEVVEGVIVGEGSVISMGMYIGQSTKIVDRKSGEITYGKIPPYSVIVPGSLPDKNNPSAPSLSCAVIIKKVDEKTRSKTSINDLLR

SEQ ID NO: 112325 - protein, 63 aa, Unknown
  Bacterial polypetide isolated from the Sargasso Sea
TKIVDRKTEKITYGKIPPYSVVVPGSLPDKNNSQAPSLYCAVIIKQVDEKTRSKTSINDLLRD

SEQ ID NO: 112326 - protein, 145 aa, Unknown
  Bacterial polypetide isolated from the Sargasso Sea
MCAYIDEGTMMDTFSRAGSCCQIGKNCHISAGTGIGGVLEPAQALPTIIEDNVFVGAMSEVVEGVIVGEGSVLSMGMYIGQSTKIVNRKTGEVTHGKIPPYSVVVPGSLPDKNNPAAPSLYCAVIIKQVDEKTRSKTSVNDLLRD

SEQ ID NO: 112327 - protein, 262 aa, Unknown
  Bacterial polypetide isolated from the Sargasso Sea
MGEIRDSIETALDYLDQGKLRVAEPLGNSEWQVNQWLKKAVLLSFKINDMDVISGGPKSQTTGPANWWDKIPSKFSGWSKEEFKKAGFRAVPGSVVRHSAYIAPSVVLMPSFVNIGAYVDSGSMIDTWATVGSCAQIGKNVHISGGAGIGGVLEPIQAGPVIIEDDCFIGARSEVAEGVVVEKGAVLSMGVFIGASTKVIDRNTGEVYVGRVPAYSVVVPGSLPGKSLPDGSQGPSLYCAVIVKKVDSQTRSKTSVNELLRD

SEQ ID NO: 112328 - protein, 275 aa, Unknown
  Bacterial polypetide isolated from the Sargasso Sea
MSQQLQQIIDTAWENRAELSPKAAPADVREAVAHAIEQLDKGALRVAEKKDGDWVVNQWLKKAVLLSFRLEDNAPMPAGGYSQFYDKVPSKFANYTAEDFAAGGFRVVPPAIARRGSFIAKNVVLMPSYTNIGAYVDEGTMVDTWATVGSCAQIGKNVHLSGGVGIGGVLEPLQANPVIIEDNCFIGARSEVVEGVIVEENSVISMGVYLGQSTKIYDRETGEVTYGRIPAGSVVVAGNLPSKDGSHSLYCAVIVKKVDAKTRAKVGLNELLRGD

SEQ ID NO: 112329 - protein, 206 aa, Unknown
  Bacterial polypetide isolated from the Sargasso Sea
MKELEKIINDAWKNKENINQNSDTSILNAVNQIIEDLDQGKIRVAEKINSTWITHQHIKKAIMLSFRIYNMEALSGPYSSWYDKAHLLKGKTAGWGKDEFEKAGFRMVPNSPVRKGSYIAKNVVLMPCFINTGAYVGSGTMMDTFSRAGSCCQIGSNCHISAGSGVGGVLEPAQALPTIIEDNVFLGAMSEVVEGVIVGEGSVISM

SEQ ID NO: 112330 - protein, 144 aa, Unknown
  Bacterial polypetide isolated from the Sargasso Sea
MSSTDLEQAIDQAWEDRDGITPDTKGETRDAIDATLEGLDLGDLRVAEKGVDGWTVNQWLKKAVLLSFRIFDMAPLPGGPGFPGIGDSPWFDKVPSKFAGWDEAKFRAAGFRAVPNCTVRRSAYLGPGVVLMPSFVNLGAYVDS

SEQ ID NO: 112331 - protein, 127 aa, Unknown
  Bacterial polypetide isolated from the Sargasso Sea
MDTFSRAGSCCQIGENCHISAGSGIGGVLEPAQALPTIIEDNVFVGAMSEVVEGVIVGEGSVLSMGCYIGQSTKIVNRSNGEITKGRVPPYSVMVPGTHKDLYAVHIIKTVDAKTRSKTSINDLLRD

SEQ ID NO: 112332 - protein, 60 aa, Unknown
  Bacterial polypetide isolated from the Sargasso Sea
VNRKTGEINYGKIPLYSVVVPGSLPDKNNPSAPSLSCAVIIKQVDEKTRSKTSINDLLRE

SEQ ID NO: 112333 - protein, 128 aa, Unknown
  Bacterial polypetide isolated from the Sargasso Sea
MVLCSVGKNCHISGGAGIGGVLEPIQAGPVIIEDNCFIGARSEIAEGVLVEEGAVLSMGVYIGASTKIVDRNSGEIHYGKVPAYSVVVPGSLPNKLNPNGPSLYCAVIVKKVDEKTRSKTSINDLLRD

SEQ ID NO: 112334 - protein, 230 aa, Unknown
  Bacterial polypetide isolated from the Sargasso Sea
MSHSDLENAIDNAWEDAASINTSTKGEVRDAVEAALDLMDSGVARVAEKSAGSWHVNQWLKKAVLLSFRLNDMEPMDGPANAPYWDKVALKSRNWTADRFRQAGFRSVPGSVVRHSAYVAPGAILMPSFVNLGAYVDSGTMVDTWATVGSCAQIGKDCHLSGGVGIGGVLEPLQADPVIIEDNCFIGARSEVAEGVIVETGAVLAMGCYIGQSTKIIDRNSGEIHMGRIP

SEQ ID NO: 112335 - protein, 194 aa, Unknown
  Bacterial polypetide isolated from the Sargasso Sea
TSWYDKVKGKTVDWNEDQWKEAGYRHVPNGTVREGSFIGKGVVLMPSFVNIGAYIDEGTMVDTWATVGSCAQIGKNCHLSGGVGIGGVLEPLQANPVIIEDNCFVGARAEVAEGVIVREGSVLSMGVYLGASTKIINRSTGETSYGEVPAYSVVVPGNLPNEDPKKPGLYCVVIVKTVDEKTRSKTSINDLLRE

SEQ ID NO: 112336 - protein, 220 aa, Unknown
  Bacterial polypetide isolated from the Sargasso Sea
SINGSKRPVLLSFRLNAMTTISTGPNDASWWDKVPSKFEGWDSARFTEAGFRAVPNCVVRRSAYIAPGVILMPSFVNLGAYVDSGTMVDTWATVGSCAQIGKNVHISGGAGIGGVLEPLQANPVIVEDGCFIGARSEVAEGVIVREGAVLSMGVFITSSTKIVDRATGEIHRGEVPTYSVVVPGSLPGGPDQPALSCAVIVKTVDAQTRAKTSVNDILRD

SEQ ID NO: 112337 - protein, 172 aa, Unknown
  Bacterial polypetide isolated from the Sargasso Sea
MNELKKIIEDAFENRDEINSQTEGKIRNSVNETLNQLDAGKIRVCEKNRDGWIVNQWIKKAILLSFRLNDNEIIQASHATWFDKVPSKTANWSKEDHEKAGFRYVPDAVVRKSAYIAKGVILMPSFVNLGAYVDEGTMIDTWATVGSCAQIGKNCHISGGAGIGGVLEPLQA

SEQ ID NO: 112338 - protein, 178 aa, Unknown
  Bacterial polypetide isolated from the Sargasso Sea
EDHKRAGFRYVPNGMTRKGCFVAPGCILMPSFLNIGCYVDSGTMVDTWSTVGSGAQVGKNCHLSGGVGIGGVLEPVQAGPTIIEDNCFIGARSEIVESVIVRKNSVISMGVFIGASTKIIYRDTGKVIMGEVPEGSVVVPGTLPSKKPGMPSLYCAVIIKTVDEKTRSKTSLNDLLRD

SEQ ID NO: 112339 - protein, 188 aa, Unknown
  Bacterial polypetide isolated from the Sargasso Sea
DGKTRGWSEKKIKEAGFRYVPNGVIRKGAFIAKNVVLMPSFVNVGAYVDQGSMIDTWASVGSCAQIGKNCHISGGAGIGGVLEPMQANPTIIEDDCFIGARAEIAEGVIIGKGSVLSMGVYIGASTRIIDRATGQVHYGKVPDYSVVVPGSMPSKNNPDGPSLYCVVIVKKVDEKTRSKTSINDLLRD

SEQ ID NO: 112340 - protein, 111 aa, Unknown
  Bacterial polypetide isolated from the Sargasso Sea
VGGVLEPAQALPTIIEDNVFLGAMSEVVEGVIVGEGSVLSMGMYIGQSTKIVNRKTGEITYGKIPPYSVVVPGSLPDKNNPTAPSLYCAVIIKQVDEKTRSKTSINDLLRE

SEQ ID NO: 112341 - protein, 246 aa, Unknown
  Bacterial polypetide isolated from the Sargasso Sea
MNLKELEEIINKAFEDKKNVSDKSDSKILNAINETIDLTDKGTIRVANKKNGIWSVNQWVKKAILLSFRINKMTMSKGPYTTWYDKVSGKSVNWNENDWKKAGYRHVPNGVVRKGSFIAKGVVLMPCFVNLGAYVDEGTMIDTWASVGSCAQVGKNCHVSGGAGIGGVLEPLQAGPVIIEDNCFIGARSEIAEGVLVEEGAVISMGVYIGASTKIVDRETGKVTYGKVPAYSVVVPGSMPNKKNPD

SEQ ID NO: 112342 - protein, 196 aa, Unknown
  Bacterial polypetide isolated from the Sargasso Sea
PYTSWYDKVRGKSVDWDEAKWKEAGYRHVPNGTVRQGSFIGRGVVLMPCFVNIGAYVDEGTMVDTWATVGSCAQIGKNCHLSGGVGIGGVLEPLQANPVIIEDNCFVGARAEVAEGVIVREGTVLSMGVYLGASTKIINRATGEISYGEVPPYSVVVPGTLPNEDPKKPSLYCVVIVKTVDENTRKKTSINDLLRD

SEQ ID NO: 112343 - protein, 90 aa, Unknown
  Bacterial polypetide isolated from the Sargasso Sea
GAMSEVVEGVIVGEGSVLSMGIYIGQSTKIVNRKTGEITYGKIPPYSVVVPGSLPDKNNPQAPSLYCAVIIKQVDEKTRSKTSVNDLLRE

SEQ ID NO: 112344 - protein, 171 aa, Unknown
  Bacterial polypetide isolated from the Sargasso Sea
MNINFFEKIINEAWNNKSKVNSKSDKKIINAINKTIDLLDTGKIRVAEKKGNDWSVNQWIKKAILLSFRVNKMKISKGPYAAWYDKVEGKTHKWNEKRFIKEGFRYVPNGVVRKGAYIAKNVVLMPSFVNIGAYVDQGSMIDTWASVGSCAQIGKNCHISGGAGIGGVLEP

SEQ ID NO: 112345 - protein, 177 aa, Unknown
  Bacterial polypetide isolated from the Sargasso Sea
QWKAAGYRHVPNGTVREGSFIGKGVVLMPSFVNIGAYIDEGTMVDTWATVGSCAQIGKNCHLSGGVGIGGVLEPLQANPVIIEDNCFVGARAEVAEGVIVREGSVLSMGVYLGASTKIVNRVTGEILYGEVPAYSVVVPGTMPNEDPTKPSLYCVVIVKTVDENTRKKTSINDLLRE

SEQ ID NO: 112346 - protein, 114 aa, Unknown
  Bacterial polypetide isolated from the Sargasso Sea
GSGIGGVLEPAQALPTIIEDNVFVGAMSEVVEGVIVGEGSVLSMGMYVGQSTKIVNRKTGEISYGKIPPYSVVVPGSLPDKNNPTAPSLSCAVIIKQVDEKTRSKTSINDLLRE

SEQ ID NO: 112347 - protein, 177 aa, Unknown
  Bacterial polypetide isolated from the Sargasso Sea
WKKAGYRHVPNGVVRKGSFIGKGVVLMPCFVNLGAYVDEGTMIDTWASVGSCAQVGKNCHVSGGAGIGGVLEPLQAGPVIIEDNCFIGARSEIAEGVLVEEGAVISMGVYIGASTKIVDRETGKITYGKVPAYSVVVPGSIPNKKNPEGPSLYCAVIVKKVDEKTRSKTSINDLLRD

SEQ ID NO: 112348 - protein, 249 aa, Unknown
  Bacterial polypetide isolated from the Sargasso Sea
QNSDKSLKNAINQVIEDLDSGKSRVAEKINGEWKTHQHLKKAIMLSFRIYPMDNLNGPYSSWYDKLHLLKGKTAGWSKEDHEKAGFRIVPNSPVRKGSFIGKNAVLMPCYVNIGAYIDEGTMLDTFSRAGSCSQIGKNCHISAGSGIGGVLEPAQALPTIIEDNVFIGAMSEIVEGVIVEEGSVLSMGCYIGQSTKIINRSSGEIMKGRIPSYSVVVPGTYKDLYAVYIIKTVDAKTRSKTSINDLLRD

SEQ ID NO: 112349 - protein, 224 aa, Unknown
  Bacterial polypetide isolated from the Sargasso Sea
MKDIENIIKKAFEDREKINKDTHGEIREAVEQTLNQLDNGSIRVCQKIEGEWIVNQWIKKAILLSFRLSDNEIIKSSHATWFDKVESKTANWTKDDHLKAGFRYVPDAVVRKSAYIAKGVVLMPSFVNLGAYVDEGTMIDTWATVGSCAQIGKNCHISGGAGIGGVLEPLQANPVIIEDNCFIGARSEVAEGVIIGEGSVLSMGVFIGASTKIVDRATGDIHME

SEQ ID NO: 112350 - protein, 91 aa, Unknown
  Bacterial polypetide isolated from the Sargasso Sea
ARSEVAEGVIVGEGAVLSMGVFIGASTKIVDRETGEIHMGKVPPYSVVVPGTLPGKKNDSDLNPSLYCVVIVKKVDERTRRKTSINDLLRD

SEQ ID NO: 112351 - protein, 152 aa, Unknown
  Bacterial polypetide isolated from the Sargasso Sea
LMPSFINVGAYVDEGTMIDTWASVGSCAQVGKNCHISGGAGIGGVLEPMQANPTIVEDNCFLGARSEIAEGVIIEKGSVLSMGVYIGASTRIVDRATGEIHYGKVPAYSVVIPGSMPSKNNPKGPSLYCVVIVKKVDEKTRSKTSINDLLRD

SEQ ID NO: 112352 - protein, 155 aa, Unknown
  Bacterial polypetide isolated from the Sargasso Sea
NAVLMPCYVNIGAYIDSGTMIDTFARAGSCSQIGKNCHISAGSGVGGVLEPAQALPTIIEDNVFLGAMSEVVEGVIVGEGSVLSMGMYIGQSTKIVNRSTGEISYGKIPPYSVVVPGTLPDKKNPSGPSLSCAVIIKQVDEKTRSKTSINDLLRE

SEQ ID NO: 112353 - protein, 198 aa, Unknown
  Bacterial polypetide isolated from the Sargasso Sea
GPYSTWYDKVEGKTQGWSEEKIKKAGFRYVPNGVIRKGSFIAKNVVLMPSFVNIGAYVDEGSMIDTWASVGSCAQVGKNCHISGGAGIGGVLEPMQASPTIVEDNCFVGARSEIAEGVIVEKGSVLSMGVYIGASTRIVDRSTGKIHYGKVPAYSVVVPGSMPSKKNPDGPSLYCVVIVKKVDQKTRSKTSINDLLRD

SEQ ID NO: 112354 - protein, 157 aa, Unknown
  Bacterial polypetide isolated from the Sargasso Sea
RKKCCLDAFIFNIGAYVDEGSMIDTWASVGSCAQVGKNCHISGGAGIGGVLEPMQANPTIVEDNCFVGARAEIAEGVIVEKGSVLSMGVYIGASTRIVDRSTGQINYGKVPAYSVVVPGSMPSKNNPKGPSLYCVVIVKKVDEKTRSKTSINDLLRD

SEQ ID NO: 112355 - protein, 268 aa, Unknown
  Bacterial polypetide isolated from the Sargasso Sea
MDSIIENAWTNRTLLKEKETQNKIREVIENLDKGKVRVAEKKGDKWITHEWIKKAVILYFAIQKMDTTKAGPLEFHDKINLKNNYSERNIRVVPHAVARYGSYISEGVILMPSFVNIGAYVDKGTMVDTWATVGSCAQIGKNVHLSGGVGIGGVLEPLQASPVIIEDNVFVGSRCIVVEGVHVKKEAVLGANVVLTKSTKIFDVSKKEAVEIRGFIPERSVVIPGSYNKKFNAGEFNVPCALIIGERKESTDKKTSLNDVLREHGVSV

SEQ ID NO: 112356 - protein, 255 aa, Unknown
  Bacterial polypetide isolated from the Sargasso Sea
SDKSIKDAVDQIIEDLDSGNSRVAEKINGEWVTHQHLKKAIMLSFRIYPMENLNGPYSSWYDKAHLLKGKTAGWTKVDHEKAGFRMVPNSPVRKGSFVGKNAVLMPCYVNIGAYIDEGTMIDTFARAGSCCQIGKNCHISAGSGVGGVLEPAQALPTIIEDNVFLGAMSEVVEGIIVGEGSVLSMGMYIGQSTKIVNRSTGEITYGKVPPYSVVVPGTLPDKKNPSAPSLSCAVIIKQVDEKTRSKTSINDLLRE

SEQ ID NO: 112357 - protein, 132 aa, Unknown
  Bacterial polypetide isolated from the Sargasso Sea
GHPLAHVLRVGKNCHISGGAGIGGVLEPLQAGPVIIEDNCFIGARSEIAEGVLVEEGAVLSMGVYIGASTKIVDRNSGEIHYGKVPAYSVVVPGSLPNKSNPNGPSLYCAVIVKKVDEKTRSKTSINDLLRD

SEQ ID NO: 112358 - protein, 189 aa, Unknown
  Bacterial polypetide isolated from the Sargasso Sea
SWYDKAHLLKGKTAGWTKEDHERAGFRMVPNSPVRKGSFVGKDAVLMPCYVNIGSYIGAKTMMDTFSRAGSCCQIGKNCHISAGSGIGGVLEPAQALPTIIEDNVFVGAMSEVVEGVIVEEGSVLSMGCYIGQSTKIINRSNGDITKGRIPPYSVVVPGTHKDLYAVHIIKTVDSKTRSKTSINDLLRD

SEQ ID NO: 112359 - protein, 235 aa, Unknown
  Bacterial polypetide isolated from the Sargasso Sea
NTGELRVAEKVNNEWVVNQWIKKAILVSFKLRENKITETGYTKFYDKLTSKFKNIDENYLKENNIRVVPQAIAREGTYVGKNVVLMPSYMNIGAYVDDGTMVDTWATVGSCAQIGKNVHLSGGVGIGGVLEPLQANPTIIEDNCFIGARSEIVEGVIVKKNSVISMGVYIGQSTKIYDRESGKVTYGTIPEGSVVVSGSLPSKDQKYSLYCAVIVKKVDEKTRSKVGINELLRES

SEQ ID NO: 112360 - protein, 132 aa, Unknown
  Bacterial polypetide isolated from the Sargasso Sea
FARAGSCSQIGKNCHISAGSGVGGVLEPAQALPTIIEDNVFLGAMSEVVEGVIVGEGSVLSMGMYIGQSTKIVNRKTGEISYGKIPPYSVVVPGSLPDKNNSSAPSLYCAVIIKQVDEKTRSKTSINDLLRE

SEQ ID NO: 112361 - protein, 159 aa, Unknown
  Bacterial polypetide isolated from the Sargasso Sea
KGVILMPSFVNLGAYVDEGTMIDTWATVGSCAQIGKNCHISGGAGIGGVLEPLQANPVIIEDNCFIGARSEVAEGVLVGEGSVLSMGVFIGASTKIIDRASGEIHMGKVPPYSVIVPGSNPGKKLSDGSEGPGLYCAVIVKRVDERTRSKTSINDLLRD

SEQ ID NO: 112362 - protein, 264 aa, Unknown
  Bacterial polypetide isolated from the Sargasso Sea
ENKGQVNQNSDQSLKDAINQVISDLDSGKSRVAEKINGEWITHQHLKKAIMLSFRIYPMENLNGPYSSWYDKAHLLKGKTAGWTKEQHEAAGFRMTPNSPVRPGSFIGKNAVLMPCYINIGAYVDEGTMLDTFSRAGSCSQIGKNCHISAGSGIGGVLEPAQALPTIIEDNVFVGAMSEVVEGVIVGEGSVLSMGMYIGQSTKIVNRKTGEITYGKIPPYSVVVPGSLPDKNNPQAPSLYCAVIIKQVDEKTRSKTSVNDLLRE

SEQ ID NO: 112363 - protein, 209 aa, Unknown
  Bacterial polypetide isolated from the Sargasso Sea
MKDLEKIINSAWENKENIDQNSDQDLKYSINEIINKLDSGKVRVAEKIDGKWVTHQYVKKAIMLSFRIHPMQNLSGPYSSWYDKEHLLKGKTAGWTKEDHEKAGFRMVPNSPVRKGSYVGKNAVLMPCYVNIGAYIDEGTMIDTFARAGSCCQIGKNCHISAGSGVGGVLEPAQALPTIIEDNVFLGAMSEVVEGVIVGEGSVLSMGMF

SEQ ID NO: 112364 - protein, 203 aa, Unknown
  Bacterial polypetide isolated from the Sargasso Sea
LNGPYSSWYDKAHLLKGKTAGWTKEDHEKAGFRMVPNSPVRKGSFIGKNAVLMPCYVNIGAYIDEGTMMDTFSRAGSCCQIGKNCHISAGTGVGGVLEPAQALPTIIEDNVFLGAMSEVVEGVIIGEGSVLSMGMYIGQSTKIVNRKTGEITYGKIPPYSVVVPGSLPDKNNPQAPSLYCAVIIKQVDEKTRSKTSVNDLLRE

SEQ ID NO: 112365 - protein, 230 aa, Unknown
  Bacterial polypetide isolated from the Sargasso Sea
VANRQSDGKWVTNETAKKAILLSFRTNKMTTTSGPYSVWYDKVGFKTAGWTEEDHKKAGFRYVPNGMTRKGCYVAPGAVLMPCFINIGAYVGEGTMVDTWSTVGSGAQIGSNVHLSGGVGIGGVLEPVQAAPTIIEDNCFIGARAEVAEGVIVRKNSVLATGVFLTASTRIINRDTNEIMIGEVPEGSVVVPGSLPSKKPGGPSLYCAVIVKQVDERTRSKTSINELLRS

SEQ ID NO: 112366 - protein, 89 aa, Unknown
  Bacterial polypetide isolated from the Sargasso Sea
AMSEVVEGVIVGEGSVLSMGMLITQSTKIVNRSTGEISYGKIPPYSVVVPGSLPDKKNPLAPSLSCVVIIKQVDEKTRSKTSINDLLRD

SEQ ID NO: 112367 - protein, 182 aa, Unknown
  Bacterial polypetide isolated from the Sargasso Sea
GGKDDFQKAGFRMVPNSPVRKGSYIANNVVLMPCFINIGAYVGSGTMMDTFSRAGSCCQIGSNCHISAGSGVGGVLEPAQALPTIIEDNVFLGAMSEVVEGVIVGEGSVISMGMYIGQSTKIVNRKTGEIVYGKIPPYSVLVPGSLPDKNNPSAPSLSCAVIIKQVDEKTRSKTSINDLLRD

SEQ ID NO: 112368 - protein, 211 aa, Unknown
  Bacterial polypetide isolated from the Sargasso Sea
VLISFRINDNKILKGPYTSWYDKVKGKTVDWNEDQWKEAGYRHVPNGTVREGSFIGKGVVLMPSFVNIGAYIDEGTMVDTWATVGSCAQIGKNCHLSGGVGIGGVLEPLQANPVIIEDNCFVGARAEVAEGVIVREGSVLSMGVYLGASTKIVNRSTGGISYGEVPAYSVVVPGSLPNEDPKKPSLYCVVIVKTVDENTRKKTSINDLLRE

SEQ ID NO: 112369 - protein, 107 aa, Unknown
  Bacterial polypetide isolated from the Sargasso Sea
LEPAQALPTIIEDNVFLGAMSEVVEGVIVGEGSVLSMGMYIGQSTKIVDRKTGNITFGKIPPYSVVVPGSLPDKNNSAAPSLYCAVIIKQVDEKTRSKTSINDLLRD

SEQ ID NO: 112370 - protein, 270 aa, Unknown
  Bacterial polypetide isolated from the Sargasso Sea
MSLDKLEKIINENFEKKEKVGPRSDKKLIKAINETINLVDEGKIRVANKQNGIWVVNQWIKKAILLSFRINNMKMMKGPYTTWYDKVPGKTVNWKEKDWKKAGYRHVPNGVVRKGAYIAKNVVLMPSFINLGAYVDEGSMIDTWASVGSCAQVGKNCHISGGAGIGGVLEPLQAGPVIIEDNCFIGARSEIAEGVLVEEGAVLSMGVYIGASTKIVDRNSGKIYYGKVPAYSVVVPGSLPNKSNPNGPSLYCAVIVKKVDEKTRSKTSIN

SEQ ID NO: 112371 - protein, 47 aa, Unknown
  Bacterial polypetide isolated from the Sargasso Sea
PPYSVVVPGSLPDKNNSAAPSLYCAVIIKQVDEKTRSKTSINDLLRD

SEQ ID NO: 112372 - protein, 215 aa, Unknown
  Bacterial polypetide isolated from the Sargasso Sea
KAVLLYFRINDNGIIKGDDAQYYDKVPLKFSDYSAEQFKAAGVRVVPPATARKGSFIAPNTVLMPSYVNIGAFVDEGTMVDTWATVGSCAQIGKNVHLSGGVGIGGVLEPLQANPTIIEDNCFIGARSEVVEGVIVEEGSVISMGVFIGQSTRIYDRETGEIHYGRVPAGSVVVSGSLPSKCGKYSLYAAVIVKKVDAKTRAKVGINALLRSIDE

SEQ ID NO: 112373 - protein, 232 aa, Unknown
  Bacterial polypetide isolated from the Sargasso Sea
MSIENIINEAWENKDQVNQNSDKSLKNAINQIIDDLDSGKARVAEKIDGEWVTHQHLKKAIMLSFRMYPMENLNGPYSSWYDKAHLLKGKTAGWTKEDHEKAGFRMVPNSPVRKGSFVGKNAVLMPCYVNIGAYIDEGTMMDTFSRAGSCCQIGKNCHISAGTGVGGVLEPAQALPTIIEDNVFLGAMSEVVEGVIVGEGSVLSMGMYIGQSTKIVNRKTGEITYGKIPPYS

SEQ ID NO: 112374 - protein, 153 aa, Unknown
  Bacterial polypetide isolated from the Sargasso Sea
NIGAYVDEGTMVDTWATVGSCAQIGKNVHLSGGVGIGGVLEPLQAAPVIIEDGAFIGSRCIVVEGVRVEKEAVLGANVVLTGSTKIIDVTGDEPIEYKGVVPARCVVIPGSYTKKFAAGEYQVPCALIIGKRKPSTDLKTSLNDALREYDVAV

SEQ ID NO: 112375 - protein, 130 aa, Unknown
  Bacterial polypetide isolated from the Sargasso Sea
VQVVAVRIGKNCHISAGTGIGGVLEPAQALPTIIEDNVFVGAMSEVVEGVIVGEGSVLSMGMYIGQSTKIVNRKTGEVTHGKIPPYSVVVPGSLPDKNNPAAPSLYCAVIIKQVDEKTRSKTSVNDLLRD

SEQ ID NO: 112376 - protein, 156 aa, Unknown
  Bacterial polypetide isolated from the Sargasso Sea
DKNVVLMPSFVNIGAYVGEGTMVDTWATVGSCAQIGANVHLSGGVGIGGVLEPLQASPTIIEDNCFIGARSEVVEGVIVRRNSVISMGVFIGKSTKIYDRETRSVSYGEVPEGSVVVSGSLPSKDGTCNLYCAVIVKKVDAKTLSKVGINELLREA

SEQ ID NO: 112377 - protein, 276 aa, Unknown
  Bacterial polypetide isolated from the Sargasso Sea
MNDIEKIINDAWENKDQVNQNSDKSIKDSINQVIQDLDSGKSRVAEKINGEWVTHQHLKKAIMLSFRIHGMETLSGPYSSWRDKSNILKGKTAGWGDKEFEQAGFRMVPNSPVRKGSFIGKNVVLMPCFVNIGAYIDQGTMMDTFSRAGSCCQIGKNCHISAGSGVGGVLEPAQALPTIIEDNVFLGAMSEVVEGVIVGEGSVLSMGMYIGQSTKIVNRSTGEITYGKIPPYSVIVPGTLPDKKNPSAPSLSCAVIIKQVDEKTRSKTFINDLFRE

SEQ ID NO: 112378 - protein, 260 aa, Unknown
  Bacterial polypetide isolated from the Sargasso Sea
MNTSTFEKIIDKAWNDKNQVNSKSDKKLLSAISETIELLDSGKIRVAEKKDNQWLVNQWIKKAILLSFRVNKMKASKGPYSTWYDKIDGKTQGWSEKKMVKAGFRYVPNGVIRKGAFIAKNVVLMPSFVNVGAYVDEGSMIDTWASVGSCAQVGKNCHISGGAGIGGVLEPMQANPTIIEDNCFVGARAEIAEGVIIEKGSVLSMGVYIGASTRIIDRATGKIYFGKVPAYSVVVPGTMPSKNNPSGPSLYCVVIVKPGR

SEQ ID NO: 112379 - protein, 175 aa, Unknown
  Bacterial polypetide isolated from the Sargasso Sea
KAGYRHVPNGVVRKGSFIAKGVVLMPCFVNLGAYVDEGTMIDTWASVGSCAQVGKNCHISGGAGIGGVLEPLQAGPVIIEDNCFIGARSEIAEGVLVEEGSVVSMGVYIGASTKIVDRTTGEVTYGKVPAYSVVVPGSMPNKKNPDGPSLYCVVIVKKVDQKTRSKTSINDLLRD

SEQ ID NO: 112380 - protein, 275 aa, Unknown
  Bacterial polypetide isolated from the Sargasso Sea
MNINSFEKIINEAWNNKSQINSKSSRKILNSISKTIDLLDSGKIRVAEKKNDEWIVNQWIKKAILLSFRVNKMKISKGPYAAWFDKVEGKTHKWNEKRFIKEGFRYVPNGVVRKGAYISKNVVLMPSFVNVGAYVDQGSMIDTWASVGSCAQVGRNCHISGGAGIGGVLEPMQANPTIIEDECFVGARAEIAEGVIVGKGSVLSMGVYIGASTRIFDRATGQIHYGKVPNYSVVVPGTMPSKNNPEGPSLYCVVIVKKVDEKTRSKTSINDLLRD

SEQ ID NO: 112381 - protein, 240 aa, Unknown
  Bacterial polypetide isolated from the Sargasso Sea
MSNQEVIEKLWDQKDQINFIKDSEAKKNIENVLNLLDQGKLRVCEKKDDIWHVNQWLKKTILLSFRIQDMEMISGGPSVSDGNTSWWDKVPSKFQNWTSENFQSAGFRAVPNCVVRRSAFIAKSAVLMPCFVNLGAYVDEGTMVDTWATVGSCAQVGKNCHISGGAGIGGVLEPLQANPVIIEDNCFIGARSEVAEGVIVGEGSVLSMGVFIGASTKIYNRETKEIYMGKVPPYSVVVPG

SEQ ID NO: 112382 - protein, 214 aa, Unknown
  Bacterial polypetide isolated from the Sargasso Sea
MLSFKMYPMENLNGPYSSWYDKAHLLKGKTAGWSKEDHEKAGFRMVPNSPVRKGSFVGKNAVLMPCYVNIGAYIDEGTMIDTFARAGSCSQIGKNCHISAGSGVGGVLEPAQALPTIIEDNVFLGAMSEVVEGVIVGEGSVLSMGMYIGQSTKIVNRKTGEISYGKIPPYSVVVPGSLPDKNNSSTPSLYCAVIIKQVDEKTRSKTSINDLLRE

SEQ ID NO: 112383 - protein, 267 aa, Unknown
  Bacterial polypetide isolated from the Sargasso Sea
MSNQEVIEKLWDQRDQINFIEDSEAKKSIENVLNLLDQGKLRVCEKKDDIWHVNQWLKKAILLSFRIQDMEMINGGPSVSHGNTSWWDKVPSKFQNWTSENFQSAGFRAVPNCVVRRSAFIAKSAVLMPCFVNLGAYVDEGTMVDTWATVGSCAQVGKNCHISGGAGIGGVLEPLQANPVIIEDNCFIGARSEVAEGVIVGEGSVLSMGVFIGASTKIYNRETKEIYMGKVPPYSVVVPGSLPSSKGDASLYCVVIVKTVDGKNSIK

SEQ ID NO: 112384 - protein, 142 aa, Unknown
  Bacterial polypetide isolated from the Sargasso Sea
AYIDEGTMVDTWATVGSCAQIEKNCHLSGGVGIGGVLEPLQANPVIIEDNCFVGARAEVAEGVIVREGSVLSMGVYLGASTKIVNRSTGEIFYGEVPAYSVVVPGTLPNTDPAKPSLYCVVIVKTVDENTRKKTSINDLLRE

SEQ ID NO: 112385 - protein, 104 aa, Unknown
  Bacterial polypetide isolated from the Sargasso Sea
LEPMQASPTVIEDNCFIGARSEIVEGCIVREGAVVGMGVFIGKSTKIFNRENGETTYGEIPPYSVVVSGSIPSRGGVNLYCAVIVKQVDEKTRSKTSINDLLRD

SEQ ID NO: 112386 - protein, 111 aa, Unknown
  Bacterial polypetide isolated from the Sargasso Sea
IGGVLEPLQAVPVIIEDNCFIGARSEIAEGVLVEEGAVLSMGVYIGASTKIVDRNSGEIHYGKVPAYSVVVPGSLPNKSNPSGPSLYCAVIVKKVDEKTRSKTSINDLLRD

SEQ ID NO: 112387 - protein, 210 aa, Unknown
  Bacterial polypetide isolated from the Sargasso Sea
KKAIMLSFRIYPMDNLSGPYSSWYDKSHLLKGKTANWTKEQHEAAGFRMTPNSPVRPGSFIGKNAVLMPCYVNIGAYIGAGTMMDTFSRAGSCCQIGENCHISAGSGIGGVLEPAQALPTIIEDNVFVGAMSEVVEGVIVGEGSVLSMGCYIGQSTKIINRSNGEITKGRVPPYSVVVPGTHKDLYAVHIIKTVDAKTRSKTSINDLLRD

SEQ ID NO: 112388 - protein, 78 aa, Unknown
  Bacterial polypetide isolated from the Sargasso Sea
GEGSVLSMGMLITQSTKIVNRSTGEISYGKIPPYSVVVPGSLPDKKSASAPSLSCAVIIKQVDEKTRSKTSINDLLRD

SEQ ID NO: 112389 - protein, 252 aa, Unknown
  Bacterial polypetide isolated from the Sargasso Sea
MSDIEKIINEAWENKDQINPNSDKKIKDTINQIIVDLDSGKVRVAEKIDGEWITHQHIKKAIMLSFRIHGMEALSGPYSSWYDKAHLLKGKTAGWTKEDHEKAGFRNPPNSPIRKGSFIGKNAVLMPCYVNIGAYIDEGTMIDTFARAGSCCQIGKNCHISAGSGIGGVLEPAQALPTIIEDNVFVGAMSEVVEGVIVGEGSVLSMGMYIGQSTKIVNRKTGEITYGKIPPYSVVVPGSLPDKNSSSAPSLY

SEQ ID NO: 112390 - protein, 224 aa, Unknown
  Bacterial polypetide isolated from the Sargasso Sea
MKDIIEKAWENRTLLNDDNTKQTIRKIIDQLDKGEVRIAEKINSKWIVNEWIKKAVILYFPIQKMKTIQSGDMEFFDKIDLKKNYKEKGIRVVPSAIARYGSYVSEGVILMPSYVNIGAYVDSGSMIDTWATVGSCAQIGKNVHLSGGVGIGGVLEPLQAAPVIIEDNSFIGSRCIIVEGVKIESEAVLGANVVITSSTKIIDVSGSKPIESKGLIPKRSVVIP

SEQ ID NO: 112391 - protein, 116 aa, Unknown
  Bacterial polypetide isolated from the Sargasso Sea
VHLSGGVGIGGVLEPMQAGPTIIEDNCFIGARSEVVEGCIVREGSVLGMGVYIGQSTKIVDRETGEVMYGEVPPYSVVVSGSMPSKNNVSLYCAVIVKRVDEKTRSKTGINELLRD

SEQ ID NO: 112392 - protein, 274 aa, Unknown
  Bacterial polypetide isolated from the Sargasso Sea
MNLEKIEKTINEAFRNKEKIDSADKTLNDLVHETIDLLDNGKIRVAEKMDDKWQVNQWIKKAILLSFRINKMKASKGPYSTWYDKIDGKTQGWSEEQIKKAGFRYVPNGVIRKGAHIAKNVVLMPSFINVGAYVDEGTMIDTWASVGSCAQVGKNCHISGGAGIGGVLEPMQANPTIVEDDCFLGARAEIAEGVIVEKGSVLSMGVYIGASTRIVDRATGEIHYGRVPAYSVVVPGSMPSKNNPKGPSLYCVVIVKKVDEKTRSKTSINDLLRD

SEQ ID NO: 112393 - protein, 168 aa, Unknown
  Bacterial polypetide isolated from the Sargasso Sea
LTHLVRKGSYVGKNAVLMPCYVNIGAYIDEGTMIDTFARAGSCCQIGKNCHISAGSGIGGVLEPAQALPTIIEDNVFLGAMSEVVEGVIVGEGSVLSMGMYIGQSTKIVNRSSGEINYGKIPPYSVVVPGTLPDKKNPSAPSLSCAVIIKQVDEKTRSKTSINDLLRE

SEQ ID NO: 112394 - protein, 215 aa, Unknown
  Bacterial polypetide isolated from the Sargasso Sea
IMLSFRIYPMENLNGPYSSWYDKSHLLKGKTAGWSKEDHERAGFRMVPNSPVRKGSFVGKNAVLMPCYVNIGAYIDEGTMIDTFARAGSCCQIGKNCHISAGSGVGGVLEPAQALPTIIEDNVFLGAMSEVVEGVVVGEGSVLSMGMYIGQSTKIVDRKTGNITYGKIPPYSVVVPGSLPDKNNSAAPSLYCAVIIKQVDEKTRSKTSINDLLRD

SEQ ID NO: 112395 - protein, 135 aa, Unknown
  Bacterial polypetide isolated from the Sargasso Sea
MIDTWASVGSCAQVGKNCHISGGAGIGGVLEPMQANPTIIEDNCFIGARSEIVEGVIVGEGSVISMGVFIGQSTKIINRETGETLYGKIPPYSVVVPGSLPSKNGKGPSLYCAVIVKTVDAKTRSKTSINDLLRD

SEQ ID NO: 112396 - protein, 151 aa, Unknown
  Bacterial polypetide isolated from the Sargasso Sea
MPCYVNIGAYIDEGTMIDTFARAGSCSQIGKNCHISAASGVGGVLEPAQALPTIIEDNVFLGAMSEVVEGVIVGEGSVISMGMYIGQSTKIVNRKTGEITYGKIPPYSVVVPGSLPDKNNPSAPSLYCAVIIKQVDEKTRSKTSINELLRD

SEQ ID NO: 112397 - protein, 275 aa, Unknown
  Bacterial polypetide isolated from the Sargasso Sea
MSYDKLEKIINESFEKKEKVSPKSDKKLLKAINETINLVDSGKIRVANKQNGNWVVNQWIKKAILLSFRINKMQMMKGPYTTWYDKVPGKTVKWKEKDWKKAGYRHVPNGVVRKGAYIAKNVVLMPSFVNLGAYVDEGTMIDTWASVGSCAQVGKNCHISGGAGIGGVLEPLQAGPVIIEDNCFIGARAEIAEGVLVEEGAVLSMGVYIGASTKIIDRNSGEIYYGKVPAYSVVVPGSLPNKSNPQGPSLYCAVIVKKVDEKTRSKTSINDLLRD

SEQ ID NO: 112398 - protein, 204 aa, Unknown
  Bacterial polypetide isolated from the Sargasso Sea
MEIITGGPSVKNGSTAWWDKVPSKFQDWKSENFQSAGFRAVPNCVVRRSAFIAKSAVLMPCFVNLGAYVDEGTMVDTWATVGSCAQVGKNCHISGGAGIGGVLEPLQANPVIIEDNCFIGARSEVAEGVIVGEGSVLSMGVFIGASTKIYNRETKEIYIGKVPPYSVVVPGSLPSSKGDASLYCVVIVKTVDEKTRSKTSVNEL

SEQ ID NO: 112399 - protein, 120 aa, Unknown
  Bacterial polypetide isolated from the Sargasso Sea
NCHISAGSGVGGVLEPAQALPTIIEDNVFLGAMSEVVEGVIVGEGSVLSMGMYIGQSTKIVDRKTGNITYGKIPPYSVVVPGSLPDKNNSAAPSLYCAVIIKQVDEKTRSKTSINDLLRD

SEQ ID NO: 112400 - protein, 241 aa, Unknown
  Bacterial polypetide isolated from the Sargasso Sea
VAELLGSSKWRVNQWSKKAVLLSFRLNDMGIIQGGPESWDCGPSVWWDKVKSKFSNWSSDDFKKAGFRAVPGSIVRHSAFINKNVVLMPSFVNLGAFVDEGAMIDTWATVGSCAQIGKNVHLSGGAGIGGVLEPLQADPVIIEDNCFIGARSEVAEGVIIEEGSVLSMGVYIGASTKVVDRSTGEIYMGRVPSYSVVVPGSMAGSKNNETSNSPNLYCAVIVKRVDAKTRSKTSVNDLLRD

SEQ ID NO: 112401 - protein, 202 aa, Unknown
  Bacterial polypetide isolated from the Sargasso Sea
MYLEDHTLLWYDKVPGKSVTWNENDWKQAGYRHVPNGVVRKGSFIAKNVVLMPCFVNLGAYVDEGTMIDTWASVGSCAQVGKNCHVSGGAGIGGVLEPLQAGPVIIEDNCFIGARSEIAEGVIVEEGAVISMGVYIGASTKIVDRSSGEITYGKVPAYSVVVPGSMPNKNNSGGPNLYCAVIVKKVDEKTRSKTSINDLLRD

SEQ ID NO: 112402 - protein, 211 aa, Unknown
  Bacterial polypetide isolated from the Sargasso Sea
MKINELEKIINESFESKENISLNSDKKIIDAINETIELTDRGNVRVAERKNGKWSVNQWVKKAILLSFRVNKMTMSKGPYTTWYDKVPGKSVQWNEEDWKKAGYRHVPNGVVRKGSFIGKNVVLMPCFVNLGAFVDEGTMIDTWASVGSCAQVGKNCHISGGAGIGGVLEPLQAGPVIIEDNCFIGARSEIAEGVIVEEGSVISMGVYIGA

SEQ ID NO: 112403 - protein, 251 aa, Unknown
  Bacterial polypetide isolated from the Sargasso Sea
LKNAINQVISDLDSGKSRVAEKINGEWVTHQHLKKAIMLSFRIYPMENLNGPYSSWYDKSHLLKGKTAGWSKEDHEKAGFRMVPNSPVRKGSFVGKNAVLMPCYVNIGAYIDEGTMIDTFARAGSCCQIGKNCHISAGSGVGGVLEPAQALPTIIEDNVFLGAMSEVVEGVIVGEGSVLSMGMYIGQSTKIVDRKTGNITYGKIPPYSVVVPGSLPDKNNSAAPSLYCAVIIKQVDEKTRSKTSINDLLRD

SEQ ID NO: 112404 - protein, 146 aa, Unknown
  Bacterial polypetide isolated from the Sargasso Sea
NVGAYVDEGSMIDTWASVGSCAQVGKNCHISGGAGIGGVLEPMQANPTIIEDNCFVGARAEIAEGVIVCKGSVLSMGVYIGASTRIIDRATGKILYGKVPEYSVVVPGTMPSKNTPDGPSLYCVVIVKKVDEKTRSKTSINDLLRD

SEQ ID NO: 112405 - protein, 129 aa, Unknown
  Bacterial polypetide isolated from the Sargasso Sea
AGSCCQIGKNCHISAGTGVGGVLEPAQALPTIIEDNVFLGAMSEVVEGVIVGEGSVLSMGMYIGQSTKIVNRKTGKITYGKIPPYSVVVPGSLPDKNDPQAPSLYCAVIIKQVDEKTRSKTSVNDLLRE

SEQ ID NO: 112406 - protein, 259 aa, Unknown
  Bacterial polypetide isolated from the Sargasso Sea
MKVDELEKIINDAFEDKQNISASSDKKILDAINETIILTDKGSLRVAEKKNGKWSVNQWVKKAILLSFRTNKMTMSKGPYTTWYDKVPGKSVSWNEADWKKAGYRHVPNGVVRRGSYIAKNVVLMPCFVNLGAYVDEGTMIDTWASVGSCAQIGKNCHVSGGAGIGGVLEPLQAGPVIIEDDCFIGARSEIAEGVLVEKGAVISMGVYIGASTKIIDRSTGEITYGKVPAYSVIVPGSLPNKKNPDGPSLYCAVIVKKV

SEQ ID NO: 112407 - protein, 272 aa, Unknown
  Bacterial polypetide isolated from the Sargasso Sea
MSIEKIINEAWKIKDQVNQDSDKKLKDAINQVISDLDSGKSRVAEKINGEWVTHQHLKKAIMLSFRIYPMENLNGPYSSWYDKAHLLKGKTAGWSKEDHEKAGFRMVPNSPIRKGSFIGKNAVLMPCYVNIGAYIDEGTMIDTFARAGSCCQIGKNCHISAGSGVGGVLEPAQALPTIIEDNVFLGAMSEVVEGVIVGEGSVLSMGMYIGQSTKIVDRKTGKITYGKIPPYSVVVPGSLPDKNNPSAPSLYCAVIIKQVDEKTRSKTSINDL

SEQ ID NO: 112408 - protein, 245 aa, Unknown
  Bacterial polypetide isolated from the Sargasso Sea
CLALLDSGQARVSEKIEKNWVVNEWLKKAVLLSFRLWPMDLISGGPGDSNWWDKVPSKFSKWSAKDFQNNNFRTVPGSIVRYSAHISPEAILMPSFVNLGARVGSGTMIDTWATVGSCAQVGKNCHISGGVGLGGVLEPLQATPVIIEDNCFIGARSEIAEGVIVEEGAVISMGVYIGASTKIIDRKSGEVFYGKVPAYSVVVPGSMETNSANDNGKLSLYCAVIVKRVDEQTRSKTSINELLRD

SEQ ID NO: 112409 - protein, 93 aa, Unknown
  Bacterial polypetide isolated from the Sargasso Sea
VFLGAMSEVVEGVIVGEGSVLSMGMYIGQSTKIVNRKTGEITYGKIPPYSVVVPGSLPDKNNTSAPSLYCAVIIKQVDEKTRSKTSINDLLRE

SEQ ID NO: 112410 - protein, 164 aa, Unknown
  Bacterial polypetide isolated from the Sargasso Sea
MCVKEVSFIAKSAVLMPCFINLGAYVDEGTMVDTWATVGSCAQVGKNCHISGGAGIGGVLEPLQANPVIIEDNCFIGARSEVAEGVIVGEGSVLSMGVFIGASTKIYNRETKEIYMGKVPPYSVVVPGSLPSSKGDASLYCVVIVKTVDEKTRSKTSVNELLRD

SEQ ID NO: 112411 - protein, 229 aa, Unknown
  Bacterial polypetide isolated from the Sargasso Sea
INGEWLTHQHLKKAIMLSFRMYPMENLNGPYSSWYDKSHLLKGKTAGWTKEDHEKAGFRMVPNSPVRKGSFVGKNAVLMPCYVNIGAYIDEGTMMDTFSRAGSCCQIGKNCHISAGTGVGGVLEPAQALPTIIEDNVFLGAMSEVVEGVIVGEGSVLSMGMYIGQSTKIVNRKTGEITYGKIPPYSVVVPGSLPDKNNPKAPSLYCAVIIKQVDEKTRSKTSVNDLLRD

SEQ ID NO: 112412 - protein, 202 aa, Unknown
  Bacterial polypetide isolated from the Sargasso Sea
METFNTLISEAFEQRDTLNSETITDELRSAITATLDGLNEGRLRVAEKIDQQWQVHEWIKKAILLYFKTNDNEPMQGFTQFYDKVPLKYHQHDAAQLKHEGVRIVPPACVRYGAFIDKNTVLMPSYVNLGAYIGQGSMIDTWATVGSCAQIGNRVHLSGGAGIGGVLEPLQAKPTIIEDNCFIGARSEIVEGVIVEKNAVIS

SEQ ID NO: 112413 - protein, 118 aa, Unknown
  Bacterial polypetide isolated from the Sargasso Sea
HISAGSGIGGVLEPAQALPTIIEDNVFVGAMSEVVEGVIVEKGSVLSMGMYIGQSTKIVNRKTGEITYGKIPPYSVVVPGSLPDKKNPSAPSLSCAVIIKQVDEKTRSKTSINDLLRE

SEQ ID NO: 112414 - protein, 112 aa, Unknown
  Bacterial polypetide isolated from the Sargasso Sea
GVGGVLEPAQALPTIIEDNVFLGAMSEVVEGVIVGEGSVISMGMYIGQSTKIVDRKSGEITYGKIPPYSVIVPGSLPDKNNPRAPSLSCAVIIKKVDEKTRSKTSINDLLRD

SEQ ID NO: 112415 - protein, 260 aa, Unknown
  Bacterial polypetide isolated from the Sargasso Sea
KRNQNSEESLIRTINQIINDLDEGKARVAEKINGEWITHQHIKKAIMLSFRIHGMEALSGPYSSWYDKAHLLKGKTAGWTKKDFEEAGFRMVPNSPVRKGSYIAKNVVLMPCFINTGAYIGSGTMMDTFSRAGSCCQIGKNCHISAGSGIGGVLEPAQALPTIIEDNVFLGAMSEVVEGVIVGEGSVISMGMFIGQSTKIVDRKTGDITYGKIPPYSVLVPGSLPDKKNPNAPSLNCAVIIKQVDERTRSKTSINDLLRD

SEQ ID NO: 112416 - protein, 286 aa, Unknown
  Bacterial polypetide isolated from the Sargasso Sea
MDLAQIETEINTAWENRDSVNFDTKGAVREAVVEALALLDNGTARVAKPTGAHQWVVNQWLKKAVLLSFRLNDMQLIPSGTIYPGSGESVWWDKVAPKFSGWGEARFRAAGFRAVPGCLVRHSAYIAPGVVIMPGFINLGAYVDSGTMVDTWATVGSCAQIGKNVHLSGGAGIGGVLEPLQAGPVIIENDCFIGARSEVVEGVVVEQGAVLSMGVFIGASTKIVDRQTGEIHIGRVPAYSVVVPGSLPGKPLADGSPGPSLSCAVIIKQVDEKTRAKTSVNDLLRR

SEQ ID NO: 112417 - protein, 98 aa, Unknown
  Bacterial polypetide isolated from the Sargasso Sea
IIEDNVFLGAMSEVVEGVIVGEGSVLSMGMYIGQSTKIVNRKTGEITYGKIPPYSVVVPGSLPDKNNSSAPSLYCAVVIKQVDEKTRSKTSINDLLRE

SEQ ID NO: 112418 - protein, 116 aa, Unknown
  Bacterial polypetide isolated from the Sargasso Sea
MSISDLQSAIETAWDNREDLTPATTGANREAVETALAQLDSGAARVAEKIDGAWQVHEWLKKAVLLSFRLNDMEMIPNGPGANTAWWDKVPSKFAGWGASEFESAGFRAVPNAIVR

SEQ ID NO: 112419 - protein, 174 aa, Unknown
  Bacterial polypetide isolated from the Sargasso Sea
AGFRMVPNSPVRKGSFVGKDAVLMPCYVNIGSYIGAKTMMDTFSRAGSCCQIGENCHISAGSGVGGVLEPAQALPTIIEDNVFLGAMSEVVEGVIVGEGSVLSMGMLITQSTKIVNRSTGEITYGKIPPYSVVVPGSLPDKKNPSAPSLSCAVIIKQVDEKTRSKTSINDLLRD

SEQ ID NO: 112420 - protein, 176 aa, Unknown
  Bacterial polypetide isolated from the Sargasso Sea
AADGARIVPPAAVRTGTFVGKNAVVMPSYVNIGAFVDEGTMVDTWATVGSCAQIGKNVHLSGGVGIGGVLEPLQANPTIIEDNCFIGARSEIVEGVIVEEGSVISMGVYIGQSTRIYDRETGEVHYGRVPAGSVVVSGNLPSADGKYSLYAAIIVKKVDAKTRAKVGINALLRGVE

SEQ ID NO: 112421 - protein, 142 aa, Unknown
  Bacterial polypetide isolated from the Sargasso Sea
YVDEGTMIDTWASVGSCAQIGKNCHVSGGAGIGGVLEPLQAGPVIIEDDCFIGARSEIAEGVLVEKGAVISMGVYIGASTKIIDRNTGEITYGKVPAYSVVVPGSIPNKKNPDRPSLYCAVIVKKVDEKTRSKTSINDLLRD

SEQ ID NO: 112422 - protein, 214 aa, Unknown
  Bacterial polypetide isolated from the Sargasso Sea
MLSFRLYPMENLNGPYSSWYDKAHLLKGKTAGWTKEDHEKAGFRMVPNSPVRKGSFVGKNAVLMPCYVNIGAYIDEGTMIDTFARAGSCSQIGKNCHISAGSGVGGVLEPAQALPTIIEDNVFLGAMSEVVEGVIVGEGSVLSMGMYIGQSTKIVNRKTGEITYGKIPPYSVVVPGSLPDKNSPTAPSLYCAVIIKQVDEKTRSKTSINDLLRE

SEQ ID NO: 112423 - protein, 274 aa, Unknown
  Bacterial polypetide isolated from the Sargasso Sea
MNLEKIEKSINDAFENKAKLDSSNKEVTELIRKTIDLLDNGKIRVAEKKDDKWQVNQWIKKAILLSFRVNKMKASKGPYSTWYDKIDGKTQGWSEEQVKKAGFRYVPNGVIRKGAHIAKNVVLMPSFINVGAYVDEGTMIDTWASVGSCAQVGKNCHISGGAGIGGVLEPMQANPTIVEDNCFLGARAEIAEGVIVEKGSVLSMGVYIGASTRIVDRATGEIHYGRVPAYSVVVPGSMPSKNNPEGPSLYCVVIVKKVDEKTRSKTSINDLLRD

SEQ ID NO: 112424 - protein, 273 aa, Unknown
  Bacterial polypetide isolated from the Sargasso Sea
MSDIEKIINDAWENRKDISPNSDKKIIDTINDTIQKLDEGKIRTANRSEDGKWITNQVAKKAILLSFRTSKMTTTTGPYATWFDKVPGKTQGWTVDDHRKAGFRQVPNGVIRKGSYIAPGVVCMPSFVNIGAYVDSGTMVDTWVTVGSGAQIGKNCHLSGGVGIGGVLEPVQAGPTIIEDGCFIGARSEIVEGVIVRKNSVISMGVFIGSSTKIVRRDTGEILMGEVPEGSVVVPGALPSKKPGSPSLYCAVIIKTVDEKTRSKTSLNELLRD

SEQ ID NO: 112425 - protein, 275 aa, Unknown
  Bacterial polypetide isolated from the Sargasso Sea
MKPDELEKIISEAFENKQSVSENSDKKILDAIKETIELTDSGNVRVAEKKNGKWSVNQWVKKGILLSFRVNKMTMSKGPYTTWYDKVPGKSVLWNESDWKKAGYRHVPNGVVRKGSFIAKGVVLMPCFVNLGAYVDEGTMIDTWASVGSCAQVGKNCHVSGGAGIGGVLEPLQAGPVIIEDNCFIGARSEIAEGVLVEEGSVISMGVYIGASTKIVDRETGEVTYGKVPAYSVVVPGSMPNKKNPNGPSLYCAVIVKKVDEKTRSKTSINELLRD

SEQ ID NO: 112426 - protein, 173 aa, Unknown
  Bacterial polypetide isolated from the Sargasso Sea
GFRMVPNSPVRKGSFVGKNAVLMPCYVNIGAYIDEGTMIDTFARAGSCCQIGKNCHISAGSGVGGVLEPAQALPTIIEDNVFLGAMSEVVEGVIVGEGSVLSMGMYIGQSTKIVDRKTGNITYGKIPPYSVVVPGSLPDKNNSAAPSLYCAVIIKQVDEKTRSKTSINDLLRD

SEQ ID NO: 112427 - protein, 275 aa, Unknown; identical to SEQ ID NO: 112328
  Bacterial polypetide isolated from the Sargasso Sea

SEQ ID NO: 112428 - protein, 248 aa, Unknown
  Bacterial polypetide isolated from the Sargasso Sea
LVKAINETINLVDSGKIRVANKRDGNWIVNQWIKKAILLSFRINKMEMMKGPYTTWYDKVPGKTVKWKDKDWKKAGYRHVPNGVVRKGAFIAKNVVLMPSFVNLGAYIDEGTMIDTWASVGSCAQVGKNCHISGGAGIGGVLEPLQAGPVIIEDNCFIGARSEIAEGVLVEEGAVLSMGVYIGASTKIVDRSSGEIHYGKVPAYSVVVPGSLPNKSNPSGPSLYCAVIVKKVDEKTRSKTSINELLRD

SEQ ID NO: 112429 - protein, 259 aa, Unknown
  Bacterial polypetide isolated from the Sargasso Sea
KQNISDSSDKKIFYAISETINLTDKGSIRVAEKKNGKWSVNQWVKKAILLSFRTNKMTMSKGPYTTWYDKVPGKSVSWNEADWKKAGYRHVPNGVVRRGSYIAKNVVLMPCFVNLGAYVDEGTMIDTWASVGSCAQIGKNCHVSGGAGIGGVLEPLQAGPVIIEDNCFIGARSEIAEGVLVEKGAVISMGVYIGASTKIIDRNTGEITYGTVPAYSVVVPGSLPNKKNSDGPSLYCAVIVKKVDEKTRSKTSINDLLRD

SEQ ID NO: 112430 - protein, 286 aa, Unknown
  Bacterial polypetide isolated from the Sargasso Sea
MGDSQLESIIDKAWEDRESITSATSGEIRDAVEAALESMDSGKERVASPLGDHKWRVNQWLKKAVLLSFRLNDMEMISGGPGDNQRGASAWWDKVPSKFSGWSDEQFKSSGLRAVPNCVVRRSAYIAPGVVLMPSFVNLGAYVDSGTMVDTWATIGSCAQVGKNCHISGGAGIAGVLEPMQADPVIIEDNCFIGARSEVAEGVIVETGSVLSMGVYIGASTKIINRETGEITMGRVPAYSVVVPGAMPGKPLPDGSPGPSLYCAVIVKQVDEQTRNKTSINELLRD

SEQ ID NO: 112431 - protein, 240 aa, Unknown
  Bacterial polypetide isolated from the Sargasso Sea
MNLEKIEKTINEAFENKEKINSSDKALNDLVRETIDLLDNGKIRVAEKKGHKWQVNQWIKKAILLSFRVNKMKASKGPYSTWYDKIDGKTQGWSEEQVKKAGFRYVPNGVIRKGAHIAKNVVLMPSFINVGAYVDEGTMIDTWASVGSCAQVGKNCHISGGAGIGGVLEPMQANPTIVEDNCFIGARAEIAEGVIVEKGSVLSMGVYIGASTRIVDRATGEIHYGKVPAYSVVVPGSMPS

SEQ ID NO: 112432 - protein, 277 aa, Unknown
  Bacterial polypetide isolated from the Sargasso Sea
MTQQLQTLIDNAWENRASLSPAAAPKEIQDAVEHVIAELNNGKLRVATREGVGQWTVHQWIKKAVLLSFRLKDNEVVKAGDLGFYDKVQTKFAHLSEEEMKATGVRVVPPAVARRGSFIAKGAILMPSYVNIGAYVGEGTMVDTWATVGSCAQIGAGVHLSGGVGIGGVLEPLQAGPTIIEDNCFIGARSEVVEGVVVEENSVLGMGVYLGQSTPIFNRATGEISYGRVPSGSVVVSGNLPKTAANGAPYSMYAAIIVKQVDAQTRSKTSINDLLRD

SEQ ID NO: 112433 - protein, 275 aa, Unknown
  Bacterial polypetide isolated from the Sargasso Sea
MSQQLQQIIDTAWENRAELSPKAAPADVREAVAHAIEQLDKGALRVAEKIDGNWTVHQWLKKAVLLSFRLEDNAPMPAGGYSQFYDKVPSKFANYTAEDFAAGGFRVVPPAIARRGSFIAKNVVLMPSYTNIGAYVDEGTMVDTWATVGSCAQIGKNVHLSGGVGIGGVLEPLQANPVIIEDNCFIGARSEVVEGVIVEENSVISMGVYLGQSTKIYDRETGEVSYGRIPAGSVVVAGNLPSKDGSHSLYCAVIVKKVDAKTRAKVGLNELLRGD

SEQ ID NO: 112434 - protein, 201 aa, Unknown
  Bacterial polypetide isolated from the Sargasso Sea
GPYSSWYDKSHLLKGKTAGWSKEDHEKAGFRMVPNSPVRKGSFVGKNAVLMPCYVNIGAYIDEGTMIDTFARAGSCCQIGKNCHISAGSGVGGVLEPAQALPTIIEDNVFLGAMSEVVEGVIVGEGSVLSMGMYIGQSTKIVDRKTGKITYGKIPPYSVVVPGSLPDNNNSSAPSLYCAVIIKQVDEKTRSKTSINDLLRD

SEQ ID NO: 112435 - protein, 278 aa, Unknown
  Bacterial polypetide isolated from the Sargasso Sea
MKNVEQIIKNAFEDKEKINKDTNGEVRDAVEYTLNQLDNGSIRVCQKINGEWIVNQWIKKAILLSFRLSDNEIIKASHATWFDKVESKTAKWTKDDHLKAGFRYVPDAVVRKSAYIAKGVVLMPSFVNLGAYVDEGTMIDTWATVGSCAQIGKNCHISGGTGIGGVLEPLQANPVIVEDNCFIGARSEVAEGVIIGEGSVLSMGVFIGASTKIVDRATGEIHMGKVPPYSVVVAGSMQSNQSDKKLLVTNPALYCAVIVKKVDERTRSKTSINELLRD

SEQ ID NO: 112436 - protein, 212 aa, Unknown
  Bacterial polypetide isolated from the Sargasso Sea
MSELKKIIEQAFEQRDEISFNTKGEIRDSVEETLNQLDVGKIRVCEKINDEWIVNQWIKKAILLSFRLNDNEIIKASHATWYDKVPSKTANWTKDDHEKAGFRYVPDAVVRKSAFIAKGVILMPSFVNLGAYVDEGTMIDTWATVGSCAQIGKNCHISGGAGIGGVLEPLQANPVIIEDNCFIGARSEVAEGVIVGEGSVLSMGVFIGASTK

SEQ ID NO: 112437 - protein, 262 aa, Unknown
  Bacterial polypetide isolated from the Sargasso Sea
KDQINPNSDKKIKDTINQIISDLDSGKVRVAEKINGEWITHQHLKKAIMLSFRIYPMENLNGPYSSWYDKAHLLKGKTAGWTKEDHEKAGFRMVPNSPVRKGSFVGKNAVLMPCYVNIGAYIDEGTMIDTFARAGSCSQIGKNCHISAASGVGGVLEPAQALPTIIEDNVFLGAMSEVVEGVIVGEGSVISMGMYIGQSTKIVNRKTGEITYGKIPPYSVVVPGSLPDKNNPSAPSLYCAVIIKQVDEKTRSKTSINDLLRD

SEQ ID NO: 112438 - protein, 275 aa, Unknown
  Bacterial polypetide isolated from the Sargasso Sea
MSIENIINDAWENRDQVNPSSEQSLKDTINQVIDDLDSGRSRVAEKINGEWVTHQHLKKAIMLSFRLYPMENLNGPYSSWYDKSHLLKGKTAGWTKEDHEKAGFRMVPNSPVRKGSFVGKNAVLMPCYVNIGAYIDEGTMIDTFARAGSCSQIGKNCHISAGSGVGGVLEPAQALPTIIEDNVFLGAMSEVVEGVIVGEGSVLSMGMYIGQSTKIVNRKTGEITYGKIPPYSVVVPGSLPDKNNSSAPSLYCAVIIKQVDEKTRSKTSINDLLRE

SEQ ID NO: 112439 - protein, 274 aa, Unknown
  Bacterial polypetide isolated from the Sargasso Sea
MSENQKLKESIENAWENIANLSPSDRDVTQVVDQVIKKLDGGELRIAEKVDDQWTVNQWLKKAVLISFRINENTILRGPYTTWFDKVKGKTVDWDENQWKEAGYRHVPNGTVREGSFIGKGVVLMPSFVNIGAYIDEGTMVDTWATVGSCAQIGKNCHLSGGVGIGGVLEPLQANPVIIEDNCFVGARAEVAEGVIVREGSVLSMGVYLGASTKIVNRATGEIMYGEVPAYSVVVPGTMPNEDSSKPSLYCVVIVKTVDENTRKKTSINDLLRE

SEQ ID NO: 112440 - protein, 276 aa, Unknown
  Bacterial polypetide isolated from the Sargasso Sea
MANTNLERIINEVWEDREAISPNTSGERRDAVEEVLDALDKGTIRVAVRQDNGDWRVNQWVKKAVVLSFRLFNMVEQKGGPQEATWWDKVDSKFKNWTADEWKSKNFRAVPNCIVRKSAYIAPGVVLMPSFVNLGAYVGEGTMVDTWATVGSCAQIGKNVHLSGGVGIGGVLEPLQAGPTIIEDNCFIGARSEVVEGCIIREGAVLGMGVFIGKSTKILDRETGKISFGEVPPYSVVVPGALQTERPEVSLACAVIVKKVDEKTRSKTSINELLRS

SEQ ID NO: 112441 - protein, 267 aa, Unknown
  Bacterial polypetide isolated from the Sargasso Sea
MSIEKIINDAWENKDQVNPNSDQSLKDTINQVISDLDSGKSRVAEKVNGEWITHQHLKKAIMLSFRIYPMENLNGPYSSWYDKAHLLKGKTAGWTKEDHEKAGFRMVPNSPVRKGSFVGKDAVLMPCYVNIGAYIGAKTMMDTFSRAGSCCQIGESCHISAGSGIGGVLEPAQALPTIIEDNVFVGAMSEVVEGVIVEEGSVLSMGCYIGQSTKIINRSNGEITKGRIPPYSVVVPGTHKDLYAVHIIKTVDSKTRSKTSINDLLRD

SEQ ID NO: 112442 - protein, 259 aa, Unknown
  Bacterial polypetide isolated from the Sargasso Sea
LIKTSDQSIINSINQIIENVDQGKMRVAEKINNEWVTHQHIKKAIMLSFRIYGMEALSGPYSSWYDKAHLLKGKTAGWQKDDFEKAGFRMVPNSPVRKGSYIGKNVVLMPCFINIGAYVDSGTMMDTFSRAGSCCQIGKNCHISAGSGVGGVLEPAQALPTIIEDNVFLGAMSEIVEGVIVEEGSVISMGMYIGQSTKIVDRKTGEITYGKIPAYSVVVPGSLPDKNNPNAPSLSCAVIIKQVDEKTRSKTSINDLLRD

SEQ ID NO: 112443 - protein, 275 aa, Unknown
  Bacterial polypetide isolated from the Sargasso Sea
MSIEKIINEAWDNKDQVNQNSEKSLKEAIDQVIMDLDTGKSRVAEKIDGEWKTHQHLKKAIMLSFRIHGMETLAGPYSSWRDKSNILKGKTAGWGDKEFEEAGFRMVPNSPVRKGSFIGKNVVLMPCFVNIGAYIDQGTMMDTFSRAGSCCQIGKNCHISAGSGVGGVLEPAQAQPTIIEDNVFLGAMSEVVEGVIVGEGSVLSMGMYIGQSTKIVDRKTGEITYGKIPPYSVVVPGSLPDKKNPSAPSLSCAVIIKQVDERTRSKTSINDLLRD

SEQ ID NO: 112444 - protein, 221 aa, Unknown
  Bacterial polypetide isolated from the Sargasso Sea
IKKAILLSFRLSDNEIIKASHATWFDKVESKTANWTKYDHLKAGFRYVPDAVVRKSAYIAKGVVLMPSFVNLGAYVDQGTMIDTWATVGSCAQIGKNCHISGGAGIGGVLEPLQANPVIIEDNCFIGARSEVAEGVIIGEGSVLSMGVFIGASTKIVDRATGEIHMGKVPPYSVVVAGSMPSSQGEKKWLVTNPGLYCAVIVKRVDERTRSKTSINELLRD

SEQ ID NO: 112445 - protein, 286 aa, Unknown
  Bacterial polypetide isolated from the Sargasso Sea
MEIENMKSVIERVFDNNEDINPNTTGEIRNSIETALDYLDQGKLRVAEPLGNSKWHVNQWLKKAVLLSFKINDMDVISGGPKSQNTGPANWWDKIPSKFSGWNKEEFKKAGFRAVPGSVVRHSAFIAPSVVLMPSFVNIGAYVDSGSMIDTWATVGSCAQIGKNVHISGGAGIGGVLEPIQAGPVVIEDNCFVGARSEVAEGVVIETGAVLSMGVFIGASTKVIDRNTGELFIGRVPAYSVVVPGSLPGKPLPNGSQGPSLYCAVIVKKVDAQTRSKTSVNELLRD

SEQ ID NO: 112446 - protein, 275 aa, Unknown
  Bacterial polypetide isolated from the Sargasso Sea
MSIEKIINDAWENKDQVNSNSDQSLKDTINQVINDLDSGKLRVAEKINGEWVTHQHLKKAIMLSFRIYPMENLNGPYSSWYDKAHLLKGKTAGWTKEDHERAGFRMVPNSPVRKGSFVGKDAVLMPCYVNIGSYIGAKTMMDTFSRAGSCCQIGENCHISAGSGVGGVLEPAQALPTIIEDNVFLGAMSEVVEGVIVGEGSVLSMGMLITQSTKIVNRSTGEITYGKIPPYSVVVPGSLPDKKNPSAPSLSCAVIIKQVDEKTRSKTSINDLLRD

SEQ ID NO: 112447 - protein, 192 aa, Unknown
  Bacterial polypetide isolated from the Sargasso Sea
AHLLKGKTAGWTKEDHERAGFRMVPNSPVRKGSFVGKNAVLMPCYVNIGAYIDEGTMIDTFARAGSCSQIGKNCHISAGSGIGGVLEPAQALPTIIEDGVMIGAMSEIVEGVIVGEGSVVSMGMYIGQSTKIVNRKTGEITYGKIPPYSVVVPGTLPDKNNPKGPSLYCAVIIKQVDEKTRSKTSINDLLRD

SEQ ID NO: 112448 - protein, 275 aa, Unknown
  Bacterial polypetide isolated from the Sargasso Sea
MSLEKIITDAWEKKDQINQNSDQNIKDAIDQVIIDLDSGKSRVAEKINGEWVTHQYLKKAIMLSFRIYPMENLNGPYSSWYDKSHLLKGKTAGWSKEDHEKAGFRMVPNSPVRKGSFVGKNAVLMPCYVNIGAYIDEGTMIDTFARAGSCCQIGKNCHISAGSGVGGVLEPAQALPTIIEDNVFLGAMSEVVEGVIVGEGSVLSMGMYIGQSTKIIDRKTGKITYGKIPPYSVVVPGSLPDKNNSSAPSLYCAVIIKQVDEKTRSKTSINDLLRD

SEQ ID NO: 112449 - protein, 241 aa, Unknown
  Bacterial polypetide isolated from the Sargasso Sea
MSELKQIIEEAFENRDKINFNTKGKIRESVEETLNQLDVGNIRVCEKINNDWVVNQWIKKAILLSFRLNDNQIVKAPHATWYDKVPSKTTNWTKDDHEKAGFRYVPDAVVRKSAFIAKGVILMPSFVNLGAYVDEGTMIDTWATVGSCAQIGKNCHISGGAGIGGVLEPLQANPVIIEDNCFIGARSEVAEGVIVGEGSVLSMGVFIGASTKIIDRASGEVHMGKVPPYSVIVPGSNPGKK

SEQ ID NO: 112450 - protein, 216 aa, Unknown
  Bacterial polypetide isolated from the Sargasso Sea
MLSFRLNDMKTINNSPGDGNWWDKVPSKFENWGRKEFIDADFRAVPNCVVRKSAYIAPGAVLMPSFVNLGAYVGKRTMVDTWATIGSCAQIGEDCHISGGAGIGGVLEPLQADPVIIEDNCFIGARSEVAEGVIVGEGAVLSMGVFIGASTKIVNRSTGDIITGKVPPYSVVVPGSIPSAPLSDGSPAPSLYCAVIVKTVDEKTRSKTSINELLRD

SEQ ID NO: 112451 - protein, 276 aa, Unknown
  Bacterial polypetide isolated from the Sargasso Sea
MSDIKKIINDAWKNKDQINPNSDKKIKDTINQIIADLDSGKVRVAEKINGEWVTHQYLKKAIMLSFRIYPMENLNGPYSSWYDKAHLLKGKTAGWTKEDHEKAGFRMVPNSPVRKGSFVGKNAVLMPCYVNIGAYIDEGTMIDTFARAGSCSQIGKNCHISAASGVGGVLEPAQALPTIIEDNVFLGAMSEVVEGVIVGEGSVISMGMYIGQSTKIVNRETGEIKYGKIPPYSVVVPGSLPDKNNPSAPSLYCAVIIKQVDEKTRSKTSINDLLRD

SEQ ID NO: 112452 - protein, 270 aa, Unknown
  Bacterial polypetide isolated from the Sargasso Sea
MTINIELIEQAFDNNLDGVDVAAVEENVNEVFNSLNSGNIRVAYKNGEEWIVNQWIKKAILLSFKLKNNKLTDVGYTKYYDKLASKFENISENYLKENNIRIVPQAIAREGTFIGNNVVLMPSYVNIGAYVDSGTMVDTWATVGSCAQIGKNVHLSGGVGIGGVLEPLQANPTIIEDNCFIGARSEIVEGVIVKKNSVISMGVYIGKSTKIYDRETDQISYGLIPEGSVVVSGSLPSSDNKYNLYCAVIVKKVDEKTRSKVSINELLREA

SEQ ID NO: 112453 - protein, 275 aa, Unknown
  Bacterial polypetide isolated from the Sargasso Sea
MSIENIINEAWINKDQINPSSEKKIKDTIDKIIDDLDSGKIRVAEKINGEWVTHQYIKKGIMLSFRIYGMEALSGPYSSWYDKAHLLKGKTAGWTKDDHEKAGFRNPPNSPIRRGSFIGKNAVLMPCYVNIGAYIDEGTMIDTFARAGSCCQIGKNCHISAGSGIGGVLEPAQALPTIIEDNVFVGAMSEVVEGVIVGEGSVLSMGMYIGQSTKIVNRKTGEITYGKIPPYSVVVPGSLPDKNNSSAPSLYCAVIIKQVDEKTRSKTSINDLLRE

SEQ ID NO: 112454 - protein, 275 aa, Unknown
  Bacterial polypetide isolated from the Sargasso Sea
MVNEIEIIENAFNNIEKINSNSDKEILDAINNVIEKIDNGSLRVADKNQNDWQVNEYAKKAILLYFRIKDMKLISGGPDQSNWWDKIDPKFNSWDENKFEEAGFRAVPGSVVRYGSFIGKGCVLMPSFINIGAYVDDSTMVDTWATIGSCAQIGKNCHISGGAGIGGVLEPLQASPVIIEDNCFIGARSEVAEGVIVREGSVISMGVFLTASTPIFDRSSGEVIYGEVPKYSVIVPGSMPSKNVDSAANLSCAVIVKTVDEKTRSKTSINELLRD

SEQ ID NO: 112455 - protein, 275 aa, Unknown
  Bacterial polypetide isolated from the Sargasso Sea
MSLEKIINDAWENKDQVNQNSDQNLKDAINQVIADLDSGKSRVAEKINGEWVTHQHLKKAIMLSFRIYPMENLNGPYSSWYDKSHLLKGKTAGWTKADHEKAGFRMVPNSPVRKGSFVGKNAVLMPCYVNIGAYIDEGTMIDTFARAGSCCQIGKNCHISAGSGVGGVLEPAQALPTIIEDNVFLGAMSEVVEGVIVGEGSVLSMGMYIGQSTKIVERKTGKITYGKIPPYSVVVPGSLPDKNNSSAPSLYCAVIIKQVDEKTRSKTSINDLLRD

SEQ ID NO: 112456 - protein, 276 aa, Unknown
  Bacterial polypetide isolated from the Sargasso Sea
MSHQDIIEKLWDQRDQINFIEDNEAKKNIENVLNLLDEGMLRVCEKKENEWHVNQWLKKAILLSFRIQDMEIITGGPSVKDGTTSWWDKVPSKFQDWKSENFQSAGFRAVPNCVVRRSAFIAKSAVLMPCFVNLGAYVDEGTMVDTWATVGSCAQVGKNCHISGGAGIGGVLEPLQANPVIIEDNCFIGARSEVAEGVIVGEGSVLSMGVFIGASTKIYNRETKEIYMGKVPPYSVVVPGSLPSSKGDASLYCVVIVKTVDEKTRSKTSVNELLRD

SEQ ID NO: 112457 - protein, 265 aa, Unknown
  Bacterial polypetide isolated from the Sargasso Sea
MGNRDQVSPNSDESLKNTVNQIIDELDSGKVRVAEKINGEWVTHQHIKKAIMLSFRMYPMENLNGPYSSWYDKAHLLKGKTAGWSKKDHEKAGFRMVPNSPVRRGSFIGKNAVLMPCYVNIGAWIDSGTMMDTFSRAGSCCQIGKNCHISAGSGIGGVLEPAQALPTIIEDNVFVGAMSEVVEGVIVGEGSVLSMGMLITQSTKIVNRATGEITYGKIPPYSVVVPGSLPDKNNPSAPSLSCAVIIKQVDEKTRSKTSVNDLLRE

SEQ ID NO: 112458 - protein, 274 aa, Unknown
  Bacterial polypetide isolated from the Sargasso Sea
MEALRQRIEAAFEARADITPSTVDASVRNDVQNVINMLDKGELRVAEKIDGQWHVHQWLKKAVLLSFRIFDNAVIDGAETKYFDKVPLKFAEYDEARFKAEAIRVVPSATVRKGSFIGKNTVLMPSYVNLGAYVDEGTMVDTWATVGSCAQIGKNVHLSGGVGIGGVLEPLQAGPTIIEDNCFIGARSEIVEGVVVEEGSVISMGVYIGQSTRIYDRETGEIHYGRVPAGSVVVSGNLPSACGKYSLYAAIIVKKVDAKTRGKVGINELLRIVD

SEQ ID NO: 112459 - protein, 275 aa, Unknown
  Bacterial polypetide isolated from the Sargasso Sea
MSLEKIINDAWEIKDQISPSSDPKLKDAINQIIADLDSGKVRAAEKVNGQWIAHQHIKKAIMLSFRIYPMENLNGPYSSWYDKAHLLKGKTAGWSKEDHEKAGFRMVPNSPVRKGSFVGKNAVLMPCYVNIGAYIDEGTMIDTFARAGSCCQIGKNCHISAGSGVGGVLEPAQALPTIIEDNVFLGAMSEVVEGVIVGEGSVLSMGMYIGQSTKIVDRKTGKISYGKIPPYSVVVPGTLPDKNNSSAASLYCAVIIKQVDEKTRSKTSVNELLRE

SEQ ID NO: 112460 - protein, 267 aa, Unknown
  Bacterial polypetide isolated from the Sargasso Sea
MSIEKIINDAWENKDQVNQNSDQSLKDAINQVISDLDSGKSRVAEKINGEWKTHQHLKKAIMLSFKIYPMTNLSGPYSSWYDKAHLLKGKTANWTKEQHEAAGFRMTPNSPVRPGSFIGKNAVLMPCYVNIGAYIGSGTMMDTFSRAGSCCQIGENCHISAGSGIGGVLEPAQALPTIIEDNVFVGAMSEVVEGVIVEEGSVLSMGCYIGQSTKIVNRSNGEITKGRVPPYSVVVPGTHKDLYAVHIIKTVDSKTRSKTSINDLLRD

SEQ ID NO: 112461 - protein, 274 aa, Unknown
  Bacterial polypetide isolated from the Sargasso Sea
MSDNTELKNKIESAWENIAKISPKDTDIADAVNEVIKKLDNGQFRIAEKNGNDWIVNQWLKKAVLISFRINDNKILKGPYTSWYDKVKGKTVDWNEDQWKEAGYRHVPNGTVREGSFIGKGVVLMPSFVNIGAYIDEGTMVDTWATVGSCAQIGKNCHLSGGVGIGGVLEPLQANPVVIEDNCFVGARAEVAEGVIVREGSVLSMGVYLGASTKIVNRSTGEISYGEVPAYSVVVPGSLPNEDPKKPSLYCVVIVKTVDENTRKKTSINDLLRE

SEQ ID NO: 112462 - protein, 267 aa, Unknown
  Bacterial polypetide isolated from the Sargasso Sea
MSLEKIINDAWEKKDQVNQNSDQSLKDAINQVIKDLDSGKSRVAEKINGEWKTHQYLKKAIMLSFRIYPMDNLSGPYSSWYDKAHLLKGKTANWTKEQHEAAGFRMTPNSPVRPGSFIGKNAVLMPCYVNIGAYIGAGTMMDTFSRAGSCCQIGENCHISAGSGIGGVLEPAQALPTIIEDNVFVGAMSEVVEGVIVGEGSVLSMGCYIGQSTKIVNRSNDKITKGRVPPYSVVVPGIHKDLYAVHIIKTVDAKTRSKTSINDLLRD

SEQ ID NO: 112463 - protein, 275 aa, Unknown
  Bacterial polypetide isolated from the Sargasso Sea
MSNAILEGEIEAAWSVRETISSKTKGKVRDAIEETLEALDKGKLRVAEKTKDNVWQVNQWAKKAVLLGFRIKDMEIQSGGPQASGWWDKVDSKFKGWGEEAWKKAGFRAVPNSVVRKSAYIAPGVVLMPSFVNLGAYVDEGTMVDTWATVGSCAQIGKNVHLSGGVGIGGVLEPMQAGPTIIEDNCFIGARSEVVEGCIVREGSVLGMGVYIGQSTKIVDRETGEVIYGEVPPYSVVVSGSMPSKNNVSLYCAVIVKRVDEKTRSKTGINELLRD

SEQ ID NO: 112464 - protein, 49 aa, Unknown
  Bacterial polypetide isolated from the Sargasso Sea
KIPPYSVVVPGSLPDKNNPNAPSLNCAVIIKQVDEKTRSKTSINDLLRE

SEQ ID NO: 112465 - protein, 171 aa, Unknown
  Bacterial polypetide isolated from the Sargasso Sea
RVVPSATVRKGSFIGKNTVLMPSYVNLGAYVDEGTMVDTWATVGSCAQIGKNVHLSGGVGIGGVLEPLQAGPTIIEDNCFIGARSEIVEGVVVEEGSVISMGVYIGQSTRIYDRETGEIHYGRVPAGSVVVSGNLPSACGKYSLYAAIIVKKVDAKTRGKVGINELLRIVD

SEQ ID NO: 112466 - protein, 219 aa, Unknown
  Bacterial polypetide isolated from the Sargasso Sea
MSDLKTMIENAWDNRDSISPSTVSSDVKQAIIDALELLDSGAARVAEKISGEWVVHQWLKKAVLLSFRIRDNQPMNDGVNQFYDKVPLKFSDYTPEQFQQGGMRVVPNAVARKGSFVGKNVVLMPSYVNIGAYVDEGTMVDTWATVGSCAQIGKNVHLSGGVGIGGVLEPLQANPTIIEDNCFIGARSEIVEGVVVEEGAVIFMGVYISQSTRIYDRET

SEQ ID NO: 112467 - protein, 151 aa, Unknown
  Bacterial polypetide isolated from the Sargasso Sea
MPSFINVGAYVDEGTMIDTWASVGSCAQVGKNCHISGGAGIGGVLEPMQANPTIVEDNCFLGARAEIAEGIIVEKGSVLSMGVYIGASTRIIDRASGEIHYGKVPAYSVVVPGSMPSKNNPKGPSLYCVVIVKKVDEKTRSKTSINDLLRD

SEQ ID NO: 112468 - protein, 267 aa, Unknown
  Bacterial polypetide isolated from the Sargasso Sea
IISKAFEEKQNINGNSDKKIIEAVKKTIELTDKGEVRVAQKVNGKWTVNQWVKKAILLSFRINEMTMSKGPYTTWYDKVPGKSVAWNESDWKKAGYRHVPNGVVRKGSFIGKNVVLMPCFVNLGAYVDEGTMIDTWASVGSCAQIGKNCHVSGGAGIGGVLEPLQAGPVIVEDNCFIGARSEIAEGVIVEEGAVISMGVYIGASTKIVDRTTGNVTYGKVPAYSVVVPGSIKNKKNPDGPSLYCAVIVKKVDEKTRSKTSINDLLRD

SEQ ID NO: 112469 - protein, 100 aa, Unknown
  Bacterial polypetide isolated from the Sargasso Sea
SPTIIEDNCFIGARSEVVEGVIVRKNSVISMGVFIGKSTKIYDRETQTITYGEVPEGSVVVSGSLPSKDGTCNLYCAVIVKKVDEKTLSKVGINEILREA

SEQ ID NO: 112470 - protein, 274 aa, Unknown
  Bacterial polypetide isolated from the Sargasso Sea
MKDYEEIIEKNFDNIQDLSIASASNELKETVNDVLNLLDKGEIRVCNKSEKGWVVNQWIKKAILLSFRLKDNYLQRGSYANWFDKVDSKTGNWSEKDFNKAGFRYVPNAVIRKSAFVAKNAVVMPSFINIGAYVDEGTMVDTWATVGSCAQIGKNVHLSGGVGIGGVLEPLQASPTIIEDNCFIGARSEIVEGVIVEQNSVISMGVYIGQSTRIYDREKDEVYYGRVPAGSVVVSGNLPSKNGKYSLYAAIIVKRVDEKTLSKVGINNILREAE

SEQ ID NO: 112471 - protein, 275 aa, Unknown
  Bacterial polypetide isolated from the Sargasso Sea
MSIEKIINEAWENKDEINQHSSKTIKDAINQVIEDLDSGKSRVAEKIKGEWVTHQYLKKAIMLSFRIYPMENLNGPYSSWFDKAHLLKGKTAGWTKEQHEAAGFRMVPNSPVRKGSFVGKNAVLMPCYVNIGAYIDSGTMIDTFARAGSCCQIGKNCHISAGSGIGGVLEPAQALPTIIEDNVFLGAMSEVVEGVIVGEGSVLSMGMYIGQSTKIVNRSTGEIIYGKIPPYSVVVPGTLPDKKNSAAPSLSCAVIIKQVDEKTRSKTSINDLLRE

SEQ ID NO: 112472 - protein, 275 aa, Unknown
  Bacterial polypetide isolated from the Sargasso Sea
MTELQQIIEAAFERRDSITPGSVDAATKAAILQAIDLLDSGKARVAEKIAGEWVVHQWLKKAVLLYFRINDNGIIKGDDAQYYDKVPLKFSDYSAEQFKAAGVRVVPPATARKGSFIAPNTVLMPSYVNIGAFVDEGTMVDTWATVGSCAQIGKNVHLSGGVGIGGVLEPLQANPTIIEDNCFIGARSEVVEGVIVEEGSVISMGVFIGQSTRIYDRETGEIHYGRVPAGSVVVSGSLPSKCGKYSLYAAVIVKKVDAKTRAKVGINALLRSIDE

SEQ ID NO: 112473 - protein, 88 aa, Unknown
  Bacterial polypetide isolated from the Sargasso Sea
MSEVVEGVIVGEGSVLSMGMYIGQSTKIVNRKTGEITYGKIPPYSVVVPGSLPDKNNSSAPALYCAVIIKQVDEKTRSKTSINDLLRE

SEQ ID NO: 112474 - protein, 275 aa, Unknown
  Bacterial polypetide isolated from the Sargasso Sea
MSIEKIINDAWEKKDQVNPNSDQSLKDAINQVINDLDSGKSRVAEKINGEWITHQHLKKAIMLSFRIYPMENLNGPYSSWYDKAHLLKGKTAGWTKEDHERAGFRMVPNSPVRKGSFVGKDAVLMPCYVNIGSYIGAKTMMDTFSRAGSCCQIGENCHISAGSGVGGVLEPAQALPTIIEDNVFLGAMSEVVEGVIVGEGSVLSMGMLITQSTKIVNRSTGEITYGKIPPYSVVVPGSLPDKKNPSAPSLSCAVIIKQVDEKTRSKTSINDLLRD

SEQ ID NO: 112475 - protein, 198 aa, Unknown
  Bacterial polypetide isolated from the Sargasso Sea
SSWYDKAHLLKGKTAGWNKEDHEKAGFRMVPNSPVRKGSFVGKNAVLMPCYVNIGAYIDEGTMIDTFARAGSCCQIGKNCHISAGSGVGGVLEPAQALPTIIEDNVFLGAMSEVVEGVIVGEGSVLSMGMYIGQSTKIVNRKTGEITYGKIPPYSVVVPGSLPDKNNSSAPSLYCAVIIKQVDEKTRSKTSINDLLRE

SEQ ID NO: 112476 - protein, 168 aa, Unknown
  Bacterial polypetide isolated from the Sargasso Sea
PNSPVRKGSYIAKNVVLMPCFINTGAYIDSGTMMDTFSRAGSCCQIGKNCHISAGSGVGGVLEPAQALPTIIEDNVFLGAMSEVVEGVIVGEGSVISMGMYIGQSTKIVDRKSGEITYGKIPAYSVIVPGSLPDKNNPSAPSLSCAVIIKKVDEKTRSKTSINDLLRD

SEQ ID NO: 112477 - protein, 275 aa, Unknown
  Bacterial polypetide isolated from the Sargasso Sea
MSIENVINEAWEKRDQINPASDKSLKDTINQVIDDLDSGKSRVAEKINGEWITHQHLKKAIMLSFRLYPMENLNGPYSSWYDKAHLLKGKTAGWTKEDHEKAGFRMVPNSPVRKGSFVGKNAVLMPCYVNIGAYIDEGTMIDTFARAGSCSQIGKNCHISAGSGVGGVLEPAQALPTIIEDNVFLGAMSEVVEGVIVGEGSVLSMGMYIGQSTKIVNRKTGEITYGKIPPYSVVVPGSLPDKNNPTAPSLYCAVIIKQVDEKTRSKTSINDLLRE

SEQ ID NO: 112478 - protein, 184 aa, Unknown
  Bacterial polypetide isolated from the Sargasso Sea
MGWTKEDHEKAGFRMVPNSPVRKGSFVGKNAVLMPCYVNIGAYIDEGTMMDTFSRAGSCCQIGKNCHISAGSGIGGVLEPAQALPTIIEDNCFIGAMSEVVEGVIVGEGSVLSMGMYIGQSTKIVNRNTGEVTYGKIPPYSVVVPGSLPDKNNSFAPSLYCAVIIKQVDEKTRSKTSVNDLLRE

SEQ ID NO: 112479 - protein, 222 aa, Unknown
  Bacterial polypetide isolated from the Sargasso Sea
MSDIEKIINDAWENKDKINPNSDKKIKDTINQIISDLDSGKVRVAEKINGEWVTHQHLKKAIMLSFRIYPMENLNGPYSSWYDKAHLLKGKTAGWTKEDHEKAGFRMVPNSPVRKGSFVGKNAVLMPCYVNIGAYIDEGTMIDTFARAGSCSQIGKNCHISAASGVGGVLEPAQALPTIIEDNVFLGAMSEVVEGVIVGEGSVISMGMYIGQSTKIVNRKTG

SEQ ID NO: 112480 - protein, 275 aa, Unknown
  Bacterial polypetide isolated from the Sargasso Sea
MSIEKIINKAWENKDQVNQNSDKSLKDAVNQIIDDLDSGKARIAEKINGEWVTHQHLKKAIMLSFRMHGMDIMAGPYSTWRDKSHLLKGKTAGWTNEDFEKAGFRMVPNTAARRGSFVAKNAVLMPCYVNIGAYIDEGTMMDTFSRAGSCCQIGKNCHISAGTGVGGVLEPAQALPTIIEDNVFLGAMSEVVEGVIVGEGSVLSMGMYIGQSTKIVNRKTGEITYGKIPPYSVVVPGSLPDKNNPQAPSLYCAVIIKQVDEKTRSKTSVNDLLRE

SEQ ID NO: 112481 - protein, 98 aa, Unknown
  Bacterial polypetide isolated from the Sargasso Sea
IIEDNVFVGAMSEVVEGVIVGEGSVLSMGMLITQSTKIVTRSTGEITYGKIPPYSVVVPGSLPDKNNSSAPSLSCAVIIKQVDEKTRSKTSVNDLLRD

SEQ ID NO: 112482 - protein, 73 aa, Unknown
  Bacterial polypetide isolated from the Sargasso Sea
MEALRQRIEAAFEARADITPSTVDASVRNDVQHVINMLDKGELRVAEKIDGQWHVHQWLKKAVLLSFRIFDNA

SEQ ID NO: 112483 - protein, 286 aa, Unknown
  Bacterial polypetide isolated from the Sargasso Sea
MDVSKLENIINDAWENRDTISTDTKGEVRKSVEEALNGLDSGLFRVAEPIGDHQWKVNQWLKKAVLLSFRLNDMGLISGAPETPSLGKSFWWDKIPSKFAGYTEQDYRKAGFRSVPGCVVRHSAYIAKGVVLMPCFVNIGANVGESSMVDTWATVGSCAQIGANVHLSGGVGIGGVLEPLQAGPVIIEDDCFIGARSEVVEGVIVEKGAVLSMGVFIGASTKIIDRSTGEIHIGRVPAYSVVVPGSLPGKNLPDGSPGPNLYCAVIVKKVDAQTREKTSINDLLRD

SEQ ID NO: 112484 - protein, 192 aa, Unknown
  Bacterial polypetide isolated from the Sargasso Sea
WYDKVGFKTAGWTEEDHKRAGFRYVPNGMTRKGCFVAPGCVLMPSFLNIGCYVDSGTMVDTWSTVGSGAQVGKNCHLSGGVGIGGVLEPVQAGPTIIEDGCFIGARSEIVESVIVRKNSVISMGVFIGASTKIIYRDTGKVIMGEVPEGSVVVPGTLPSKKPGMPSLYCAVIIKTVDEKTRSKTSLNDLLRD

SEQ ID NO: 112485 - protein, 275 aa, Unknown
  Bacterial polypetide isolated from the Sargasso Sea
MSNSELENAIEAAWNVREEITPSTTGETRKAIEATLSALDTGSLRVADKNDKGDWIVNQWAKKAVLLGFKLKDMEVHEGGPQNSGWWDKVDNKFKGWKTKDWIEAGFRAVPSCVVRRSAYIAPGVVLMPSFVNLGAYVDTGTMVDTWATVGSCAQIGKNVHLSGGVGIGGVLEPMQASPTIIEDNCFIGARSEVVEGVIVREGSVLGMGVYIGQSTKIVERETGEVMYGEVPPYSVVVSGSMPSKNNISLYCAVIVKRVDERTRSKTGINELLRD

SEQ ID NO: 112486 - protein, 274 aa, Unknown
  Bacterial polypetide isolated from the Sargasso Sea
MSDNTELKNKIESAWENITKISPNDTDIANAVNEVIKKLDNGQFRIAEKNGNDWIVNQWLKKAVLISFRINDNKILKGPYTSWYDKVKGKTVDWNEDQWKEAGYRHVPNGTVREGSFIGKGVVLMPSFVNIGAYIDEGTMVDTWATVGSCAQIGKNCHLSGGVGIGGVLEPLQANPVIIEDNCFVGARAEVAEGVIVREGSVLSMGVYLGASTKIVNRSTGEISYGEVPAYSVVVPGSLPNEDPKKPSLYCVVIVKTVDENTRKKTSINDLLRE

SEQ ID NO: 112487 - protein, 154 aa, Unknown
  Bacterial polypetide isolated from the Sargasso Sea
MSDLKSVIEAAFEQRASITPATVTAEVKAAVTAAIELLDSGKARVAEKIAGEWVTHQWLKKAVLLSFRINDNQVMDGAENRFFDKVPMKFADYTHERFVAEGVRVVPPAAVRKGSFVDKNVVLMPSYVNIGAYVGEGTMVDTWATVGSCAQIGK

SEQ ID NO: 112488 - protein, 267 aa, Unknown
  Bacterial polypetide isolated from the Sargasso Sea
MSLEKIINDAWEKKDQVNQNSDQSLKDAINQVIKDLDSGKSRVAEKINGEWKTHQYLKKAIMLSFRIYPMDNLSGPYSSWYDKAHLLKGKTANWTKEQHEAAGFRMTPNSPVRPGSFIGKNAVLMPCYVNIGAYIGAGTMMDTFSRAGSCCQIGENCHISAGSGIGGVLEPAQALPTIIEDNVFVGAMSEVVEGVIVREGSVLSMGCYIGQSTKIVNRSNGEVTKGHVPPYSVVVPGTHKDLYAVHIIKTVDAKTRSKTSINDLLRD

SEQ ID NO: 112489 - protein, 275 aa, Unknown
  Bacterial polypetide isolated from the Sargasso Sea
MSEIDNIKELIESSWENIADLSPENKDVIDAVDTTILKLDSGELRIAEKKDNNEWQVNQWLKKAVLISFRINENSILKGPYTSWYDKVRGKSVDWDESKWKEAGYRHVPNGTVRQGSFIGRGVVLMPSFVNIGAYIDEGTMVDTWATVGSCAQIGKNCHLSGGVGIGGVLEPLQANPVIIEDNCFVGARAEVAEGVIVREGSVLSMGVYLGASTKIVNRATGEISYGEVPSYSVVVPGTLPNEDPKKPSLYCVVIVKTVDENTRKKTSINELLRD

SEQ ID NO: 112490 - protein, 276 aa, Unknown
  Bacterial polypetide isolated from the Sargasso Sea
MSNIEKIINDAWENREKVNQNSDESLKNTINQIIDELDSGKVRVAEKINGEWITHQHIKKAIMLSFRIYPMESLSGPYSSWYDKAHLLKGKTAGWTKEDHEKAGFRMVPNSPVRKGSFVGKNVVLMPCYVNIGAYIDEGSMIDTFARAGSCCQIGKNCHISAGSGIGGVLEPAQALPTIIEDNVFVGAMSEVVEGVVVGEGSVLSMGMYIGQSTKIVNRKSGEIIYGKIPPYSVVVPGSLPDKNNPLAPSLSCAVIIKQVDEKTRSKTSINDLLRE

SEQ ID NO: 112491 - protein, 274 aa, Unknown
  Bacterial polypetide isolated from the Sargasso Sea
MSDNTELKNKIESAWENIANITPDDTDIADAVNEVIKKLDNGHFRIAEKNGNDWIVNQWLKKAVLISFRINDNKILKGPYTSWYDKVKGKTVDWNEDQWKEAGYRHVPNGTVREGSFIGKGVVLMPSFVNIGAYIDEGTMVDTWATVGSCAQIGKNCHLSGGVGIGGVLEPLQANPVIIEDDCFVGARAEVAEGVIVREGSVLSMGVYLGASTKIVNRSTGEISYGEVPAYSVVVPGSLPNEDPKKPSLYCVVIVKTVDENTRKKTSINDLLRE

SEQ ID NO: 112492 - protein, 249 aa, Unknown
  Bacterial polypetide isolated from the Sargasso Sea
MSIENIIEEAWENKDQVNQNSDQKLKDAINQVIEDLDSGKSRVAEKIDGEWVTHQHLKKAIMLSFRIHGMETLNGPYSAWRDKAHLLKGKTAGWSNDDFEKAGFRMVPNTAMRKGSYVAKNVVLMPSYVNIGAYIDEGTMMDTFSRAGSCCQIGKNCHISAGTGIGGVLEPAQALPTIIEDNVFVGAMSEVVEGVIVGEGSVLSMGMYIGQSTKIVNRKTGEVTHGKIPPYSVVVPGSLPDKNNPAAPS

SEQ ID NO: 112493 - protein, 220 aa, Unknown
  Bacterial polypetide isolated from the Sargasso Sea
MSFKTQDNVIFSSGISNTRRGQYTWFDKAFLKTSGWVEDEWTKRNFRSVPGSIVRFSAFIADNVVLMPSFVNLGAFVDSGTMIDTWATVGSCAQIGRNVHISGGAGIGGVLEPLQANPVIIEDNSFVGARSEIAEGVIVKEGSVISMGVYIGASTKIVDRETGRIFFGEVPPYSVVVPGSLPGKTLDNGEIGPNLYCAVIVKRVDAKTRSKTSINDLLRS

SEQ ID NO: 112494 - protein, 101 aa, Unknown
  Bacterial polypetide isolated from the Sargasso Sea
LPTIIEDNVFLGAMSEVVEGVIVGEGSVLSMGMYIGQSTKIVNRKTGEITYGKIPPYSVVVPGSLPDKNNSTAPSLYCAVIIKQVDEKTRSKTSINDLLRE

SEQ ID NO: 112495 - protein, 274 aa, Unknown
  Bacterial polypetide isolated from the Sargasso Sea
MNLEKIEKTINEAFEKKDKIDSSDKTLNDLVRETINLLDNGKIRVAEKKGDKWQVNQWIKKAILLSFRVNKMKASKGPYSTWYDKVDGKTQGWSEEQVKKAGFRYVPNGVIRKGAHIAKNVVLMPSFINVGAYVDEGTMIDTWASVGSCAQVGKNCHISGGAGIGGVLEPMQANPTIVEDNCFLGARAEIAEGVIVEKGSVLSMGVYIGASTRIIDRATGKIHYGKVPAYSVVVPGSVPSTNNPKGPSLYCVVIVKKVDEKTRSKTSINDLLRD

SEQ ID NO: 112496 - protein, 94 aa, Unknown
  Bacterial polypetide isolated from the Sargasso Sea
NVFLGAMSEVVEGVIVGEGSVLSMGMYIGQSTKIVNRKTGEITYGKIPPYSVVVPGSLPDKNNSSAPSLYCAVIIKQVDEKTRSKTSINDLLRE

SEQ ID NO: 112497 - protein, 275 aa, Unknown
  Bacterial polypetide isolated from the Sargasso Sea
MSVENVINEAWEKRDQINPASDQSLKDTINQVIDDLDSGKSRVAEKINGEWITHQHLKKAIMLSFRLYPMENLNGPYSSWYDKAHLLKGKTAGWTKEDHEKAGFRMVPNSPVRKGSFVGKNAVLMPCYVNIGAYIDEGTMIDTFARAGSCSQIGKNCHISAGSGVGGVLEPAQALPTIIEDNVFLGAMSEVVEGVIVGEGSVLSMGMYIGQSTKIVNRRTGEITYGKIPPYSVVVPGSLPDKNNSTAPSLYCAVIIKQVDEKTRSKTSINDLLRE

SEQ ID NO: 112498 - protein, 96 aa, Unknown
  Bacterial polypetide isolated from the Sargasso Sea
CTSTSTIIEDNVFVGALSEVVEGVIIGEGSVLSMGCYIGQSTKIINRSNGEITKGRVPPYSVVVPGAHKDLYAVHIIKTVDAKTRSKTSINDLLRE

SEQ ID NO: 112499 - protein, 274 aa, Unknown
  Bacterial polypetide isolated from the Sargasso Sea
MSENQKLKESIESAWENIASLSPSDKDVSQVVDQVIKKLDSGELRIAEKVDNQWTVNQWLKKAVLISFRINENTILRGPYTSWFDKVKGKTVDWDEDQWKAAGYRHVPNGTVREGSFIGKGVVLMPSFVNIGAYIDEGTMVDTWATVGSCAQIGKNCHLSGGVGIGGVLEPLQANPVIIEDNCFVGARAEVAEGVIVREGSVLSMGVYLGASTKIVNRATGEILYGEVPAYSVVVPGTMPNEDPAKPSLYCVVIVKTVDENTRKKTSINDLLRE

SEQ ID NO: 112500 - protein, 118 aa, Unknown
  Bacterial polypetide isolated from the Sargasso Sea
HISGGAGIGGVLEPMQANPTIVEDNCFLGARAEIAEGVIVEKGSVLSMGVYIGASTRIVDRATGEIHYGKVPAYSVVVPGSMPSKNNPKGPSLYCVVIVKKVDEKTRSKTSINDLLRD

SEQ ID NO: 112501 - protein, 275 aa, Unknown
  Bacterial polypetide isolated from the Sargasso Sea
MENEIEIIEKAFNDIEKINSNSEKEILDAINYVIEKIDDGSLRVADKTDGDWKVNEYAKKAILLYFRIKEMKLIPNGPDHSNWWDKIDPKFNSWDERKFEESGFRAVPGSIVRYGSFVGKGCVLMPSFINIGAYVDESTMVDTWATIGSCAQIGKNCHISGGAGIGGVLEPLQASPVIIEDNCFIGARSEVAEGVIVRQGSVISMGVFLTASTPIFDRKSGEVIYGEVPEYSVIVPGSMPSKNVESVANLSCAVIVKTVDEKTRSKTSINELLRD

SEQ ID NO: 112502 - protein, 275 aa, Unknown
  Bacterial polypetide isolated from the Sargasso Sea
MSIENIISEAWEKRDQITPSSDENLKNTVNQIIDDLDSGKVRVAEKIDGEWKTHQYLKKAIMLSFRMYPMENLNGPYSSWYDKAHLLKGKTAGWTKEDHEKAGFRMVPNSPVRKGSYVGKNAVLMPCYVNIGAYIDEGTMIDTFARAGSCCQIGKNCHISAGSGVGGVLEPAQALPTIIEDNVFLGAMSEVVEGVIVGEGSVLSMGMYIGQSTKIVDRKTGEITYGKIPPYSVVVPGSLPDKNNPAAPSLYCAVIIKQVDEKTRSKTSVNDLLRE

SEQ ID NO: 112503 - protein, 256 aa, Unknown
  Bacterial polypetide isolated from the Sargasso Sea
MSIEKTINEAWDNKDQINPNSNQSIKDAINQVIEDLDCGKSRVAEKINGEWVTHQYLKKAIMLSFRIYPMENLNGPYSSWFDKAHLLKGKTAGWTKEQHEAAGFRMVPNSPVRKGSFVGKNAVLMPCYVNIGAYIDSGTMIDTFARAGSCSQIGKNCHISAGSGVGGVLEPAQALPTIIEDNVFLGAMSEVVEGVIVGEGSVLSMGMYIGQSTKIVNRSTGEITYGKIPPYSVVVPGTLPDKKNPSAPSLSCAVII

SEQ ID NO: 112504 - protein, 275 aa, Unknown
  Bacterial polypetide isolated from the Sargasso Sea
MSIEKIINEAWENKDQVGQNSDKSLKDAVNQIIDDLDAGKARVAEKINGEWVTHQHLKKAIMLSFRMYPMENLNGPYSSWYDKAHLLKGKTAGWTKEDHEKAGFRMVPNSPVRKGSFIGKNAVLMPCYVNIGAYIDEGTMMDTFSRAGSCCQIGKNCHISAGTGVGGVLEPAQALPTIIEDNVFLGAMSEVVEGVIVGEGSVLSMGMYIGQSTKIVNRKTGEITYGKIPPYSVVVPGSLPDKSNPQAPSLYCAVIIKQVDEKTRSKTSVNDLLRE

SEQ ID NO: 112505 - protein, 276 aa, Unknown
  Bacterial polypetide isolated from the Sargasso Sea
MSDIEKIINDAWENKDQVNQNSDKSLRDAVNQIIDDLDSGKVRVAEKINGEWVTHQHLKKAIMLSFRMYPMENLNGPYSSWYDKAHLLKGKTAGWTKEDHQKAGFRMVPNSPVRKGSFVGKNAVLMPCYVNIGAYIDEGTMMDTFSRAGSCCQIGKNCHISAGTGVGGVLEPAQALPTIIEDNVFLGAMSEVVEGVIVGEGSVLSMGMYIGQSTKIVNRKTGEISYGKIPPYSVVVPGSLPDKKNPQAPSLYCAVIIKQVDEKTRSKTSVNDLLRE

SEQ ID NO: 112506 - protein, 274 aa, Unknown
  Bacterial polypetide isolated from the Sargasso Sea
MNLEKIEKTINEAFENKEKIDNSNKDLNDIVRETIDLLDNGKIRVAEKKGSKWQVNQWIKKAILLSFRVNKMKASKGPYSTWYDKIDGKTQGWSEEQVKKAGFRYVPNGVIRKGAHIAKNVVLMPSFINVGAYVDEGTMIDTWASVGSCAQVGKNCHISGGAGIGGVLEPMQANPTIVEDNCFLGARAEIAEGVIVEKGSVLSMGVYIGASTRIVDRATGEIHYGKVPAYSVVVPGSMPSKNNPKGPSLYCVVIVKKVDEKTRSKTSINDLLRD

SEQ ID NO: 112507 - protein, 276 aa, Unknown
  Bacterial polypetide isolated from the Sargasso Sea
MNDLEKIINSAWENKENIDQNSDQDLKHSINEIINKLDSGKVRVAEKIDGKWVTHQYVKKAIMLSFRIHPMQNLSGPYSSWYDKEHLLKGKTAGWTKEDHEKAGFRMVPNSPVRKGSYVGKNAVLMPCYVNIGAYIDEGTMIDTFARAGSCCQIGKNCHISAGSGVGGVLEPAQALPTIIEDNVFLGAMSEVVEGVIVGEGSVLSMGMFIGQSTKIVDRKTGDITYGSIPPYSVVVPGTLPDKNNKNSPSLSCAVIIKKVDEKTRSKTSINDLLRD

SEQ ID NO: 112508 - protein, 274 aa, Unknown
  Bacterial polypetide isolated from the Sargasso Sea
MSDLEKIINDAFEDRDNINVNTAGDIRNAVDETLNKLDSGSLRVCEKINNEWQVNQWIKKAILLSFRLNDNEIIKASHATWFDKVESKTANWTKDDHLKAGFRYVPDAVVRKSAFIAKGVVLMPSFVNLGAYVDEGTMIDTWATVGSCAQIGKNCHISGGAGIGGVLEPLQANPVIIEDNCFIGARSEVAEGVIVGEGAVLSMGVFIGASTKIVDRSTGEIHMGKVPAYSVVVPGTLPGKKEGDINPSLYCAVIVKRVDEKTRSKTSINDLLRD

SEQ ID NO: 112509 - protein, 275 aa, Unknown
  Bacterial polypetide isolated from the Sargasso Sea
MSLEKIINEAWENKDQVNQNSDPSLKDAINQVIDDLDSGKSRVAEKIKGEWVTHQYLKKAIMLSFRIYPMENLNGPYSSWYDKSHLLKGKTAGWTKADHEKAGFRMVPNSPVRKGSFVGRNAVLMPCYVNIGAYIDEGTMIDTFARAGSCCQIGKNCHISAGSGVGGVLEPAQALPTIIEDNVFLGAMSEVVEGVIVGEGSVLSMGMYIGQSTKIVDRKTGEITYGKIPPYSVVVPGSLPDKNNSSAPSLYCAVIIKQVDEKTRSKTSINDLLRD

SEQ ID NO: 112510 - protein, 243 aa, Unknown
  Bacterial polypetide isolated from the Sargasso Sea
MSNAILESEIEAAWSLRDTISPSTTGKVRDAIEETLEALDKGNLRVAEKTNDNAWQVNQWAKKAVLLGFRIKDMEIQSGGPQSSGWWDKVDSKFKGWSEEAWKKAGFRAVPNCIVRKSAYIAPGVVLMPSFVNLGAYVDEGTMVDTWATVGSCAQIGKNVHLSGGVGIGGVLEPMQAGPTIIEDNCFIGARSEVVEGCIVREGSVLGMGVYIGQSTKIVDRETGDVMYGEVPPYSVVVSGSMP

SEQ ID NO: 112511 - protein, 71 aa, Unknown
  Bacterial polypetide isolated from the Sargasso Sea
MGMYIGQSTKIVNRKSGEISYGKIPPYSVVVPGSLPDKNNPSAPSLSCAVIIKQVDEKTRSKTSINDLLRE

SEQ ID NO: 112512 - protein, 230 aa, Unknown
  Bacterial polypetide isolated from the Sargasso Sea
VAEKKGNSWKVNQWIKKAILLSFRVNKMKASKGPYSTWYDKIDGKTQGWSEEKIKKAGFRYVPNGVIRKGAFIAKNVVLMPSFVNVGAYVDQGSMIDTWASVGSCAQVGKNCHISGGAGIGGVLEPMQANPTIIEDDCFLGARAEIAEGVIIEKGSVLSMGVYIGASTRIVDRSTGQIHYGKVPAYSVVVPGSMPSKNNPTGPSLYCVVIVKKVDEKTRSKTSINDLLRD

SEQ ID NO: 112513 - protein, 255 aa, Unknown
  Bacterial polypetide isolated from the Sargasso Sea
PDKSLKDAVNQIIDDLDNGKVRVAEKINGEWVTHQHLKKAIMLSFRMYPMENLNGPYSSWYDKAHLLKGKTAGWTKEDHEKAGFRMVPNSPVRKGSFVGKNAVLMPCYVNIGAYIDEGTMMDTFSRAGSCSQIGKNCHISAGSGIGGVLEPAQALPTIIEDNVFVGAMSEVVEGVIVGEGSVLSMGMLITQSTKIVTRSTGEITYGKIPPYSVVVPGSLPDKNNPSAPSLSCAVIIKQVDEKTRSKTSVNDLLRD

SEQ ID NO: 112514 - protein, 282 aa, Unknown
  Bacterial polypetide isolated from the Sargasso Sea
AREFGIDLNLIQPTGPKGRILKTDLHNFVQKKLSGQESSGFKFNQPNVDYSQWGKTEEKSFTKFEKTALKNLHNSWINIPHVTQHHEIDFSLVSGIRKSKKKEKISISPLAFIVYAVSMLLKEFPLLNSSLNESLDGYISKDYVNIGIAVDTERGLMVPNIKNADKLSVQEISENINQLAQKAKNKKIKPNDLQGATFSISSLGNIGGGFFTPIINPPEVAILGLSRTYQKPYLTSSKSLKEKEVLPVSLSYDHRLINGVYGAKFVTSLDAILQDNKLFEKI

SEQ ID NO: 112515 - protein, 229 aa, Unknown
  Bacterial polypetide isolated from the Sargasso Sea
KDIPRVKKLSSKYLSNSWTTIPHVTNHDEADITEMESFRNSLTDIYTGEKIKITPLAFIVKALVATLKKFPSFNSSIDEIETGKMTMKKYYHIGIAVDTPNGLMVPKIRNANNKKISHISRELREVSELCRNLKIDKKELFGGSMTITSLGGIGGSFFTPIINYPEVAILGVGRSEKKQIYINGKFQIRTMLPISLSYDHRIIDGAEAARFNNDLKENLGKNFAYKLAV

SEQ ID NO: 112516 - protein, 189 aa, Unknown
  Bacterial polypetide isolated from the Sargasso Sea
SLTDIYTGEKIKITPLAFIIKALVASLKKFPSFNSSIDEIEIGKMTLKKYYHIGIAVDTPNGLMVPKIRNANNKKISLISKELKEVSELCRNLKIDKKELFGGSMTITSLGGIGGSFFTPIINYPEVAILGVGRSEKKKIFMNGKFQTRTMLPISLSYDHRIIDGAEAARFNNDLKENLGKNFAYKLAV

SEQ ID NO: 112517 - protein, 282 aa, Unknown
  Bacterial polypetide isolated from the Sargasso Sea
NEASKEKQPPEVKPAVQSPQNTPQNTPQEQQERSGDGVYASPGVRRLARELNINLSTLSGSGSKGRITKNDLHAYIKAQMYSKNLPNIYSQQEIDFSQWGDINVKKLTKIKTITGKRLSSAWQTIPHVTQFVEADVTELESVRKKQKDKHIKDGIKITMMPYLMKAAVNVLKTHPVFNSSIQNDGLNIVFKKYYNIGVAVDTKDGLVVPVIKDVDKKDIVQLSKELMDISERARNKQLLVDELKGGTFTISNLGGIGGSFFTPIINPPEVAILGVSRTKIEN

SEQ ID NO: 112518 - protein, 126 aa, Unknown
  Bacterial polypetide isolated from the Sargasso Sea
MVPKIRNANNKKISLISKELREVSELCRNLKIDKKELFGGSMTITSLGGIGGSFFTPIINYPEVAILGIGRSEKKQVFLNGKFQVRTMLPLSLSYDHRIIDGAEAARFNNDLKENLGKNFAYKLAV

SEQ ID NO: 112519 - protein, 284 aa, Unknown
  Bacterial polypetide isolated from the Sargasso Sea
DIYKVKGSERDGRVIDNDIKLFVSKNSKQIKKIDSQKDEKNELEYAHSEFGEIEIKDIPRVKKLSSKYLINSWSKIPHVTNHDEADITEMEEFRNSLTNMYTGERKKITPLAFIVKALSVTLKKFPNFNSSIDEIDSGKITIKKYYHIGIAVDTPHGLMVPKLRNVKDKKISLIADELKKISDECKNLKIDKKELFGGSMTITSLGGIGGSFFTPIINYPEVAILGIGKSEKKQIYINGKFEIRIMLPLSLSYDHRIIDGAEAARFNNELKENLGKNFAYKLAV

SEQ ID NO: 112520 - protein, 241 aa, Unknown
  Bacterial polypetide isolated from the Sargasso Sea
YDHADFGDVEIQDIPRIKRIAAPHLSNSWQTIPHVTSCDEADITELEEFRQNLTDTFTGEKKKITPLAFIIKAVVEALKVFPRFNSSIDNIENGKITLKKYFHVGIAVDTPNGLMVPKIRNANQKNIDQISKDLKKVSDDCRNLKIDKKEFYGGSITITSLGGIGGTYFTPIINYPEVAILGIGRTYIKPVFIDGQFKPRTMLPLSLSYDHRIIDGAEGSRFNNELKNNLGKNFAYKLAKQ

SEQ ID NO: 112521 - protein, 323 aa, Unknown
  Bacterial polypetide isolated from the Sargasso Sea
EKQQGNTQKSDRQFFNTSFNTVHASPSVRKLGRELGVDLNQVNGSGMKGRILPEDLKSFVKSVMSGHAPNVQSALPELPEVDHSAFGEIESVPLSRIKKISGPRLQASWINIPHVTQHDEADINQLEQLRLDLKKSYAKDGISLSILPFIIMAVCKLLREFPDFNSSLDDKHSALIHKKYINIGFAANTDQGLMVPVIKDADQKSLKEISLELIRLSEDARSGKIQINDLQGGTFTISSLGGFGGVGFTPIINPPEVAILGVARAQIRPIMIKGKFLPRLILPLSLSYDHRVIDGVGGIQFTSALKELLENPESYLSEEISIG

SEQ ID NO: 112522 - protein, 89 aa, Unknown
  Bacterial polypetide isolated from the Sargasso Sea
FGGSMTITSLGGIGGNYFTPIINYPEVAILGIGKLEKKQKFIKGEFKTRTILPLSLSYDHRIIDGAEAARFNNELKENLGKNFAYRLAI

SEQ ID NO: 112523 - protein, 108 aa, Unknown
  Bacterial polypetide isolated from the Sargasso Sea
DLRLISDKCRKLKIDKKEFFGGSMTITSLGGIGGTYFTPIINYPEVAILGIGKLTKKKIYFDDGFKTRTILPLSLSYDHRIIDGAEAARFNNELKKNLGKNFAYNLSN

SEQ ID NO: 112524 - protein, 240 aa, Unknown
  Bacterial polypetide isolated from the Sargasso Sea
FKHSEFGEVEIKEIPRVKKIAAPHLLNSWQTIPHVTHHDEADVTELEEFRTSLTDINTGEKKKMSPLVFIIKSLVATMKKYPSFNSSIDEINEGKMTLKKYFHIGIAVDTEHGLMVPKIRDVNKKNLNQISLELKEVSEKCRKLKIDKKEFFGGSMTITSLGGIGGSFFTPIINYPEVAILGVGRSYYKQVLIDNEFQKRIMLPLSLSYDHRIIDGAEAARFSNELKENLGKNFAYKLAL

SEQ ID NO: 112525 - protein, 129 aa, Unknown
  Bacterial polypetide isolated from the Sargasso Sea
NGLMVPKIRNANNKKISLISKELKEVSELCRNLKIDKKELFGGSMTITSLGGIGGSFFTPIINYPEVAILGVGRSEKKQIFMNGKFQTRTMLPISLSYDHRIIDGAEAARFNNDLKENLGKNFAYKLAV

SEQ ID NO: 112526 - protein, 183 aa, Unknown
  Bacterial polypetide isolated from the Sargasso Sea
MGEKIKITPLAFIIKALVASLKKFPIFNSSIDEIETGKMTLKKYYHIGIAVDTPNGLMVPKIRNANNKKISLISKELKKVSELCRNLKIDKKELFGGSMTITSLGGIGGSYFTPIINYPEVAILGIGRSEKKQIFMNGKFQIRTILPISLSYDHRIIDGADAARFNNEIKENLGKNFAYKLAV

SEQ ID NO: 112527 - protein, 252 aa, Unknown
  Bacterial polypetide isolated from the Sargasso Sea
SKDSKPDKIKNEFEHSDFGEIEIKDIPRVKKLSSKYLINSWTTIPHVTNHDEADITEMESFRSSLTDIYTGEKIKITPLAFIIKALVASLKKFPSFNSSIDEIETGKMTLKKYYHIGIAVDTPNGLMVPKIRNANNKKISLISKELKEVSELCRNLKIDKKELFGGSMTITSLGGIGGSFFTPIINYPEVAILGVGRSENKQIFINGKFQTRTMLPISLSYDHRIIDGAEAARFNNDLKENLGKNFAYKLAV

SEQ ID NO: 112528 - protein, 169 aa, Unknown
  Bacterial polypetide isolated from the Sargasso Sea
KALTASLKKFPNFNSSIDDIDNGKMTVKKYYHIGIAVDTPHGLMVPKLRNADNKNINLISSELKKISEQCRNLKIDKKELFGGSMTITSLGGIGGSFFTPIINYPEVAILGVGKSQKKQVFLDGKFVIRTILPLSLSYDHRIIDGAEAARFNNDLKENLGKNFAYKLAV

SEQ ID NO: 112529 - protein, 175 aa, Unknown
  Bacterial polypetide isolated from the Sargasso Sea
TFLPFLLKAVITVLKEIPKFNSSLDHTGENLVLKQYYHIGIAVDTPHGLTVPVVKDVDKKDIFELSKDLMVLSEKARNKKLKPEDLQGSTFTVSSLGGIGGTAFSPIVNPPEVAILGVSKSEWRPVYDLKTEEFIPRYIMPFSISYDHRVVDGAAGASFVERFSQALKDTDSMVG

SEQ ID NO: 112530 - protein, 170 aa, Unknown
  Bacterial polypetide isolated from the Sargasso Sea
IAKALVSALKKFPNFNASIDSANDKIIYKKYFHVGFAVDTPHGLMVPKIRDVDQMSIKEIGSALRKTSRLCRDLKIDKKEFFGGSMTISSLGGIGGTFFTPIINPPEVAILGVGKSFDRLVKVNDKFVSRKILPISLSYDHRIIDGAEGARFCVYLGKCLGKDFAFKLAV

SEQ ID NO: 112531 - protein, 158 aa, Unknown
  Bacterial polypetide isolated from the Sargasso Sea
SNFNASIDINQNKIIYKKYFHLGFAVDTPHGLMVPKIRNVDQMSIKEIGEALKKTSKLCRELKIDKKEFFGGSMTISSLGGIGGTFFTPIINPPEVAILGIGKSFDKLVKLKGKIVSRKILPISLSYDHRIIDGAEGARFCVYLGECLGKDFAFNLAV

SEQ ID NO: 112532 - protein, 88 aa, Unknown
  Bacterial polypetide isolated from the Sargasso Sea
GGSMTITSLEGIGGSFFTPIINYPEVAILGIGKSEKKQVFLDGKFVTRTMLPLSLSYDHRIIDGAEAARFNNDLKENLGKNFAYKLAV

SEQ ID NO: 112533 - protein, 108 aa, Unknown
  Bacterial polypetide isolated from the Sargasso Sea
ELKEVSELCRNLKVDKKELFGGSMTITSLGGIGGSFFTPIINYPEVAILGVGRSEKKQIFMNGKFQTRTMLPISLSYDHRIIDGAEAARFNNDLKENLGKNFAYKLAV

SEQ ID NO: 112534 - protein, 156 aa, Unknown
  Bacterial polypetide isolated from the Sargasso Sea
YSSIDEIETGKMTLKKYYHIGIAVDTPNGLMVPKIRNANNKKISLISKELKEISELCRNLKIDKKELFGGSMTITSLGGIGGSFFTPIINYPEVAILGVGRSEKKQIFMNGKFQTRTMLPISLSYDHRIIDGAEAARFNNDLKENLGKNFAYKLAV

SEQ ID NO: 112535 - protein, 274 aa, Unknown
  Bacterial polypetide isolated from the Sargasso Sea
LKGSERNGRITEEDVKNFIKNSKKSIPVKETPKPEPKKNLVDHSEFGEIEIVEMPRVKRLAAPLLSESWRTIPHVTHHDEADITELENFRKNLKDGYTGEQKKITPLAFIIKALVKSMMKYPIFNSSIKDEENYQIILKKYFHIGIAVDTPHGLMVPKIRDADKFKISDLSQKLKEVSDKCRNLKIDKKEFQGGSITITSLGGIGGTFFTPIINPPEVAILGIGKIFQKDKSDKLILPLSLSYDHRIINGADAARFCNEIKENLGKNFAYNLSI

SEQ ID NO: 112536 - protein, 250 aa, Unknown
  Bacterial polypetide isolated from the Sargasso Sea
MKEDIKVKSEFDHSDFGEVKIIDIPRVKRLAAPHLSNSWNTIPHVTHHDEADITELEDFRAKLTDPFSGDKIKITPLAFIAKALTNNLKKFPTFNSSIDNISEGKITLKNYFHIGIAVDTKHGLMVPKIRNVDQKKIKEIAEELKKVSDLSKNLKINKKEFFGGSITITSLGGIGGTYFTPIINYPEVAILGVGRSYKKQIFIKDKFLARTVLPISLSYDHRIIDGAEAAKFCNSLKENLGKNFAYNLAF

SEQ ID NO: 112537 - protein, 212 aa, Unknown
  Bacterial polypetide isolated from the Sargasso Sea
SWTEIPHVTQHDQIDITEMEQFRTSLFDHFTGEKISVTPLAFITRAVVNALKDFPNFNCSIDTNQNKIVYKKYYHVGFAVDTPHGLMVPKLRDVDQMNIKEIGDELRRVSRECRDLKINKKEFFGGSMTISSLGGIGGTFFTPIINPPEVAILGVGKSFDRLVRIKGQIVSRKILPISLSYDHRIIDGAEGARFCVHLNKSLGKDFAFKLAV

SEQ ID NO: 112538 - protein, 289 aa, Unknown
  Bacterial polypetide isolated from the Sargasso Sea
IEPQKPKEIIPIAPTSQSGSKSASPKVRKFARELGANVVEIPGSQRGGRVSEEDVKNFVRSQVTVSGGKIEKKVHKEEYPHEEFGEIELKDIPRVKRLSGPHLVRSWTEIPHVTQHDEVDITEMEQFRSSLYDYYTGEKIKVTPLAFIAKALVSALKKFPNFNASIDSANDKIIYKKYFHVGFAVDTPHGLMVPKIRDVDQMSIKEIGSALRKTSRLCRDLKIDKKEFFGGSMTISSLGGIGGTFFTPIINPPEVAILGVGKSFDRLVKVNDKFVSRKILPISLSYDHR

SEQ ID NO: 112539 - protein, 177 aa, Unknown
  Bacterial polypetide isolated from the Sargasso Sea
MSPLVFIIKSLVAALKKYPNFNSSIEEISEGKMTLKKYFHIGIAVDTEHGLMVPKIRNVDKKNLNQIYSELKDISDKCRKLKIDKKEFFGGSMTITSLGGIGGSFFTPIINYPEVAILGVGKNYYKQVLVKDQFQKRIMLPLSLSYDHRIIDGAEAARFSNELKENLGKNFAYKLAI

SEQ ID NO: 112540 - protein, 187 aa, Unknown
  Bacterial polypetide isolated from the Sargasso Sea
KDNYTGERIKITPLAFIIKALVLSLKKFPSFNSSIDDIENGKITFKKYFHVGIAVDTQHGLMVPKIRDANQKDINQLSEELKKVSDDCRNLKIDKKEFFGGSMTITSLGGIGGSFFTPIINFPEVAILGVGRSYKKQVFIDGKFVPRTMLPLSLSYDHRIIDGAEAAKFNNELKDNLGSNFAYNLSK

SEQ ID NO: 112541 - protein, 218 aa, Unknown
  Bacterial polypetide isolated from the Sargasso Sea
GPHLVRSWTEIPHVTQHEEIDITEMEQFRSSLYDYYTGEKIKVTPLAFIAKALVSALKEFPNFNASIDMSSGKIIYKKYFHIGFAVDTPHGLMVPKLRDAEQLSIQEIGEELKKISKLCRDLKIDKKEFFGGSMTISSLGGIGGTFFTPIINPPEVAILGVGKSFDKLIKLKGKIVSRKILPISLSYDHRIIDGAEGARFCVYLGECLGKDFAFKLAV

SEQ ID NO: 112542 - protein, 109 aa, Unknown
  Bacterial polypetide isolated from the Sargasso Sea
MELKKLSDQCRNLKIDKKELFGGSMTITSLGGIGGSFFTPIINYPEVAILGVGKSQKKQIFIDGKFITRTILPLSLSYDHRIIDGAEAARFNNDLKDNLGKNFAYKLAV

SEQ ID NO: 112543 - protein, 282 aa, Unknown
  Bacterial polypetide isolated from the Sargasso Sea
ELGADISNLKGSERNGRITEEDVKNFIKNSKKNILVKETQKPEPKKNLVDHSEFGEIEIVEMPRVKRLAAPLLSESWRTIPHVTHHDEADVTELENFRKNLKDGYTGEQKKITPLAFIIKALVKSMMKYPIFNSSIKDEENYQIILKKYFHIGIAVDTPHGLMVPKIRDADKFKISDLSQKLKEVSDKCRNLKIDKKEFQGGSITITSLGGIGGTFFTPIINPPEVAILGIGKIFQKDKSDKLILPLSLSYDHRIINGADAARFCNEIKENLGKNFAYNLSI

SEQ ID NO: 112544 - protein, 292 aa, Unknown
  Bacterial polypetide isolated from the Sargasso Sea
KFARELGVNINQVLGSERDGRVVEKDIKNFVSSKIINDSKTKENKKNNIKNDFEHSDFGEIEIKNIPRVKKLASTYLVNSWTTIPHVTNHDEADITEMENFRSSLTDIYTGEKIKITPLVFIIKALVASLKKFPNFNSSIDDIENGKMTLKKYYHIGIAVDTSNGLMVPKIRNVDNKKILLLSNELKKVSELCKNLKIDKKELFGGSMTITSLGGIGGSFFTPIINYPEVAILGVGKSQKKQILINGKFQTRTMLPISLSYDHRIIDGAEAARFNNDLKENLGSNFAYKLAI

SEQ ID NO: 112545 - protein, 180 aa, Unknown
  Bacterial polypetide isolated from the Sargasso Sea
KKKITPLVLFIKSLTIALRNFPNFNSSIEDIENGKMTLKKYSHIGVAIDTKHGLMVPKIRNVDKKNLNQISKELKDISEKCRELKIDKKEFFGGSITVTSLGGIGGSFFTPIINYPEVAILGVGRTYLKQVYINEKFQKRFILPLSLSYDHRIIDGAEAARFCNDLKNNLGKNFAYKLAI

SEQ ID NO: 112546 - protein, 244 aa, Unknown
  Bacterial polypetide isolated from the Sargasso Sea
IKKEFDHSEFGEVQIIDMPRVKRLAAPHLSNSWNTIPHVTHHDEADITELDDFRSKLIDSVSGDIIKITPLAFIAKALANNLKKFPTFNSSIDNINDAKITLKKYIHIGIAVDTPHGLMVPKIRNVDQKKIKEIAQELKKVSELSRNLKINKKEFFGGSITITSLGGIGGTYFTPIINYPEVAILGVGRSYKKQIFIKDKFLVRTVLPLSLSYDHRIIDGAEAAKFCNLLKENLGKNFAYNLAF

SEQ ID NO: 112547 - protein, 137 aa, Unknown
  Bacterial polypetide isolated from the Sargasso Sea
SGIAVDTPNGLMVPKIRNANNKKISLLSKELKEVSELCRNLKIDKKELFGGSMTITSLGGIGGSFFTPIINFPEVAILGVGKSQKKQILIDGKFQIRTMLPLSLSYDHRIIDGAEAARFNNDLKENLGRNFAYKLAI

SEQ ID NO: 112548 - protein, 257 aa, Unknown
  Bacterial polypetide isolated from the Sargasso Sea
LGGSAPSASAASGEGLDLLPWPKVDYEKFGETERVPLSRIARLSGPNLARNATIIPHVTNFEEADITELEAFRKSLNADSRDGLKLSILPFVVKAAAATLRQHPKFNSSLDGNSLVLKKYFNIGVAADTPEGLVVPVVKAADQKGIIEIAAEMVELAAQARAGRLKPQDMQGATFTISSLGGIGGTSFTPIINAPEVAILGMTRARMQPVWNGEDFEPRLIQPLSMSWDHRAVDGVAAARFLVTLKVILSDFRRITL

SEQ ID NO: 112549 - protein, 250 aa, Unknown
  Bacterial polypetide isolated from the Sargasso Sea
MITTVDLPQVGESVTEGVIGKWLVSPGQWVDRYDPIVEVVTDKVSMEIPSPFAGVFIKALVEEGEVVPMGSPICEIEDQNAITQDDEKTPPSKFEFMDSVRSVGPTGSGEGGEGRRDALQESMQPEHQLPHMYQEVASAQDRKKVISPLVAKIAMQNNIDVANLIGSGIGGRVTKKDIEDYISEKEIALGLPNQNEQPETSKIHISAIRRSIADHMSRSASEIPSAWSMVELDVTGLVELRSKLKGQFES

SEQ ID NO: 112550 - protein, 183 aa, Unknown
  Bacterial polypetide isolated from the Sargasso Sea
YWRKIKITPLAFIIKALVISLKKFPSFNSSIDDIENGKITFKKYFHIGIAVDTQHGLMVPKIRDADQKDINELSKDLKKVSDDCRNLKIDKKEFFGGSMTITSLGGIGGSFFTPIINFPEVAILGIGRSYKKQLFIDGKFVPRTILPLSLSYDHRIIDGAEAAKFNNELKDNLGANFAYNLSK

SEQ ID NO: 112551 - protein, 295 aa, Unknown
  Bacterial polypetide isolated from the Sargasso Sea
LENLQENLGVDINNVKGTERSGRIVEKDLKDFVSSRINHPQNNSERQKEKIIKSEYQHSDFGEVEIKDIPRVKKIAAPHLVNSWTNIPHVTNHDEADITEMEEFRNSIKDNYTGEKIKITPLAFIIKALVLSLKKFPSFNSSIDDIENGKITFKKYFHVGIAVDTQHGLMVPKIRDANQKDINQLSEELKKVSDDCRNLKIDKKEFFGGSMTITSLGGIGGSFFTPIINFPEVAILGVGRSYKKQVFIDGKFVPRTMLPLSLSYDHRIIDGAEAAKFNNELKDNLGSNFAYNLSK

SEQ ID NO: 112552 - protein, 147 aa, Unknown
  Bacterial polypetide isolated from the Sargasso Sea
DKIIYKKYFHVGFAVDTPHGLMVPKIRDVDQMSIKEIGSALRKTSRLCRDLKIDKKEFFGGSMTISSLGGIGGTFFTPIINPPEVAILGVGKSFDRLVKVNDKFVSRKILPISLSYDHRIIDGAEGARFCVYLGKCLGKDFAFKLAV

SEQ ID NO: 112553 - protein, 163 aa, Unknown
  Bacterial polypetide isolated from the Sargasso Sea
LKKFPTFNCSIDSIDDGKMTLKKYFHIGIAVDTEHGLMVPKIRNVNRKKIGEINNELKIVSDKCKKLKIDKKEFFGGSMTITSLGGIGGSFFTPIINYPEVAILGIGKLRKKQVFINDKFEARIMLPLSLSYDHRIIDGAEAARFNNELKENLGKNFAYKLAI

SEQ ID NO: 112554 - protein, 183 aa, Unknown
  Bacterial polypetide isolated from the Sargasso Sea
MGEKKKITPLAFIVKALTASLKKFPNFNSSIDEIEKGKMTIKKYYHIGIAVDTPHGLMVPKLRNADNKNISLIGEELKKLSNECRNLKIDKKELFGGSITITSLGGIGGSFFTPIINYPEVAILGVGKSEKKQVHIDGKFVTRIMLPLSLSYDHRIIDGAEAARFNNELKENLGKNFAYKLAI

SEQ ID NO: 112555 - protein, 297 aa, Unknown
  Bacterial polypetide isolated from the Sargasso Sea
PPKVRKFARELGVDINRVSVSERQGRVTESDIKLFVSNRSSQKKEFKIKNEEKIKLEYSHSEFGKIETKDIPRVKKLSSKYLMNSWSNIPHVTNHDEADITEMEEFRNSLTDIYTGEKKKITPLAFIIKALTSSLKKFPNFNSSIDEIEKGKMTIKKYYHIGIAVDTPNGLMVPKLRNANNKNISSIADELKELSEQCRSLKIDKKELFGGSMTITSLGGIGGSFFTPIINFPEVAILGIGKSQRKQVFIEGKLVTRTMLPLSLSYDHRIIDGAEAARFNNELKENLGKNFAYKLAV

SEQ ID NO: 112556 - protein, 175 aa, Unknown
  Bacterial polypetide isolated from the Sargasso Sea
PLAFIIKAVTSALKKFPSFNCSIDSIEDGKMTLKKYFHIGIAVDTEHGLMVPKIRNVNEKKIGEINNELKVLSDQCRKLKIDKKEFFGGSITITSLGGIGGSFFTPIINYPEVAILGIGKLRKKQVFINDKFEARIMLPLSLSYDHRIIDGAEAARFNNELKENLGKNFAYKLAI

SEQ ID NO: 112557 - protein, 100 aa, Unknown
  Bacterial polypetide isolated from the Sargasso Sea
CRNLKIDKKEFFGGSMTITSLGGIGGSFFTPIINFPEVAILGIGRSYKKQLFKDGKFVPRTILPLSLSYDHRIIDGAEAAKFNNELKDNLGANFAYNLSK

SEQ ID NO: 112558 - protein, 174 aa, Unknown
  Bacterial polypetide isolated from the Sargasso Sea
MAFIVKALTASLKKFPNFNSSIDDIDGGKMTVKKYYHIGIAVDTPHGLMVPKLRNAENKNINLISSELKNLSDQCRNLKIDKKELFGGSMTITSLGGIGGSFFTPIINFPEVAILGIGRSEKKQVFLDGKFVTRTMLPLSLSYDHRIIDGAEAARFNNELKENLGKNFAYKLAI

SEQ ID NO: 112559 - protein, 106 aa, Unknown
  Bacterial polypetide isolated from the Sargasso Sea
REVAQKCRDLKIDKKEFYGGSITISSLGGIGGSFFTPIINYPEVAILGVSKSHKKQIFIGDQFKVRTILPISLSYDHRIIDGAEAARFCNELRDNLGKNFAFKLAI

SEQ ID NO: 112560 - protein, 182 aa, Unknown
  Bacterial polypetide isolated from the Sargasso Sea
MEQFRSSLYDYYTGEKIKVTPLAFIAKALVSALKKFPNFNASIDSANDKIIYKKYFHVGFAVDTPHGLMVPKIRDVDQMSIKEIGSALRKTSRLCRDLKIDKKEFFGGSMTISSLGGIGGTFFTPIINPPEVAILGVGKSFDRLVKVNDKFVSRKILPISLSYDHRIIDGAEGARFCVYLGK

SEQ ID NO: 112561 - protein, 129 aa, Unknown
  Bacterial polypetide isolated from the Sargasso Sea
NGLMVPKIRNANNKKISLISKELKEVSELCRNLKIDKKELFGGSMTITSLGGIGGSFFTPIINYPEVAILGVGRSEKKKIFMSGKFQTRTMLPISLSYDHRIIDGAEAARFNNDLKENLGKNFAYKLAV

SEQ ID NO: 112562 - protein, 82 aa, Unknown
  Bacterial polypetide isolated from the Sargasso Sea
RVLGGIGGSFFTPIINYPEVAILGVGKLRKLHLYTDGKYNERIMLPLSLSYDHRIIDGAEAARFNNELKENLGKNFAYRLAL

SEQ ID NO: 112563 - protein, 188 aa, Unknown
  Bacterial polypetide isolated from the Sargasso Sea
LTDMYTGEKIKITPLAFIIKALVASLKKFPSFNSSIDEIEIGKMTLKKYYHIGIAVDTPNGLMVPKIRNANNKKISLISKELKEVSELCRNLKIDKKELFGGSMTITSLGGIGGSFFTPIINYPEVAILGVGRSEKKQIFVNGKFQTRTMLPISLSYDHRIIDGAEAARFNNDLKENLGKNFAYKLAV

SEQ ID NO: 112564 - protein, 183 aa, Unknown
  Bacterial polypetide isolated from the Sargasso Sea
MGEKIKITPLAFIIKALVASLKKFPSFNSSIDEIETGKMTLKKYYHIGIAVDTPNGLMVPKIRNANNKKISLISKELKEVSELCRNLKIDKKELFGGSMTITSLGGIGGSFFTPIINYPEVAILGVGRSEKKQIFMNGKFQTRTMLPISLSYDHRIIDGAEAARFNNDLKENLGKNFAYKLAV

SEQ ID NO: 112565 - protein, 257 aa, Unknown
  Bacterial polypetide isolated from the Sargasso Sea
KFNDSKNRIKDKLIKIEYEHSDFGEIEIKDIPRVKKIAAPHLSNSWTNIPHVTNHDEADITELEELRSSLVDKFTGKRKKITPLAFIMKAIVLSLKKFPRFNSSIDDIENGKITLKKYFHIGIAVDTPHGLMVPKIRNVNEKDINQLSRELKKVSDDCRNLKIDKKEFFGGSITITSLGGIGGSFFTPIINYPEVAILGIGRSYKKQLFVDGEFIPRTILPLSLSYDHRIIDGAEAARFNNDIKYNLGPNFAYNLRK

SEQ ID NO: 112566 - protein, 210 aa, Unknown
  Bacterial polypetide isolated from the Sargasso Sea
MTVAPIQIPDIGGAEGAEIVEVLVAPGDVIEEEQSLIVVESDKASMEIPAPQAGVVAELRVAVGDKVSEGDVILLLEGAHESTACDDTAGGEDAPSPAAVDVLQSVATATNAGSNEEHTATTQTQTSTPDTTNEVTSIDVVIPDLGSDEGADLVELLVAVGAKVEEGDSLVLLESDKASMEVPSPATGILAAWLTDTGSTVTEGTVIARL

SEQ ID NO: 112567 - protein, 305 aa, Unknown
  Bacterial polypetide isolated from the Sargasso Sea
IEEPRYESTASGIYAGPAVRKLAREFGIDLNKVIATGPRNRILKEDLHKFVKSKLEGSSTGIPKMPSIDFSEFGNVEEIDLTKFQKTSALNLQQSWITIPHVTQHDETSIDELLTVRKSLMKKHKVKVSPLAFFAKGVCKLLEEFPLFNASIDMNTMKIIKKDYINLGIAVDTPQGLIVPNIKSADKMSIREISDEIARLAALSKSRKIKVDDLKGSTFTISSLGSFGGKFFTPIINPPEVAILGISKSYDSVLLKGTKPVSTTNLPISLSYDHRIINGVEGVKLQQDFVKFFQILVTLRRIFNF

SEQ ID NO: 112568 - protein, 92 aa, Unknown
  Bacterial polypetide isolated from the Sargasso Sea
KEFFGGSITITSLGGIGGTYFTPIINYPEVAILGIGRSYKKEIFIKDKFLARTVLPISLSYDHRIIDGAEAAKFCNLLKENLGKNFAYNLAF

SEQ ID NO: 112569 - protein, 88 aa, Unknown
  Bacterial polypetide isolated from the Sargasso Sea
VGSMTITSLGGIGGSFFTPIINYPEVAILGVGKSEKKQIYIDGKYVNRIMLPLSLSYDHRIIDGAEAARFNNELKENLGKNFAYKLAV

SEQ ID NO: 112570 - protein, 295 aa, Unknown
  Bacterial polypetide isolated from the Sargasso Sea
SKKKHFSKNNISEISSASPKARKFARELGVDINQVAGTQRDGRVVEDDIKKFVSSNSKNNVVVKDSKPDKIKNEFEHSDFGEIEIKDIPRVKKLSSKYLTNSWTTIPHVTNHDEADITEMESFRSSLTDMYTGEKIKITPLAFIIKALVASLKKFPSFNSSIDEIETGKMTLKKYYHIGIAVDTPNGLMVPKIRNANNKKISLISKELKEVSELCRNLKIDKKELFGGSMTITSLGGIGGSFFTPIINYPEVAILGVGRSEKKQIFMNGKFQTRTMLPISLSYDHRIIDGAEAAR

SEQ ID NO: 112571 - protein, 193 aa, Unknown
  Bacterial polypetide isolated from the Sargasso Sea
SSDHHLQTSILGEKKKVSPLVFIIKSLVIALKKYPNFNSSIEEIDEGKMTLKNYFHIGIAVDTEHGLMVPKIRNVNKKNLNQISIELKDISEKCRKLKIDKKEFFGGSMTITSLGGIGGSFFTPIINYPEVAILGVGKNYYKQVLIKDKFQKRIMLPLSLSYDHRIIDGAEAARFSNELKENLGKNFAYKLAI

SEQ ID NO: 112572 - protein, 260 aa, Unknown
  Bacterial polypetide isolated from the Sargasso Sea
SKSKKNVIHQNKNIPKIEQEYPHSEFGEIEIKDIPRVKKLSSKYLMNSWSKIPHVTNHDEADITELEEFRTSLTDIYTGEKKKITPLAFIVKALTASLKKFPNFNTSIDQIETGKMTIKKYYHVGIAVDTPSGLMVPKLRNTNNKNVSLISKELKKISQECRDLKIDKKELFGGSMTITSLGGIGGSFFTPIINFPEVAILGVGKSEKKQVFCDGRFVTRTMLPLSLSYDHRIIDGAEAARFNNDLKENLGKNFAYKLAV

SEQ ID NO: 112573 - protein, 255 aa, Unknown
  Bacterial polypetide isolated from the Sargasso Sea
RELGVDLSQVEGTGRKGRITQQDVQIFVKQVLVEFSSGGPKASLAAIPEIPEVDFSKFGSVEIQPLSRIKKKTGFNLNRAWLNLPIVTHHDDADITELEHFRKSLSDEAVKKDVKLTLLSFLLKACAVAIRKHPTFNSSLSADKENLVIKHYLNIGVAVDTSDGLVVPVIKNVEKKGLLELAKELDEVSKRARTKKLNKSDIEGGCFSISSLGGIGGTAFTPLVNAPEVAILGVTRSRMVPVWNGKAFIPRLVLP

SEQ ID NO: 112574 - protein, 284 aa, Unknown
  Bacterial polypetide isolated from the Sargasso Sea
PPPAAIKTTKRGTKLASPIVRKFARELGANVLEIPGSQRSGRVSEEDVKEFVRSQVTVNKGTVEKKENKEEFAHEEFGQIEIKEIPRVKRLSGPHLVRSWTEIPHVTQHEEIDITEMEQFRSSLYDYYSGEIMKVTPLAFISKALVSALKTFPNFNASIDTNENKIIYKKYFHLGFAVDTPHGLMVPKIRNVDQMNIKEIAEALKKTSKLCRELKIDKKEFFGGSMTISSLGGIGGTFFTPIINPPEVAILGIGKSFDKLLKIKGRIVSRKILPISLSYDHRII

SEQ ID NO: 112575 - protein, 171 aa, Unknown
  Bacterial polypetide isolated from the Sargasso Sea
MKAAVENLKAMPEFNSSMNHSAETLIIKKYFNIGIAVDTPTGLVVPVIQNVDQKSIDELSIELVEISKKARAKKLTPDDMTGGTFTISSLGGIGGTYFTPIINPPEVAILGVSKSRWEKIYNHKEQSSSAAYVMPFSLSYDHRIIDGAAAAKFTGDFGKSVETLSFLEKSK

SEQ ID NO: 112576 - protein, 181 aa, Unknown
  Bacterial polypetide isolated from the Sargasso Sea
GEKISITPLAFITRAVVNALKDFPNFNCSIDSEKNKITYKKYYHIGFAVDTPHGLMVPKIRNVDQMNIKEISNELRKVSRECRDLKINKKEFFGGSMTISSLGGIGGTHFTPIINPPEVAILGVGKSYEKLSRFNGKIIFRKILPISLSYDHRIIDGAEGARFCVHLRNSLGKDFAFKLAV

SEQ ID NO: 112577 - protein, 234 aa, Unknown
  Bacterial polypetide isolated from the Sargasso Sea
FGEIEIKELSRIKKISGPQLVRSWTEIPHVTQHDEIDITEMEKFRSSLFDYYTGEKISVTPLAFITRAVVNALKDFPNFNCSINPTNNQVVYKKYFHIGFAVDTPHGLMVPKIRDVEKMSIKEIGEELKTVSKKCRDLKIDKKEFFGGSMTISSLGSIGGTFFTPIINPPEVAILGVGRSYNKMVKVNGKIVSRKILPISLSYDHRIIDGAEGARFCVHLNESLGKDFAFKLAV

SEQ ID NO: 112578 - protein, 286 aa, Unknown
  Bacterial polypetide isolated from the Sargasso Sea
KFARELGIDVRDVVGSERLGRVIEKDIKEFVSSKLNNKENININKEYDHSEFGKVEIKEISRIKRIAAPHLVNSWKNIPHVTNHDEADITEMEEFRNSLTDIYTGEKKKITPLAFIIKAVVSSLRKFPTFNSSIDDIENGKITLKKYFHIGIAVDTFHGLMVPKIRNVDKKNINQISEELKKLSEDCRNLKIDKKEFFGGSITITSLGGIGGSFFTPIINYPEVAILGVGKSYKKQLFIKEKFTTRTVLPLSLSYDHRIIDGAEAARFNNDLKDNLGRNFAYKLAI

SEQ ID NO: 112579 - protein, 259 aa, Unknown
  Bacterial polypetide isolated from the Sargasso Sea
PKKSLFDLFDSSISLNKKIHKLILDFEGETRDFEYFTINNIPFDEPVLTDAELKDYFTENEKNFRVPKSIILDLIQINYQDFANDVDIDETILKEEYENNLAAYTTPETRDIEFARFDNILDANNYREIILTLSDTEIKSYNKENDVSFNKIENLKFDDFDIILAEKIFNLREGKISKPIDTKELGFYIVKLNSINLEKVISFEEASNEIKQNLIQDEAYDIFDETVNLADELLISGYDLNEISDEINIEVSKNIDFRK

SEQ ID NO: 112580 - protein, 117 aa, Unknown
  Bacterial polypetide isolated from the Sargasso Sea
KKNINYISKELREVAQKCRDLKIDKKEFYGGSMTISSLGGIGGSFFTPIINYPEVAILGISKLNKKQIYIDNQFKVRTLLPISLSYDHRIIDGAEAARFCNEVRDNLGKNFAFKLAI

SEQ ID NO: 112581 - protein, 128 aa, Unknown
  Bacterial polypetide isolated from the Sargasso Sea
DEGLLVPVVRFADTKGMDQISAEVKDFAQKAKNKKLQPTDWEGNTFTISNLGMFGIDSFTAIVNPPDSCILAVGGIKEVPVVKDGALVPGNIMKVTLSCDHRVVDGALGAAFLQTFKAYLENPVTMLL

SEQ ID NO: 112582 - protein, 289 aa, Unknown
  Bacterial polypetide isolated from the Sargasso Sea
KARKFARELEVDVKDVVGSEKRGRVIEKDIKEFVSSNINKKEDIKINNEYKHSEFGEIEVKEIPRIKRIASPHLVNSWKNIPHVTNHDEADITEMEDFRNSLTDIYTGEKKKITPLAFITKAIVSSLKKFPSFNSSIDDIENGKITLKKYYHIGIAVDTPHGLMVPKIRNVNKKNINQISEELKKISEDCRNLKIEKKEFFGGSITITSLGGIGGSFFTPIINYPEVAILGIGRSYKKQIFINEKFITRTVLPLSLSYDHRIIDGAEAARFNNDLKDNLGSNFAYKKAI

SEQ ID NO: 112583 - protein, 176 aa, Unknown
  Bacterial polypetide isolated from the Sargasso Sea
TPLAFIAKALTNNLKKFPTFNSSIDDISEGKITLKKYIHIGIAVDTPHGLMVPKIRNVDQKKIKEIAEDLKNVSELNTNLKINKKEFFGGSITITSLGGIGGTYFTPIINYPEVAILGVGRSYKKQIFIKDKFLARTVLPISLSYDHRIIYGAEAAKFCNSLKENLGKNFAYNLAF

SEQ ID NO: 112584 - protein, 178 aa, Unknown
  Bacterial polypetide isolated from the Sargasso Sea
KITPLVFIIKSLVSSLKKFPNFNSSIDEIEKGKITLKKYFHIGVAVDTKHGLMVPKIREADKKNFNQLSEHLKEISDKCRKLKIDKKEFFGGSITVTSLGGIGGSFFTPIINYPEVAILGIGKKYYKQVYIDNEFKKRIMLPLSLSYDHRIIDGAEAARFCNDLKENLGKNFAYKLAI

SEQ ID NO: 112585 - protein, 297 aa, Unknown
  Bacterial polypetide isolated from the Sargasso Sea
MGFASPGVRRLSRELNINLNIIKGTGAKGRITKDDLNNYIKLQMAMSSGNIGYQQPEIDFSQWGKVEAQKLTKINKITGKRLQHAWQSIPHVTQFDKADITDLNEYRKELNKNNAKKKIKVTFLPFLMKAATIVLKEMPKFNSSLDQNGENLIIKKYFNLGVAVDTPNGLVVPVVKDVDKKSIIELSKELGDLSQRARDKKLKPHELQSGTFTISSLGGVGGTFFTPIINPPEVAILGISQSWWENIYSEKIKNNSPKYIMPFSLSYDHRVIDGVAGASFTSKFSEVLEDISNFSDK

SEQ ID NO: 112586 - protein, 323 aa, Unknown
  Bacterial polypetide isolated from the Sargasso Sea
KGDLILSLNAESATEEKKEAVSEQKKVENTDIKEIKPQIQKEIIPVVPTSQSGSKSASPKVRKFARELGANVVEIPGSQRGGRVSEEDVKNFVRSKVTVSGGKVEKKVNKEEYPHEEFGEIELKDIPRVKRLSGPHLVRSWTEIPHVTQHDEVDITEMEQFRSSLYDYYTGEKIKVTPLAFIAKALVNALKKFPNFNASIDSANDKIIYKKYFHVGFAVDTPHGLMVPKIRDVDQMSIKEIGSALRTTSRLCRDLKIDKKEFFGGSMTISSLGGIGGTFFTPIINPPEVAILGVGKSFDRLVKVKDKFVSRKILPISLSYDHR

SEQ ID NO: 112587 - protein, 97 aa, Unknown
  Bacterial polypetide isolated from the Sargasso Sea
LKIDKKEFYGGSMTISSLGGIGGSFFTPIINYPEVAILGVSKSNKKQIFLGDRFTSRTILPISLSYDHRIIDGAEAARFCNEIRDNLGKNFAFKLAV

SEQ ID NO: 112588 - protein, 126 aa, Unknown
  Bacterial polypetide isolated from the Sargasso Sea
MVPKIREVDKKNINQISKDLKKVSEDCRNLKIDKKEFFGGSITITSLGGIGGSFFTPIINYPEVAILGIGRSYKKQLFINGKFITRIVLPLSLSYDHRIIDGAEAAKFNNDLKDNLGSNFAYKLAI

SEQ ID NO: 112589 - protein, 247 aa, Unknown
  Bacterial polypetide isolated from the Sargasso Sea
KIEKKIYKEEYSHEEFGKIELKDIPRVKKLSGPQLVRSWTEIPHVTQHEEIDVTEMEQFRSSLYDYYSGEMIKVTPLAFISKALISALKAFPNFNASIDPNQNKIIYKKYFHLGFAVDTSHGLMVPKIRNVDQMSIKEIGEALKKTSKLCRELKIDKKEFFGGSMTISSLGGIGGTFFTPIINPPEVAILGVGKSFDRLTKLKGKIVSRKILPISLSYDHRIIDGAEGARFCVYLSECLGKDFAFKL

SEQ ID NO: 112590 - protein, 204 aa, Unknown
  Bacterial polypetide isolated from the Sargasso Sea
HHDEVDITEMEDFRTKLKDNFTGQNIKITPLVFIIKALVNALKKFPSFNSSIDDIETGKITLKKYFHIGIAVDTPHGLMVPKIRNANEKNIKDLSSEILEISDKCKNLKIDKKEFYGGSITISSLGGIGGSFFTPIINYPEVAILGVSRSSKKQIFLENSFQVRTILPISLSYDHRIIDGAEAARFCNELKKNLGKNFAYKLAI

SEQ ID NO: 112591 - protein, 98 aa, Unknown
  Bacterial polypetide isolated from the Sargasso Sea
NDISEKCRNLKIDKKEFFGGSMTITSLGGIGGTFFTPIINPPEVAILGIGKIVERNKNLMLPLSLSYDHRVVNGADAARFCNELKDNLGQNFAYKLSL

SEQ ID NO: 112592 - protein, 73 aa, Unknown
  Bacterial polypetide isolated from the Sargasso Sea
FFTPIINPPEVAILGVGKSVEKTFKQNGQLINKKMLPISLSYDHRIIDGAEGARFCVHLGESLGKDFAFKLAV

SEQ ID NO: 112593 - protein, 238 aa, Unknown
  Bacterial polypetide isolated from the Sargasso Sea
TFLSGVDIELQKLTKVNRITGDRLQQAWQEIPHVTQHNDADITELEKIRKQLKEEGYQKDIKVTFLPFLLKAVITVLKEIPKFNSSLDYTGENLVLKQYYHIGIAVDTPHGLTVPVVKDVDKKDIFELSKDLMDLSEKARNKKLKPEDLQGSTFTVSSLGGIGGTAFSPIVNPPEVAILGVSKSEWRPVYDLKREEFIPRYIMPFSISYDHRVVDGAAGASFVERFSQALKDTDSMVG

SEQ ID NO: 112594 - protein, 271 aa, Unknown
  Bacterial polypetide isolated from the Sargasso Sea
SPKVRKFARELGVDISKVEGSERLGRVTESDVKSFVANKPEINSEKEFKKDETIELEYPHSEFGKTEIKDIPRVKRLSSKYLMNSWTNIPHVTNHDEADITELEEFRTSLTDIYTGEKKKITPLAFIVKALTASLKKFPNFNSSIDEIDKGKMTLKKYYHIGIAVDTKHGLMVPKLRNADNKNISLIGNELKKLSDQCRNLKIDKKELFGGSMTITSLGGIGGSFFTPIINYPEVAILGVGKSQKKQIFINGKFITRTMLPLSLSYDHRIM

SEQ ID NO: 112595 - protein, 95 aa, Unknown
  Bacterial polypetide isolated from the Sargasso Sea
IDKKEFFGGSMTISSLGGIGGTFFTPIINPPEVAILGVGKSFDRLVKVKDKFVSRKILPISLSYDHRIIDGAEGAKFCVYLGQCLGKDFAFKLAV

SEQ ID NO: 112596 - protein, 294 aa, Unknown
  Bacterial polypetide isolated from the Sargasso Sea
KVTSEKIANKVSQEPIAKDKTEKVYETNKSSSTDNDKILAGPAVRKYARELELDLTSINGMGKDGRITKDDLKRFIHQKVTPSKRDVYPSLESLAKFGPYKIENLSGIRKAGLKNLQNSWSLIPHVFHFEEINLTRINDIREKVKCSPLPVIVKAVSNILKKHPLFNSTLLSESEVLLKDYINIGLAVNTRDGLVVPVIKEVNKLDIKDIDQAIKKLSMHAREKQLKKTDIEGATFTISSLGKIGGQGFTPIINHPEVAILGISNNKKTLSMYKEKIIEELVLPISLSYDHRVI

SEQ ID NO: 112597 - protein, 207 aa, Unknown
  Bacterial polypetide isolated from the Sargasso Sea
MSSKYLMNSWTKIPHVTNHDEADITELEEFRTSLTDVYTGEKKKITPLAFIVKALTTSLKKFPNFNTSIDQIENGKMTVKRYYHVGIAVDTPHGLMVPKLRNADNKNISLISTELKKISQQCRDLKIEKKELFGGSMTITSLGGIGGSFFTPIINYPEVAILGVGRAEKKQVFIDGKFVTRKMLPLSLSYDHRIIDGAEAARFNNDL

SEQ ID NO: 112598 - protein, 85 aa, Unknown
  Bacterial polypetide isolated from the Sargasso Sea
MTITSLGGIGGSFFTPIINYPEVAILGIGKLEKKQVYIDGKFASRIMLPLSLSYDHRIIDGAEAARFNNELKENLGKNFAYKLAI

SEQ ID NO: 112599 - protein, 87 aa, Unknown
  Bacterial polypetide isolated from the Sargasso Sea
GSMTITSLGGIGGSFFTPIINFPEVAILGVGKSEKKQVFTDGKFVTRTMLPLSLSYDHRIIDGAEAARFNNDLKENLGKNFAYKLAV

SEQ ID NO: 112600 - protein, 161 aa, Unknown
  Bacterial polypetide isolated from the Sargasso Sea
KFPSFNSSIDDIEKGKVIYKKYYHIGIAVDTLNGLMVPKIRNVDKKNINQISQELKKVSEDCRNLKIDKKEFFGGSITITSLGGIGGSFFTPIINFPEVAILGIGRSYKKQLFINGNFLARTVLPISLSYDHRIIDGAEAARFNNDLKENLGTNFAYKLAI

SEQ ID NO: 112601 - protein, 134 aa, Unknown
  Bacterial polypetide isolated from the Sargasso Sea
AVDTEHGLMVPKIRNANEKNINQLSEELRDISEKCRKLKIDKKEFFGGSITITSLGGIGGSFFTPIINHPEVAILGIGRTYYKQVLIDNSFQKRVMLPLSLSYDHRIIDGAEAARFCNEIKDSLGKNFAYKLAI

SEQ ID NO: 112602 - protein, 246 aa, Unknown
  Bacterial polypetide isolated from the Sargasso Sea
DKIKNELKHSDFGEIEIKDIPRVKKLSSKYLTNSWTTIPHVTNHDEADITEMESFRSSLRDMYTGEKIKITPLAFIIKALVASLKKFPSFNSSIDEIETGKMTLKKYYHIGIAVDTPNGLMVPKIRNANNKKISLISKELKEVSELCRNLKIDKKELFGGSMTITSLGGIGGSFFTPIINYPEVAILGVGRSEKKQIFMNGKFQTRTMLPISLSYDHRIIDGAEAARFNNDLKENLGKNFAYKLAV

SEQ ID NO: 112603 - protein, 284 aa, Unknown
  Bacterial polypetide isolated from the Sargasso Sea
KISRTSAKTINTNVYAGPAVRKLAREFGIDLSLVQPTGPKNRIQKEDLHQFVKSRLSETGQGNGFEFSQPDIDYSKWGLIKEEKLSKFQKSSISNLHTSWINIPHVTQHDECDLNILLEVRTKLCKKHKVKISPLAFIAKITSKLLADFPLLNCSLDKSLEKIILKDYINLGIAIDTPEGLIVPNVKNAQLKSIVEISAEINELATAAKKRKLKIADLKGASFSISSLGAIGGRFFTPIINPPEVAILGISKTYEKVVSSDGGFENRSFLPISLSYDHRAINGV

SEQ ID NO: 112604 - protein, 183 aa, Unknown
  Bacterial polypetide isolated from the Sargasso Sea
MGERKKITPLAFIVKALTASLKKFPNFNSSIDEIEKGKMTIKKYFHIGIAVDTPHGLMVPKLRNAENKNISLISDELKKLSEKCRNLKIDKKELFGGSMTITSLGGIGGSFFTPIINYPEVAILGIGKSEKKQVYLDGRFVTRTMLPLSLSYDHRIIDGAEAARFNNDLKDNLGKNFAYKLAV

SEQ ID NO: 112605 - protein, 179 aa, Unknown
  Bacterial polypetide isolated from the Sargasso Sea
IKITPLAFIIKALVASLKKFPSFNSSIDEIETGKMTLKKYYHIGIAVDTPNGLMVPKIRNANNKKISLISKELKEVSKLCRNLKIDKKELFGGSMTITSLGSIGGSFFTPIINYPEVAILGVGRSEKKQAFMNGKFQTRTMLPISLSYDHRIIDGAEAARFNNDLKENLGKNFAYKLAV

SEQ ID NO: 112606 - protein, 308 aa, Unknown
  Bacterial polypetide isolated from the Sargasso Sea
MSKDKKIFTTPKVRKFARELGANVNLIEGTERKGRITEEDVKKFINYQLKDQKNIKKDNQTKNKINSEYDHSDFGEVEIKEVPRVKRIAAPHLASSWKNIPHVTHHDEADITEMEEFRISLTDSFTGERKKITPLAFIIKALVSSLVKFPTFNASIEDIDKGEMTIKKYYHIGIAVDTSHGLMVPKLRNANNKNINLISKELKEISEKCRNLKIDKKEFFGGSMTVTSLGGIGGSFFTPIINYPEVAILGIGKSSKKNVYYEEKYQTRIMLPLSLSYDHRIIDGAEAARFCNELKENLGKDFAYKLAV

SEQ ID NO: 112607 - protein, 393 aa, Unknown
  Bacterial polypetide isolated from the Sargasso Sea
MSEIEIKVPNIGDFKDVEVIEVLVSEGQTLKKNDPLITIESDKSSVEIPSNFDGKIKALKIKVGDKVSEGDLILTLENISKTKEEGDQKPVIKKEIKKTQIIDPKVQKIPTNQNKVLNISSASPKVRKFARELGVDIMQVKGSEREGRVIESDIKLFVASKSNNPVNSENKNKDKIKQEYPHSEFGEVEIKDIPRVKKLSSKYLMNSWTNIPHVTNHDEADITELEEFRTTLTDIYTGEKKKITPLAFIVKALTASLKKFPNFNSSIDDIEEGKMTVKKYFHIGIAVDTPHGLMVPKLRNADNKNINLISSELKKLSDQCRNLKIDKKELFGGSMTITSLGGIGGSFFTPIINFPEVAILGVGRSEKKQVFLNGKFVTRTMLPLSLSYDHRII

SEQ ID NO: 112608 - protein, 309 aa, Unknown
  Bacterial polypetide isolated from the Sargasso Sea
MTENETYKTVSATPKVRKFARELGVDINKVTGSERQGRVTESDIKLFVSNKSIQKKEVQTKNEEKIKLEYSHSEFGEIETKDIPRVKKLSAKYLMNSWTNIPHVTNHDEADITEMEEFRNSLTDIYTGKKKKITPLAFIVKALTASLKKFPNFNSSIDEIEKGKMTVKKYYHIGIAVDTPNGLMVPKLRNTNNKNISSIADELKKLSEECRTLKINKKELFGGSMTITSLGGIGGSFFTPIINFPEVAILGIGKSQKKQVFIEGKLVARTILPLSLSYDHRIIDGAEAARFNNELKEHLGKNFAYKLAV

SEQ ID NO: 112609 - protein, 300 aa, Unknown
  Bacterial polypetide isolated from the Sargasso Sea
KKYFATPKVRKFWLESLGANIAEIEGSERLGRITEEDVKNFVNKNLSKFHKKEDITIKSEFNHSDFGDIEITDLSRVKRLAAPHLSNSWNTIPHVTHHDEADITELEDFRAKLTDPVSGDKIKITPLAFIAKALTNNLKKFPTFNSSIDNISEGKITLKKYIHIGIAVDTPHGLMVPKIRNVDKKKIKEIAEELKNVSELSRNLKINKKEFFGGSITITSLGGIGGTYFTPIINYPEVAILGVGRSYKKQIFIKDKFLARTVLPISLSYDHRIIDGAEAAKFCNSLKENLGKNFAYNLAF

SEQ ID NO: 112610 - protein, 287 aa, Unknown
  Bacterial polypetide isolated from the Sargasso Sea
MSDFENQKNKGLPSAASPKARKFARELGVNINLVSGSERDGRVVEDDIKKFISSKIINSSEIKESKHNKIKNEFEHSDFGEVKIEDIPRVKKLASTYLINSWTKIPHVTNHDEVDITEMENFRSSLTDIYSGEKIKITPLAFIIKALVASLKKFPNFNSSIDDIENGKMTLKKYYHIGIAVDTSNGLMVPKIRNVDNKKILLISKELKEVSELCRNLKIDKKELFGGSMTITSLGGIGGSFFTPIINYPEVAILGIGKSQKKQILINGKFQTRTMLPISLSYDHRII

SEQ ID NO: 112611 - protein, 194 aa, Unknown
  Bacterial polypetide isolated from the Sargasso Sea
MEQFRSSLYDYYTGEMIKVTPLAFISKALVSALKAFPNFNASIDLNQNKIIYKKFFHLGFAVDTPHGLMVPKIRNIDQMDIKEIGEALKKTSKLCRELKIDKKEFFGGSMTISSLGGIGGTFFTPIINPPEVAILGIGKSFDRLVKLKGKIVTRKILPISLSYDHRIIDGAEGARFCVYLSECLGKDFAFKLAV

SEQ ID NO: 112612 - protein, 303 aa, Unknown
  Bacterial polypetide isolated from the Sargasso Sea
MSDIKKVPASPKVRKFARELGANINEIIGSERDGRVTEKDIKIFINSKVKNKPQIDKPNLKSEFDHSDFGEIEIKEIPRVKKIAAPHLSNSWNTIPHVTHHDDIDITELEDFRSNLIDSISGEKIKITPLAFIAKALTNNLKKFPTFNSSIDNIDNGKITIKKYFHIGIAVDTPHGLMVPKVRNVDKKKIKEIATELKEISDLSRKLKINKKEFFGGSITITSLGGIGGTYFTPIINFPEVAILGIGRSYKKQIFINNKFLARTVLPISLSYDHRIIDGAEAAKFCNALKESLGKNFAYNLAF

SEQ ID NO: 112613 - protein, 412 aa, Unknown
  Bacterial polypetide isolated from the Sargasso Sea
MSSKDILVPNIGDFKDVEVIEVLVKAGQKIKKNDSLITIESDKSSVEVPSTSDGIIEKINIKIGDKVSEGDLILTVNVESKIDVKEKPVQKNKIKEVSKKPDPVSPPVTRSTSGVKLASPKVRKFARELGANVTQIQGSQRSGRVTEDDVKKFVKSQVSVNQGKVEPKKYKDEYSHEEFGEIEIKDMPRVKKLSGPQLVRSWTEIPHVTQHDEIDITEMEQFRTSLFDHFTGEKISVTPLAFITRAVVNALKDFPNFNCSIDPEHNKIFYKKYYHVGFAVDTPHGLMVPKLRDVDQMNIKEIGNELRRVSRDCRDLKINKKEFFGGSMTISSLGGIGGTFFTPIINPPEVAILGVGKSFDRLVKIKGQIISRKILPISLSYDHRIIDGAEGARFCVHLNKSLGKDFAFKLAV

SEQ ID NO: 112614 - protein, 420 aa, Unknown
  Bacterial polypetide isolated from the Sargasso Sea
MASIKILVPDMGDFKDVEVIEVLVKEGQQIKKNDSLITLESDKSSVEVPSTHEGVVEKINIKVGNKVNQGDLILNLKSESAAKETKETVNKDKKIEKKVEVTSQEIIKQKKIIPATPTLKSGTKAASPKVRKFARELGANVIEIPGTQRGGRVSEEDVKNFVRSQVTVNDGKVQKKIHKEEYSHEEFGEIELKDIPRVKKLSGPQLVRSWTEIPHVTQHDEIDVTEMEQFRSSLYDYYSGELIKVTPLAFIAKALVSALKEFPNFNASIDPNQNKIIYKKYFHLGFAVDTPHGLMVPKIRDVDQMNIKQIGEELKNTSKLCRELKIDKKDFFGGSMTISSLGGIGGTFFTPIINPPEVAILGVGKSFDRLVKIKNKVISRKILPISLSYDHRIIDGAEGARFCVYLGKCLGKDFAFKLAV

SEQ ID NO: 112615 - protein, 302 aa, Unknown
  Bacterial polypetide isolated from the Sargasso Sea
MIKKDYLSIVPASPKARKFARELGIDINKISGSERQGRVTERDIKLFVSTKPQENIKKNEIKKEEKVKQEYLHSEFGEIEIKEIPRVKKLSSKYLMNSWTNIPHVTNHDEADITELEEFRTSLTDIYSGEKKKITPLAFIVKALTTSLKKFPNFNSSIDEIEEGKMTVKKYYHIGIAVDTPNGLMVPKIRNVDNKNISLIANELKKLSDQCRNLKIDKKELFGGSMTITSLGGIGGSFFTPIINYPEVAILGVGKSEKKQVYINGKFITRTMLPLSLSYDHRIIDGAEAARFNNDLKDNLGK

SEQ ID NO: 112616 - protein, 296 aa, Unknown
  Bacterial polypetide isolated from the Sargasso Sea
VRRFARELGANVSIIKGTERKGRITEEDVKKFINNKLKDSGKTKEDSQKINKIKNEYNHSDFGEVEIKEVPRVKRIAAPHLVNSWKNIPHVTHHDEADITEMEEFRSSLTDSFTGERKKITPLAFIIKALVSSMIKFPTFNSSIEDIDKGKMTIKKYYHIGIAVDTPHGLMVPKLRNVNNKNISLISKELKEISEKCKNLKIDKKEFFGGSMTVTSLGSIGGSFFTPIINYPEVAILGVGRSSKKSVYYDNKYQARIMLPLSLSYDHRIIDGAEAARFCNELKENLGKDFAYKLAM

SEQ ID NO: 112617 - protein, 424 aa, Unknown
  Bacterial polypetide isolated from the Sargasso Sea
MTKKDIKVPNIGEFKDVEVIEIIVKKGQEIKKNDPLITIESDKSSVEIPSLHDGIVTELNLNVGDKVSEGDKILEIELKDNQVETQLKTEEIKTIKKENTKEKKIEIRREVGSKNVIVKDFSKKTAASPKVRKFARELGVDISKVEGSERLGRVTESDVKSFVAKKPEINSEKEFKKDETIELEYPHSEFGKTEIKDIPRVKRLSSKYLMNSWTNIPHVTNHDEADITELEEFRTSLTDIYTGEKKKITPLAFIVKALTASLKKFPNFNSSIDEIDKGKMTLKKYYHIGIAVDTKHGLMVPKLRNANNKNISLIGNELKKLSDQCRNLKIDKKELFGGSMTITSLGGIGGSFFTPIINYPEVAILGVGKSQKKQIFIDGKFITRIMLPLSLSYDHRIIDGAEAARFNNDLKDNLGKNFAYKLAV

SEQ ID NO: 112618 - protein, 303 aa, Unknown
  Bacterial polypetide isolated from the Sargasso Sea
MSENKKIFATPKVRKFARELGANITEIEGSERLGRITEEDVKNFVNKNLNKSQTKEDIKIKSEFNHSDFGDIEIADMPRVKRLAASHLSNSWNTIPHVTHHDEADITELEDFRTKLTDPVSGDKMKITPLAFIAKALTNNLKKFPTFNSSIDNISEGKITLKKYIHIGIAVDTPHGLMVPKIRNVDQKKIKEIAEELKNVSELSRNLKINKKEFFGGSITITSLGGIGGTYFTPIINYPEVAILGVGRSYKKQIFIKDKFLARTVLPISLSYDHRIIDGAEAAKFCNSLKENLGKNFAYNLAF

SEQ ID NO: 112619 - protein, 303 aa, Unknown
  Bacterial polypetide isolated from the Sargasso Sea
MSENKKIFATPKVRKFARELGANISEIEGSERLGRISEEDVKNFVNKNLNKSQTKEDIKIKSEFDHSDFGDVEIVDIPRIKRFAAPHLSNSWNTIPHVTHHDEADITELEDFRAKLTDPVSGDKIKITPLAFIAKALTNNLKKFPTFNSSIDNISEGKITLKKYIHIGIAVDTPHGLLVPKIRNVDQKKIKEIAEELKNVSELSRNLKINKKEFFGGSITITSLGGIGGTYFTPIINYPEVAILGIGRSYKKQIFVKDKFLARTVLPISLSYDHRIIDGAEAAKFCNSLKENLGKNFAYNLAF

SEQ ID NO: 112620 - protein, 308 aa, Unknown
  Bacterial polypetide isolated from the Sargasso Sea
MSDQSIKTSASPKVRKFARELGVDINSVKGSERLGRVVEKDLKEFVSSNINQTYDPKDSKNEKVIKSEYQHSDFGKIEVKDIPRVKKIAAPHLVNSWTNIPHVTNHDEADITEMEEFRSSLKDNYTREKIKITPLAFIIKALVISLKKFPSFNSSIDDIENGKITFKKYFHIGIAVDTQHGLMVPKIRDANQKDIKELSKDLKKVSDDCRNLKIDKKEFFGGSMTITSLGGIGGSFFTPIINFPEVAILGIGRSYKKQVFIDGKFVPRTMLPLSLSYDHRIIDGAEAAKFNNELKDNLGANFAYNLSK

SEQ ID NO: 112621 - protein, 427 aa, Unknown
  Bacterial polypetide isolated from the Sargasso Sea
MSEKEVLVPNIGDFKDVEVIEVLIEAGSNINKDDPIITIESDKSSVEIPSPYSGSVKKVNLKVGDKVSEGSSILIIGSEEQKPDVQIEEEMKEVKKETIIQKPLETVTSKPKEILQNNRVSVFKSSKALASPKTRKFARELGVDINNITGSQRSGRIIEEDIKKFVSSNFNKPQEEKKAPSIKPSEYDHADFGDVEIQDIPRIKRIAAPHLSNSWQTIPHVTSCDEADITELEEFRQNLTDTFTGEKKKITPLAFIIKAVVEALKVFPRFNSSIDNIENGKITLKKYFHVGIAVDTPNGLMVPKIRNANQKNIDQISKDLKKVSDDCRNLKIDKKEFYGGSITITSLGGIGGTYFTPIINYPEVAILGIGRTYIKPVYIDGQFKPRTMLPLSLSYDHRIIDGAEGSRFNNELKNNLGKNFAYKLAKQ

SEQ ID NO: 112622 - protein, 420 aa, Unknown
  Bacterial polypetide isolated from the Sargasso Sea
MTSTKILVPDMGDFKDVEVIEVLVKEGQQIKKNESLITLESDKSSVEVPSTHEGIVEKIKIKVGNKVNQGDLILSLKSENKTEEEKISVNKEQKIEKKVEDKKPQVIKTKEIIPTAPSSQSGTKSASPKVRKFARELGANVLEIPGSQRAGRVSEEDVKNFIRSQVTVSGGRVEKKIHKEEYPHEDFGEIELKDIPRVKKLSGPQLVRSWTEIPHVTQHEEIDITEMEQFRSSLYDYYSGEMIKVTPLAFISKALVSALKAFPNFNASIDSIHNKIIYKKYFHLGFAVDTPHGLMVPKIRNVDQMSIKEIGEALKKTSKLCRELKIDKKEFFGGSMTISSLGGIGGTFFTPIINPPEVAILGVGKSFDRLIKLKGKIVSRKILPISLSYDHRIIDGAEGARFCVYLSECLGKDFAFKLAV

SEQ ID NO: 112623 - protein, 76 aa, Unknown
  Bacterial polypetide isolated from the Sargasso Sea
GGSFFTPIINYPEVAILGVGKSQKKQVYTDGKFDTRIMLPISLSYDHRIIDGAEAARFNNDLKENLGKNFAYKLAV

SEQ ID NO: 112624 - protein, 308 aa, Unknown
  Bacterial polypetide isolated from the Sargasso Sea
MSDQSNKISASPKVRKFARELGVDINKVKGTERSGRVVEKDLKDFVSSRINHPQNNSERQKEKIIKSEYQHSDFGEVEIKDIPRIKKIAAPHLVNSWTNIPHVTNHDEADITEMEEFRNTIKDNYTGEKIKITPLAFIIKALVLSLKKFPSFNSSIDDIENGKITFKKYFHVGIAVDTQHGLMVPKIRDANQKDIKELSEELKKVSDDCRNLKIDKKEFFGGSMTITSLGGIGGSFFTPIINFPEVAILGVGRSYKKQVFINGKFIPRTMLPLSLSYDHRIIDGAEAAKFNNELKDNLGSNFAYNLSK

SEQ ID NO: 112625 - protein, 419 aa, Unknown
  Bacterial polypetide isolated from the Sargasso Sea
MASTKILVPDMGDFKDVEIIEVLVKEGQQIKKNDSLITLESDKSSVEVPSTHEGVIEKINIKVGDKVNKGDLILNLNVESATEEKKEAVSEQKKEEKTEIKEIKTQKPKEIIPIAPTSQLGSKSASPKVRKFARELGANVVEIPGSQRGGRVSEEDVKNFVRSQVTVSGGKIEKKVHKEEHPHEEFGEIELKDIPRVKRLSGPHLVRSWTEIPHVTQHDEVDITEMEQFRSSLYDYYTGEKIKVTPLAFIAKALVSALKKFPNFNASIDSVNDKIIYKKYFHVGFAVDTPHGLMVPKIRDVDQMSIKEIGSALRKTSRLCRDLKIDKKEFFGGSMTISSLGGIGGTFFTPIINPPEVAILGVGKSFDRLVKVKDKFVSRKILPISLSYDHRIIDGAEGARFCVYLGKCLGKDFAFKLAV

SEQ ID NO: 112626 - protein, 286 aa, Unknown
  Bacterial polypetide isolated from the Sargasso Sea
MNDLEDKNNQNVLASPKARKFARELGVDVRDVVGSERLGRVIEEDIKEFVSSKFNKKENIKINKEYEHSEFGKVEIKEIPRIKRIAAPHLVNSWKNIPHVTNHDEADITEMEEFRSSLKDIYTGEKKKITPLAFIIKALVSSMKKFPNFNSSIDDIENSKITLKKYFHIGIAVDTSHGLMVPKIRNVDKKNINQISEELKKVSEDCRNLKIDKKEFFGGSITITSLGGIGGSFFTPIINYPEVAILGVGRSYKKQLFINDKFIIRTVLPLSLSYDHRIIDGAEAAR

SEQ ID NO: 112627 - protein, 170 aa, Unknown
  Bacterial polypetide isolated from the Sargasso Sea
IKALTKSLINFPIFNSSIKDIEKGIIVQKKYFHIGIAVDTPHGLMVPKIRDTNKKNINNIANELKIVSEKSKNLKIEKKEFFGGSITVTSLGGIGGTFFTPIINSPEVAILGIGKMFDKFIDLEKNPEKRFILPISLSYDHRVINGADAARFCNNLKENLGQNFAYNLSI

SEQ ID NO: 112628 - protein, 315 aa, Unknown
  Bacterial polypetide isolated from the Sargasso Sea
IQQETEVLNNVSNISSASPKARKFARELGVDINKVLGSERDGRVVEDDIKKFVAFRSNNNAEVVEEKKPSKIKNEFEHSDFGEIEIKDIPRVKKLSSKYLTNSWTTIPHVTNHDEADITEMESFRNSLTDIYTGEKIKITPLAFIIKALVASLKKFPSFNSSIDEIETGKMTMKKYYHIGIAVDTPNGLMVPKIRNANNKKISHISRELKEVSELCRNLKIDKKELFGGSMTITSLGGIGGSFFTPIINYPEVAILGVGRSEKKQIYINGKFQIRTMLPISLSYDHRIIDGAEAARFNNDLKENLGKNFAYKLAV

SEQ ID NO: 112629 - protein, 74 aa, Unknown
  Bacterial polypetide isolated from the Sargasso Sea
SFFTPIINYPEVAILGVGRSEKKQIFINGKFQTRTMLPISLSYDHRIIDGAEAARFNNDLKENLGKNFAYKLAV

SEQ ID NO: 112630 - protein, 308 aa, Unknown
  Bacterial polypetide isolated from the Sargasso Sea
MSINKKIFATPKTRKFARELGANISEIAGTQRAGRITNDDVKNYINNKLNNPKLDSENSKEKTNLKVEFDHSDFGEVEVIDMPRIKRIAAPNLSNSWKLIPHVTHHDEADISELEEFRLSLKDRITGEIKKITPLVFIIKSLVSSLKKFPNFNSSIDEIEKGKITLKKYFHIGVAVDTKHGLMVPKIREADKKNFNQLSENLKEISDKCRKLKIDKKEFFGGSITVTSLGGIGGSFFTPIINYPEVAILGIGKKYYKQVYIDNEFKKRIMLPLSLSYDHRIIDGAEAARFCNDLKENLGKNFAYKLAI

SEQ ID NO: 112631 - protein, 255 aa, Unknown
  Bacterial polypetide isolated from the Sargasso Sea
SLKLNKKKNINTNKEYDHSEFGKVEVKEIPRVKKIAAPHLVNSWKNIPHVTNHDEADITEMEEFRNSLKDIYTGEKKKITPLAFIIKAVVSSLRKFPSFNSSIDDIENGNITFKKYYHIGVAVDTSHGLMVPKIRNVDKKNINQISKELKKVSEDCRNLKIDKKEFFGGSITITSLGGIGGSFFTPIINYPEVAILGIGRSYKKQLFINEQFTKRTVLPLSLSYDHRIIDGAEAARFNNDLKDNLGSNFAYKLAI

SEQ ID NO: 112632 - protein, 193 aa, Unknown
  Bacterial polypetide isolated from the Sargasso Sea
LVSYLNLRKKLNKTYKISPLAYIVKSTAETLKHFPEMNSSLSHDKTTIVLKDYYNIGIAIDTEYGLVVPNIKDVDKKSIIKISDEIKDLAKTAKKRRLNNEQLSGATFSVSSLSGVGGKFFTPIINPPEVAILGLSKTYDVVKLVNMKLSTTQQLPVSLSYDHRIINGVYAMTFINKLSEYLNDINFLQSSFE

SEQ ID NO: 112633 - protein, 81 aa, Unknown
  Bacterial polypetide isolated from the Sargasso Sea
SLGGIGGSFFTPIINYPEVAILGVGRSEKKQIFINGKFQTRTMLPISLSYDHRIIDGAEAARFNNDLKENLGKNFAYKLAV

SEQ ID NO: 112634 - protein, 310 aa, Unknown
  Bacterial polypetide isolated from the Sargasso Sea
MSDTKKISASPKVRKFARELGANINQIVGSERGGRVTEQDIKNYINSKIKNTSELNIPNVKSEKKNIKPEYEHSDFGKVEIKDIPRVKRIAAPHLTNSWNTIPHVTHHDEIDITELEEFRNSLFDSVTGEKIKITPLAFIAKALTNNLKNFPSFNSSIDDIDNGKITIKKYFHIGIAVDTPHGLMVPKIRNVDQKKIKEIANELKEISDLSRKLKINKKEFFGGSITITSLGGIGGTYFTPIINFPEVAILGIGRSYKKQLYFKNSFHPRTVLPISLSYDHRIIDGAEAAKFCNALKEILGSNFAYNLAF

SEQ ID NO: 112635 - protein, 418 aa, Unknown
  Bacterial polypetide isolated from the Sargasso Sea
MKEIEIKVPNIGDFTDVEVIEVLVNQGQMIAKNDPLITIESDKSSVEIPSNFEGKIKSLKLKVGDKVSEGDLILILESSSNKNEIKEEPKIEKQSEPIIETKSELEQVPVYQKQVTGVSSASPKARKFARELGVNINEVLGSEKDGRVVEDDIKKFVSLKSVNNKEIKEIKPSKIKNEYEHAEFGKIEIKDIPRVKKLASTYLTNSWTTIPHVTNHDEADITEMEGFRSSLTDIYTGEKIKITPLAFIIKALVASLKKFPSFNSSIDEIETGKMIVKKYYHIGIAVDTPNGLMVPKIRNANNKKISLISKELREVSELCRNLKIDKKELFGGSMTITSLGGIGGSFFTPIINYPEVAILGIGRSEKKQVFLNGKFQVRTMLPLSLSYDHRIIDGAEAARFNNDLKENLGKNFAYKLAV

SEQ ID NO: 112636 - protein, 127 aa, Unknown
  Bacterial polypetide isolated from the Sargasso Sea
LMVPKIRNVDKKNINQISEELKKISEDCRNLKIDKKEFFGGSITITSLGGIGGSFFTPIINYPEVAILGVGRSYKKQLFINEKFTTRTVLPLSLSYDHRIIDGAEAARFNNDLKDNLGSNFAYKLAI

SEQ ID NO: 112637 - protein, 95 aa, Unknown
  Bacterial polypetide isolated from the Sargasso Sea
DLQGGTFTISSLGGFGGVGFTPIINPPEVAILGVARAQIRPIMIKGKFLPRLILPLSLSYDHRVIDGVGGIQFTSALKELLENPESYLSEEISIG

SEQ ID NO: 112638 - protein, 259 aa, Unknown
  Bacterial polypetide isolated from the Sargasso Sea
KSITNNEIKEIPPKKISNDFAHSDFGNVEIQDIPRVKKLASSYLSNSWTTIPHVTNHDEADITEMETFRKSLTDNYTGEKIKITPLAFIVKALVASLKKFPTFNSSIDKIESGKMTLKKYFHIGIAVDTPNGLMVPKLRNAENKKISLISKELKEISELCRNLKIDKKELFGGSMTITSLGGIGGSFFTPIINYPEVAILGIGRSEKKQIYLNGKFQTRIMLPLSLSYDHRIIDGAEAARFNNDLKENLGKNFAYKLAV

SEQ ID NO: 112639 - protein, 419 aa, Unknown
  Bacterial polypetide isolated from the Sargasso Sea
MASTKILVPDMGDFKDVEIIEVLVKEGQQIKKNDSLITLESDKSSVEVPSTHEGVIEKINVKVGDKVNKGDLILSLNAESATEEKKEAVSEKKKVEKTEIKEIKPQKPKEIIPIAPTSQTSSKSASPKVRKFARELGANIVEIPGSQRSGRVSEEDVKNFVRSQVTVSGGKIEKKVHKEEYPHEEFGEIELKDIPRVKRLSGPHLVRSWTEIPHVTQHDEVDITEMEQFRSSLYDYYTGEKIKVTPLAFIAKALVSALKKFPNFNASIDSAIDKIIYKKYFHVGFAVDTPHGLMVPKIRDVDQMSIKEIGSALRKTSRLCRDLKIDKKEFFGGSMTISSLGGIGGTFFTPIINPPEVAILGVGKSFDRLVKVKDKFVSRKILPISLSYDHRIIDGAEGARFCVYLGKCLGKDFAFKLAV

SEQ ID NO: 112640 - protein, 303 aa, Unknown
  Bacterial polypetide isolated from the Sargasso Sea
MSENKKIFATPKVRKFARELGANIAEIEGSERLGRISEEDVKNFVNKNLNKSQKKEDIKIKSEFDHSDFGDVEIIDIPRIKRLAAPHLSNSWNTIPHVTHHDEADITELEDFRAKLTDAVSGDKIKITPLAFIAKALTNNLKKFPTFNSSIDNISEGKITLKKYIHIGIAVDTAHGLMVPKIRNVDKKKIKEISEELKNVSELSRNLKINKKEFFGGSITITSLGGIGGTYFTPIINYPEVAILGVGRSYKKQIFVKDKFLARTVLPMSLSYDHRIIDGAEAAKFCNSLKENLGKNFAYNLAF

SEQ ID NO: 112641 - protein, 437 aa, Unknown
  Bacterial polypetide isolated from the Sargasso Sea
RASGLPEHVVIPMPALSPTMSSGGIAKWHAAIGDEVRAGDVLADVETDKATMAMEATDDGFLAAILVEEGATDVEVGTPVCVMCEDAGDVAAFKDYESSAAPVVKEEAPASEVASSASSASAVVREEAPKVARSFDRASGARVFASPLARRLANERGVSLDAVRGTGPNGRVIAEDVLAARAVDASVGPTQTVVVEHPLAKFFPDFEDVSVTAIKRVTAQRLTESKQQVPHFYVTVDVRLDHMMNIRKTLNDQLANDKSAEGTKISVNDLIIKASAKALLAVPDVNASWLGDKIRKYKKADISVAVQTERGLMVPIVRSACCLGLKSISSEVKALAGRARDGTLTPHDMTGGTFTISNLGMFGVKSFAAIVNPPQAAILAVGGARKEVVKNSEGGYEEVSVLSATMSCDHRVVDGAVAAQWLQSFKGYLEDPMTMLL

SEQ ID NO: 112642 - protein, 293 aa, Unknown
  Bacterial polypetide isolated from the Sargasso Sea
TQTGRVLASPAVRKRARENDVDLSNVRGSGPAGRIRHADLDAFIAAGGAVSGAPPMAYSLKRTEVTPVKVVGLRRKISEQMSLSKSRIPHFSYFEEVDITELENLRQILNSTRDETQPKLTYLPFIMLALAKIMPDHPECNAHFDDEAGVVNRNAAVNLGIATQTDRGLYVPVVKHVESMDIWKTASEMQRVSGSARDGSASLDELTGSTFTITSLGREGGLGATPIINHPEVAILGVHKAREMPVARNGAIVIRRIMNLSSAFDHRVVDGADGASLIQHLKRMLENPALIFM

SEQ ID NO: 112643 - protein, 369 aa, Unknown
  Bacterial polypetide isolated from the Sargasso Sea
VLVKVGDKVTLDQSLLSVEGDKASMEVPAAQAGTVKEIKVKAGDKVKTGSLIMVFEAEGAAVAAPAAAPAPAPVAAPAPVAAAPATPAAAELKEVQVPDIGGDAVEVTEVMVKVGDTVAADQSLLSVEGDKASMEVPAPFAGTVKEIKVKVGDKVQTGSSVFVFEVAGSAPSAAAAAVAAPAAVAAPAPVAAPAPAASAPVAAPSASASEFTENQAYAHASPVVRRLAREFGVDLSKVTGTARKGRVQREDVQNYVKNIIAQVASGKGNVTSSSNSVGFDLIPWPKVDFSKFGAVEEKPLSRIQKLSGANLHRNWVRIPHVTQFDEADITGLEEFRKEQNALADKKKMGVKYTPLVFIMKAVAKARKSS

SEQ ID NO: 112644 - protein, 418 aa, Unknown
  Bacterial polypetide isolated from the Sargasso Sea
MKQVIKIPSLGDAENTEVIEICVNPGDSVGSEDSIVVLESEKAAMDVPASKNGVVKKVLVKIGDEVKEGDDFLEIEITEEEIKEDDSDKDVKNDIHEDDQPEVEEIIEEKQVEEIIEEPRYESTASGIYAGPAVRKLAREFGIDLNKVIATGPRNRILKEDLHKFVKSKLEGSSTGIPKMPSIDFSEFGNVEEIDLTKFQKTSALNLQQSWVTIPHVTQHDETSIDELLTVRKSLMKKHKVKVSPLAFFAKGICKLLEEFPLFNASIDMNTMKIIKKDYINLGIAVDTPQGLIVPNIKSANKMSIREISDEIARLAALSKSRKIKVDDLKGSTFTISSLGSFGGKFFTPIINPPEVAILGISKSYDSVLLKDKKPVSTTNLPISLSYDHRIINGVEGVKFTTRFCEILSDISYFKKNF

SEQ ID NO: 112645 - protein, 112 aa, Unknown
  Bacterial polypetide isolated from the Sargasso Sea
MISKELKEVSELCRNLKIDKKELFGGSMTITSLGGIGGSFFTPIINYPEVAILGVGRSEKKQIFMNGKFQTRTMLPISLSYDHRIIDGAEAARFNNDLKENLGKNFAYKLAV

SEQ ID NO: 112646 - protein, 419 aa, Unknown
  Bacterial polypetide isolated from the Sargasso Sea
MIKEITLPDLGEGIDGAEVSEIPVSKGDTVSPDDTILVLESDKASMEIPSEVSGTISEILISSGDEVITGQLLLKIEVADGPKQGEQIKEEVVLPAPEPEPKDEPATTQETAPQLETQPPSTKGAFASPGVRRLSRELGINLEGINGSGPKGRITKDDLNAYIKLQMAMSSGPLPRVKKEVDFSTWGNVEVEKLTRVNKITGERLQQAWQEIPHVTQYGDADITELENLRKNLKDDGAKKGVKVTFLPLLMKAVAVVLKEMPRFNSSLDHTGQNLILKNYYHIGIAVDTPSGLTVPVVKDVDKKGILDLSKELMDVSERAREKKLNPDDMNGGTFTISSLGGIGGTNFSPIVNPPEVAIMGVSKSEWKPVYDRNAKEFIARYIMPFSISYDHRVIDGAYAAAFSERFSQVLNDIKTFKE

SEQ ID NO: 112647 - protein, 305 aa, Unknown
  Bacterial polypetide isolated from the Sargasso Sea
MKDVDDKNNLNVLASPKARKFARELGVNVRDVVGSERLGRVIEEDIKEFVSSKFNKKENIKISKEYEHSEFGKVEIKEISRIKRIAAPHLVNSWKNIPHVTNHDEADITEMEEFRSSLKDIYSGEKKKITPLAFIIKALVSSLKKFPNFNSSIDDIENGKITLKKYFHIGIAVDTSHGLMVPKIRNVDKKNINQISEELKKVSEDCRNLKIDKKEFFGGSITITSLGGIGGSFFTPIINYPEVAILGVGRSYKKQLFINKKFITRTVLPISLSYDHRIIDGAEASRFNNDLKDNLGSNFAYKLAI

SEQ ID NO: 112648 - protein, 367 aa, Unknown
  Bacterial polypetide isolated from the Sargasso Sea
ESFYSGHLLHIGVDEEKSAKVDTILAIIGDKEVNIQQVLTSLKKPNDVELKDKTQNKVVIDVKAEENIDKNFEKILNEDLSSTDNKARIFVSPLAKKIAFEKGLNLSKIKGSGDNGRIIKRDVENYVGDSTETKSLVSYGTESSNEFPNSQMRKTIAKRLSESKFSAPHYYLGVEFNMDNLISFRIQHNNSTGLKISFNDIILKASAKALKLHPEVNAQWSHEKIVQFDHVHMGFAVAVDDGLVVPVLKFVNEMPLQEISKSVKDLAERARSKKIVPSEMEGSTFTISNLGMFGITEFTSIINQPNSAILSVGAIVQKPIVKDEKIIIGNTMKLTLACDHRVVDGATGSAFLTTLRNFIENPVGILL

SEQ ID NO: 112649 - protein, 421 aa, Unknown
  Bacterial polypetide isolated from the Sargasso Sea
MSKKDIKVPNIGEFKDVEVIEVLIKKGQKIKKNDPLITIESDKSSVEIPSSDDGTIISLNVKIGDKVSEGDKIIEIESEKEIKETSAQELPKSQLPKEIKKNDVKKTNESENIIVKDFSTKASASPKVRKFARELGVNINKVPGSERQGRVTESDVKLFVATKSDKSFKDQNTTEQKIELEYSHSDFGEVDIKDIPRVKKLSSKYLMNSWTKIPHVTNHDEADITELEEFRTSLTDVYTGEKKKITPLAFIVKALTTSLKKFPNFNTSIDQIENGKMTVKKYYHVGIAVDTPHGLMVPKLRNADNKNISLISTELKKISQQCRDLKIDKKELFGGSMTITSLGGIGGSFFTPIINYPEVAILGVGRAEKKQVFMDGKFVTRTMLPLSLSYDHRIIDGAEAARFNNDLKENLGKNFAYKLAV

SEQ ID NO: 112650 - protein, 419 aa, Unknown
  Bacterial polypetide isolated from the Sargasso Sea
MTSTKILVPDMGDFKDVEIIEVLVKEGQQIKKNDSLITLESDKSSVEVPSTHEGVIEKINIKVGDKVNKGDLILSLNAESATEEKKEAVSEKKKEEKTEIKEIKTQKPKEIIPVVPSSQSGSKSASPKVRKFARELGANVVEIPGSQRGGRVSEEDVKNFVRSQVTVSGGKVEKKVHKEEYPHEEFGEIELKDIPRVKRLSGPHLVRSWTEIPHVTQHDEVDITEMEQFRSSLYDYYTGEKIKVTPLAFIAKALVSALKKFPNFNASIDSANDKIIYKKYFHVGFAVDTPHGLMVPKIRDVDQMSIKEIGSALRKTSRLCRDLKIDKKEFFGGSMTISSLGGIGGTFFTPIINPPEVAILGVGKSFDRLVKVKDKFISRKILPISLSYDHRIIDGAEGARFCVYLGKCLGKDFAFKLAV

SEQ ID NO: 112651 - protein, 169 aa, Unknown
  Bacterial polypetide isolated from the Sargasso Sea
KALVASLKKFPSFNSSIYEIETGKMTLKKYYHIGIAVDTPNGLMVPKIRNANNKKISLISKELKEVSELCRNLKIDKKELFGGSMTITSLGGIGGSFFTPIINYPEVAILGVGRSEKKQIFMNGKFQTRTMLPISLSYDHRIIDGAEAARFNNDLKENLGKNFAYKLAV

SEQ ID NO: 112652 - protein, 297 aa, Unknown
  Bacterial polypetide isolated from the Sargasso Sea
SPKVRKFARELGVDISKVEGSERLGRVTESDVKSFVANKPERNSEKEFKKDETIELEYPHSEFGKTEIKDIPRVKRLSSKYLINSWTNIPHVTNHDEADITELEEFRTSLTDIYTGEKKKITPLAFIVKALTASLKKFPNFNSSIDEIDKGKMTLKKYYHIGIAVDTKHGLMVPKLRNADNKNISLIGNELKKLSDQCRNLKIDKKELFGGSMTITSLGGIGGSFFTPIINYPEVAILGVGKSQKKQIFIDGKFITRTMLPLSLSYDHRIIDGAEAARFNNDLKDNLGKNFAYKLAV

SEQ ID NO: 112653 - protein, 187 aa, Unknown
  Bacterial polypetide isolated from the Sargasso Sea
NFRKNLKDGYTGEQKKITPLAFIIKALVKSMMKYPIFNSSIKDEENYQIILKKYFHIGIAVDTPHGLMVPKIRDADKFKISDLSQKLKEVSDKCRNLKIDKKEFQGGSITITSLGGIGGTFFTPIINPPEVAILGIGKIFQKDKSEKLILPLSLSYDHRIINGADAARFCNEIKENLGKNFAYNLSI

SEQ ID NO: 112654 - protein, 211 aa, Unknown
  Bacterial polypetide isolated from the Sargasso Sea
MHRNWVVIPHVTNHDDADITDLEAFRVQFNKENEKSGVKVTMLAFMIKAAVAALKKFPEFNSSLDGDQLVLKNYFHIGFAADTPNGLVVPVIRDADKKGIVQISQEMGDLAKKARDGKLGPADMTGGCFSISSLGGIGGRYFTPIINAPEVAIMGVCKSSLEPKWDGKQFAPRLMLPLSLSWDHRVIDGAAAARFNVYFASLLADFRRIVM

SEQ ID NO: 112655 - protein, 418 aa, Unknown
  Bacterial polypetide isolated from the Sargasso Sea
MKEIEIKVPNIGDFTDVEVIEVLVNQGQMIGKNDPLITIESDKSSVEIPSNFEGKIKSLKLKVGDKVSEGDLILILESSSNKNEIKEKPKIEKQSEPIIETKSELEQVPVYQKQVTGVSSASPKARKFARELGVNINEVLGSEKDGRVVEDDIKKFVSLKSVNNKEIKEIKPSKIKNEYEHADFGKIEIKEIPRVKKLASTYLTNSWTTIPHVTNHDEADITEMEGFRSSLTDIYTGEKIKITPLAFIIKALVASLKKFPSFNSSIDEIETGKMTVKKYYHIGIAVDTPNGLMVPKIRNANNKKISLISKELREVSELCRNLKIDKKELFGGSMTITSLGGIGGSFFTPIINYPEVAILGIGRSEKKQVFLNGKFQVRTMLPLSLSYDHRIIDGAEAARFNNDLKENLGKNFAYKLAV

SEQ ID NO: 112656 - protein, 230 aa, Unknown
  Bacterial polypetide isolated from the Sargasso Sea
KLKDIPRVKRLSGPHLVRSWTEIPHVTQHDEVDITEIEQFRSSLYDYYTGEKIKVTPLAFIAKALVSALKKFPNFNASIDSANDKIIYKKYFHVGFAVDTPHGLMVPKIRDVDQMSIKEIGSALRKTSRLCRDLKIDKKEFFGGSMTISSLGGIGGTFFTPIINPPEVAILGVGKSFDRLVKVKDKFVSRKILPISLSYDHRIIDGAEGARFCVYLGKCLGKDFAFKLAV

SEQ ID NO: 112657 - protein, 248 aa, Unknown
  Bacterial polypetide isolated from the Sargasso Sea
KEKIIKSEYQHSYFGEVEIKDIPRVKKIAAPHLVNSWTNIPHVTNHDEADITEMEEFRISIKDNYTGERIKITPLAFIIKALVLSLKKFPSFNSSIDDIENGKITFKKYFHVGIAVDTQHGLMVPKIRDANQKDINQLSEELKKVSDDCRNLKIDKKEFFGGSMTITSLGGIGGSFFTPIINFPEVAILGVGRSYKKQVFIDGKFVPRTMLPLSLSYDHRIIDGAEAAKFNNELKDNLGSNFAYNLSK

SEQ ID NO: 112658 - protein, 299 aa, Unknown
  Bacterial polypetide isolated from the Sargasso Sea
ASPKARKFARELGVDINEVSGSERIGRVIEKDIKHFISSKINKSNKRENEIKNKSIKMEYKHSEFGEIEIKDIPRVKKIAAPHLSNSWTNIPHVTNHDEADITELEEFRSSLTDSFTGERKKITPLAFIIKAIVLSLKKFPRFNSSIDDIENGKITLKKYFHIGIAVDTPHGLMVPKLRNANEKDINQLSIELKNVSDECRNLKIDKKEFFGGSMTITSLGGIGGSFFTPIINYPEVAILGVGRSYKKQVFLDGKFMPRTILPLSLSYDHRIIDGAEAARFNNDLKYNLGPNFAYNLAK

SEQ ID NO: 112659 - protein, 227 aa, Unknown
  Bacterial polypetide isolated from the Sargasso Sea
DLPRVKKLSGPQLVRSWTEIPHVTQHDEIDITEMEQFRTTLIDNYTGERIRISPLAFITRAVVNALKEYPNFNSSIDTATNKLIFKKYYHVGFAVDTPHGLMVPKMRNVDQMGLKEIYEELKRVSKLCKELKIDKKEFFGGSMTISSLGGIGGNFFTPIINPPEVAILGVGKTFEKVKKVNGQFIERKILPISLSYDHRVIDGAEGARFCVHLSKSLGKDFAFKLAV

SEQ ID NO: 112660 - protein, 144 aa, Unknown
  Bacterial polypetide isolated from the Sargasso Sea
IFKKYFHIGFAVDTPHGLMVPKIRNVDEMNLKEIFEELQRVSKLCKELKIDKKEFFGGSMTISSLGGIGGNFFTPIINPPEVAILGVGKTFEKIRRVNGRFIVRKMLPVSLSYDHRVIDGAEGAKFCVHLSQSLGKDFAFKLAV

SEQ ID NO: 112661 - protein, 231 aa, Unknown
  Bacterial polypetide isolated from the Sargasso Sea
IEKKDLPRVKKLSGPQLVRSWTEIPHVTQHDEIDITEMEQFRTTLIDNYSGDRIRISPLAFITRAVVNALKEYPNFNSSIDPENNKLIFKKYYHVGFAVDTPHGLMVPKIRNVDQLGLKEIYEELRKVSKQCKELKIDKKEFFGGSMTISSLGGIGGNFFTPIINPPEVAILGVGKTFDKIKKVNGQFIVRKMLPISLSYDHRVIDGAEGARFCVHLSKSLGKDFAFKLAV

SEQ ID NO: 112662 - protein, 103 aa, Unknown
  Bacterial polypetide isolated from the Sargasso Sea
LNCAKILKLIKKNFFGGSMTISSLGSIGGSFFTPIINQPEVAILGIGRAETKQVLVGDKYENKIMLPLSLSYDHRVIDGAEGARFCTHLRESLGKDFAYKLAV

SEQ ID NO: 112663 - protein, 166 aa, Unknown
  Bacterial polypetide isolated from the Sargasso Sea
VVKALKDYPNFNSSLDLRKEKLIYKKYFHIGIAMDTPHGLMVPKIRNADKKDITELGRELKKISKLCKDLKINKKEFFGGSMTISSLGSIGGSFFTPIINQPEVAILGIGKAEKKQVFVGDKYENKIMLPLSLSYDHRVIDGAEGARFCAHLRESLGKDFAYKLAV

SEQ ID NO: 112664 - protein, 226 aa, Unknown
  Bacterial polypetide isolated from the Sargasso Sea
ISDKMTSCWQNIPHVTQFDEANITELMKLRKKHNPKYEKENGKLTMTVLLIRAVEKALDEFPNFNASLNDKEIVIKSYKNIGIAVDTPSGLIVPVIKEPGEKSFLDIAQELTSIAEKARDRSLSRTDLEGGTFTISNLGGLGVGHFTPIINHPEVAILGVGRGSKKLQLNKDGKIEEILSLPLALSYDHRIIDGADGARFIKSVIKNLESISEKDMKVVNTTGEKS

SEQ ID NO: 112665 - protein, 105 aa, Unknown
  Bacterial polypetide isolated from the Sargasso Sea
MQDISLKAREGKLTAADMQGGCFTISSLGGIGGTAFTPIVNAPEVAILGVSKSDIKPKWNGKEFEPRLMVPLSVSYDHRVIDGALAARFTATLASYLADIRQIIM

SEQ ID NO: 112666 - protein, 270 aa, Unknown
  Bacterial polypetide isolated from the Sargasso Sea
RITHKDVQGHVKERLSAPSTGQGLTGTVPQIPEIDFSQFGEIEINPLSRIRKKGAEHLHRAWLNLPMVTNHDEADITELEAFRQKLKKEAAEQNIRLTMLAFLLKATASNLKKHPDFCSSLSPDGQNLIHKRYCHIGVAVDTEEGLVVPVIRDVDQKGVFELAQNLGDVSEKARNRKLKREDLQGGCFSISSLGGIGGTAFTPLVNAPEVAILGVTRSKMTPKWNGEEFIPRLTLPLDLTYDHRVIDGAAAARFLADFCTLLSDMKRLLL

SEQ ID NO: 112667 - protein, 309 aa, Unknown
  Bacterial polypetide isolated from the Sargasso Sea
HRIIKNMTDKKTIISASPKVRKLAREFGADIYQIQGSQREGRVSEEDVKSFIKDSISGKIEKKQNEPLQKYDHSEFGEIDVKPIPRIKKIAGPHLEKSWTEIPHVTQHDEADITEMEKFRKSLRDLYTGEKLSITPLAFIIRAVVKALKNYPNFNSSLDLKKEKLIYKKYFHVGIAIDTPHGLMVPKIRDADKKDITELGKELKKITKLCSELKIDKKEFFGGSITISSLGSIGGSFFTPIINQPEVAILGIGRAETKQIFMGDSYENRIMLPLSLSYDHRVIDGAEGARFCVHLKESLGKDFAYKLAV

SEQ ID NO: 112668 - protein, 166 aa, Unknown
  Bacterial polypetide isolated from the Sargasso Sea
KATAANLKKHPDFCSSLSPDGQNLIHKGYCHIGVAVDTEEGLVVPVIRDVDQKGVFELAHNLGDVSEKARSRKLKREDLQGGCFSISSLGGIGGTAFTPLVNAPEVAILGVTRSKMTPQWNGEEFIPRLMLPLDLTYDHRVIDGAAAARFLADFCTLLSDMKRLLL

SEQ ID NO: 112669 - protein, 95 aa, Unknown
  Bacterial polypetide isolated from the Sargasso Sea
GKLKPDEMQGGCISISSLGGIGGIGFTPIVNAPEVAILGVSRAQTKPCWDRTAFAPRLMLPLDLSYDHRVIDGAEAARIIAFIVAALEDPRRLLL

SEQ ID NO: 112670 - protein, 285 aa, Unknown
  Bacterial polypetide isolated from the Sargasso Sea
ALKDSVPSELVDEQISGASQLVSVPDTGSADSVTIIEIAVSVGDRVSEGDTLIVLESDKASMEIPAPASGVVTALRVSEGQQVVQGDPICEMSGGDATVSAELVPASVRSEPLKQVLAEEAVTKTGGEIEKVVVPDTGNADGVTVIEISVGVGDTVSEGDTVIVLESDKASMEIPSPVSGKVLALSVNEGDSVTRGDPVAEVEATGGPAPQANKAPQKSVQEAPTSTSPPAPILDSHVVAESTAPSVASSVHAGPAVRALARELGVNLTKVSPSGPRGRITKDDC

SEQ ID NO: 112671 - protein, 237 aa, Unknown
  Bacterial polypetide isolated from the Sargasso Sea
FAKFGEIEEKKLSRIQKLSGKNLHRNWVQIPHVTQFDEADITSLEVFRKEQNVLSEKKKLGVKITPLVFVMKAAAKVLAEFPTFNSSLSEDGESLILKKYINIGVAVDTPNGLVVPVFKYVDKKGIIELSRELMEVSKKAREGKLTASDMQGGCFTISSLGGIGGTAFTPIVNAPEVAILGVSKSEMKPKWNGKDFEPKLMVPLSMSYDHRVIDGALAARFTATLASYMSDIRQLVM

SEQ ID NO: 112672 - protein, 235 aa, Unknown
  Bacterial polypetide isolated from the Sargasso Sea
KQTTTIERYEHSEFGEIEIKDIPRLKKIAGPHLQKSWSEIPHVTQHDEADITEMEKFRKSLRDLYTGEKLSITPLPFIIRAVVKALKDYPNFNSSLDLKKEKLIYKKYFHIGIAMDTPNGLMVPKIRDADKKDITEIGHELKKTAKLCKDLKIDKKEFFGGSITISSLGSIGGSFFTPIINQPEVAILGVGRAETKQVFVGDKYENRIMLPISLSYDHRVIDGAEGARFCAHLRD

SEQ ID NO: 112673 - protein, 214 aa, Unknown
  Bacterial polypetide isolated from the Sargasso Sea
MSELIKVPDLGGEGEVIEILVKEGDQVEAEQSLAVLESDKASMEIPSPKAGTVKAIKFKLGDNLKEGDPLIELDVEGGEQAKQDDSSEQPAKAESKAEQPAEPKADTSAEQQKPAAGGGSRSEAVKVPDLGTDSARVIEILVSKGDQVEADQSLLVLESDKASMELPAPFSGVIESIDIKLEQDVKTGDVIMQMQVSGGDSEAQAESQPAEQQG

SEQ ID NO: 112674 - protein, 108 aa, Unknown
  Bacterial polypetide isolated from the Sargasso Sea
AAEMADLASRAKAGKLMPDEFTGGTFTISNLGMYRVSGFDAIINPPQVCILAVGGLEKKYREINGKPKFVKAMTLTLSSDHRVIDGAVAAQFLSSIKTFLENPYSLVL

SEQ ID NO: 112675 - protein, 226 aa, Unknown
  Bacterial polypetide isolated from the Sargasso Sea
MPRVKKLSGPQLVRSWTEIPHVTQHDEIDVTEMEQFRTSLIDNYTGEKIRISPLAFITRAVVNALKKYPNFNSSIDSQNNKLVFKKYFHIGFAVDTPHGLMVPKIRNVDEMGLKEIFEELKRVSKACKDLKIDKKEFFGGSITISSLGGIGGNFFTPIINPPEVAILGVGKTFEKIKKINGQFITRKMLPISLSYDHRVIDGAEGARFCVHLSQSLGKDFAFKLAV

SEQ ID NO: 112676 - protein, 274 aa, Unknown
  Bacterial polypetide isolated from the Sargasso Sea
IGRITKEDVQKFVKLSLKNISSNNLKATSSGIPDFPEVDFSKFGPIEIEPLSRIKKKAGFNLHRSWLNLPIVTHHDEADITDLENFRKSLKEEALKKKLKLTPLAFLIKACAVAINKHPHFNSSLTSDQENLVLKKYLNIGVAVDTQDGLVVPVIKEVEHKGLFELAKELRDISERARSNKLNTDDLQGGCFSISSLGGIGGTSFTPLVNAPEVAILGVTRSKMVPVWNGKEFLPRLMLPLDLTYDHRVIDGAQSARFMVDLCNILGDMRRMAL

SEQ ID NO: 112677 - protein, 72 aa, Unknown
  Bacterial polypetide isolated from the Sargasso Sea
FTPIINPPEVAILGVGKTFEKIRKVNGQFIVRKMLPVSLSYDHRVIDGAEGARFCVHLAESLGKDFAFKLAV

SEQ ID NO: 112678 - protein, 110 aa, Unknown
  Bacterial polypetide isolated from the Sargasso Sea
DLDAVAEKARNRTLTREDLQGSGFTISNLGGLGVGSFTPIVNSPEVAILGLSAGRKTPVFDDKGKVTQRLIMPMSLSYDHRVIDGADGARFINEVKAQFESFSETLLKEI

SEQ ID NO: 112679 - protein, 291 aa, Unknown
  Bacterial polypetide isolated from the Sargasso Sea
AVRKLAREFGVALSQVKGTGTRGRILKEDLQQHVAQILAAEPSSGGAALPAIPEQDYARFGAIEKTDRSRVDKVTADNMVRSWLNVPHVTQFDDADISDMERFRKDLKNEAADRSVRLTPLPFILKACAVALREHPKLKSSLADGGETLVMKHYCHIGMAVDTPAGLMVPVLRDVDKKSIWELAAETAAYAERAREKQLRPDDMQGGVFTVSSLGAIGGRGFTPIINAPEVAILGVGRAAVQPVWDGEVFRPQTLLPLALSYDHRVVNGGDGGRFLTELTSLLGDVKRMVM

SEQ ID NO: 112680 - protein, 292 aa, Unknown
  Bacterial polypetide isolated from the Sargasso Sea
KVRKFARELGADIVQIPGSQRGGRVTEEDVKKFVRSQVSVDEGKVEKKIYKDEYPHEAFGEIEKKDLPRVKKLSGPQLVRSWTEIPHVTQHDEIDITEMEQFRSTLIDNYTGERIRISPLAFITRAVVNALKEYPNFNSSIDSENNKLIFKKYYHVGFAVDTPHGLMVPKIRNVDQMGLKDIFEELKRVSKLCKQLKIDKKEFFGGSMTISSLGGIGGNFFTPIINPPEVAILGVGKTFDKIKKINGQFIVRKILPVSLSYDHRVIDGAEGARFCVHLSKSLGKDFAFKLAV

SEQ ID NO: 112681 - protein, 270 aa, Unknown
  Bacterial polypetide isolated from the Sargasso Sea
EGEFPEEDVKSFVKESISGKVEKKQVTTSLQYEHSEFGEVETKPIPRLKKIAGPHLEKSWSEIPHVTQHDEADITEMEKFRKSLRNLYTGEKLSITPLSFIIRAVVKALKDYPNFNSSLDLKKEKLIYKKYFHIGIAMDTPHGLMVPKIRDADKKDITELGQELKKISKLCKDLKIDKKEFFGGSMTISSLGSIGGSFFTPIINQPEVAILGIGRAETKQVFVGDKYENKIMLPLSLSYDHRVIDGAEGARFCAHLKESLGKDFAYKLAV

SEQ ID NO: 112682 - protein, 179 aa, Unknown
  Bacterial polypetide isolated from the Sargasso Sea
NQNSKEKISINDFIIKASSVSLLSVPESNVSWIEDAFRYYQYVDISVAVAVPNGLITPIIKNVENKGLELISKEIKELASRASQGKLSPEEYQGGTFTISNLGMYGIKNFTAIINPPQSMILAVGNAEKRAIIENDQIKIASIMTVTLSCDHRIIDGAIGAEWLKIFKENIENPSLMLL

SEQ ID NO: 112683 - protein, 144 aa, Unknown
  Bacterial polypetide isolated from the Sargasso Sea
NLIFKHYLNIGVAVDTQDGLVVPVIRDVEKKGLIDLAKELGEVSKRARNNKLKSSDIEGGCFSISSLGGIGGTAFTPLVNAPEVAILGVTRSKMAPVWDGKDFKPRLMLPLDLTYDHRVIDGAQAARFMVDLCKILGDMRRMSL

SEQ ID NO: 112684 - protein, 213 aa, Unknown
  Bacterial polypetide isolated from the Sargasso Sea
MVRSWLNIPHVTQFDDADISDMERFRKELKSEAADRGVRLTPLPFILKACAVALREHPKLKSSLADGGETLVMKHCCHIGMAVDTPAGLVVPVLRDVDKKSIWELAAETSAVSERAREKQLRPDDMQGGVFTVSSLGAIGGRGFTPIINAPEVAILGVGRAAVQPVWDGEVFRPQTLLPLALSYDHRVVNGGDGGRFLTELTSLLGDVKRMVM

SEQ ID NO: 112685 - protein, 273 aa, Unknown
  Bacterial polypetide isolated from the Sargasso Sea
SQREGRVSEEDVKSFVKESISGKVEKKQDTTLLQYEHSEFGEVETKPIPRLKKIAGPHLEKSWSEIPHVTQHDEADITEMEKFRKSLRDLYTGEKLSITPLPFIIRAVVKALKDYPNFNSSLDLKKEKLIYKKYFHVGIAMDTPHGLMVPKIRDADKKDITELGLEIKKIAKLCKDLKIDKKEFFGGSMTVSSLGSIGGSFFTPIINQPEVAILGIGRAETKQVFVGDKYENKIMLPLSLSYDHRVIDGAEGARFCAHLRESLGKDFAYKLAV

SEQ ID NO: 112686 - protein, 115 aa, Unknown
  Bacterial polypetide isolated from the Sargasso Sea
KKSITELSRELTVISKKARDGKLTAGEMQGGCFTISSIGGLGTTHFAPIVNAPEVAILGVSKSSMEPVWNGKEFMPRLMMPISLSFDHRVIDGADGARFITIINNMLSDIRRLVM

SEQ ID NO: 112687 - protein, 214 aa, Unknown
  Bacterial polypetide isolated from the Sargasso Sea
VRSWTEIPHVTQHDEIDITEMEQFRNSLIDHYSGERIRISPLAFITRAVIKALKKYPNFNSSIDTKNNKLIYKKYFHIGFAVDTPHGLMVPKIRNADELGLKEIFAELKRVSKLCKELKIEKKEFFGGSMTISSLGGIGGNFFTPIINPPEVAILGVGKTFEKITKVNGQFIVRKMLPISLSYDHRVIDGAEGARFCVHLAESLGKDFAFKLAV

SEQ ID NO: 112688 - protein, 230 aa, Unknown
  Bacterial polypetide isolated from the Sargasso Sea
DNIDYKKWGSVDIKKLTKIKRITGQRLTRAWQSIPHVTQFIESDVTELEKLRKDEKTKQGPKGIKITMMPYLMKASVFVLKEHPVFNSSLQNSGENIVYKKYYHIGIAVNTEKGLVVPVIKDVDKKSVLEISQELMDVSERARNKKLAPNELKGGTFTISNLGGIGGSFFTPIINPPEVAILGVSRTKEKNEKLILPLSLSYDHRVIDGAAGAAFVVAFSNVLKDIRKFK

SEQ ID NO: 112689 - protein, 220 aa, Unknown
  Bacterial polypetide isolated from the Sargasso Sea
KKKTGVNLRRAWLNLPIVTHHDDADITELEHFRKSLSEEAAKKDVKLTLLPFLLKACAAAIRKHPTFNSSLSADKENLVIKHYLNIGVAVDTPDGLVVPVIRDVEQKGLIELAKELGEASKRARTNKLKSSDIEGGCFSISSLGGIGGTAFTPLVNAPEVAILGVTRSRMVPVWEGKDFHPRLMLPLDLTYDHRVIDGAQAARFMVELCAILGDMRRMSL

SEQ ID NO: 112690 - protein, 245 aa, Unknown
  Bacterial polypetide isolated from the Sargasso Sea
TIISEIYDHSEFGEIDIKPLSRIKKIAGPHLEKSWREIPHVTQHDEADITEMEKFRKSLRDLYTGEKISITPLAFIIRAVTKALKDYPNFNSSLDLKKEKLIYKKYFHIGIAVDTPHGLMVPKIRDADKKDITELGNEIKKITKLCRELKIDKKELFGGSITISSLGGIGGSFFTPIINQPEVAILGIGRSENKQIFTGSTYENRTMLPLSLSYDHRVVDGAEGARFCAHLKESLGKDFAYKLAV

SEQ ID NO: 112691 - protein, 101 aa, Unknown
  Bacterial polypetide isolated from the Sargasso Sea
SLKAREGKLTAADMQGGCFTISSLGGIGGTAFTPIVNAPEVAILGVSKSDIKPKWNGKEFEPRLMVPLSVSYDHRVIDGALAARFTATLASYLADIRQIIM

SEQ ID NO: 112692 - protein, 261 aa, Unknown
  Bacterial polypetide isolated from the Sargasso Sea
KFVRSQVSVNEGKVERKVYNDEYPHEAFGKVEVKDLPRVKKLSGPQLTRSWTEIPHVTQHDEIDITEMEQFRNSLIDHYTGEKIKISPLAFITRAVVKALREYPNFNSSIDKESKKLIFKKYFHIGFAVDTPHGLMVPKIRNVDEMGLKEIFEELKRVSKLCKELKIEKKEFFGGSMTISSLGGIGGNFFTPIINPPEVAILGVGKTFEKIRKINGQFIVRKMLPVSLSYDHRVIDGAEGARFCVHLAESLGKDFAFKLAV

SEQ ID NO: 112693 - protein, 215 aa, Unknown
  Bacterial polypetide isolated from the Sargasso Sea
RKNLGAKFPHVTQHDEADITEMEKFRKSLRDLYTGEKLSITPLPFIIRAVVKALKDYPNFNSSLDLKKEKLIYKKYFHIGIAMDTPHGLMVPKIRDADKKDINELGQELKKISKQCKDLKIDKKEFFGGSMTISSLGSIGGSFFTPIINQPEVAILGIGRAETKQVFVGEKYENKIMLPLSLSYDHRVIDGAEGARFCAHLRESLGKDFAYKLAV

SEQ ID NO: 112694 - protein, 180 aa, Unknown
  Bacterial polypetide isolated from the Sargasso Sea
ERIRISPLAFITRAVVNALKEYPNFNSSIDTANNKLIFKKYYHIGFAVDTPHGLMVPKMRNVDQMGLKEIYEELKRVSKLCKELKIDKKEFFGGSMTISSLGGIGGNFFTPIINPPEVAILGVGKTFEKVKKVNGQFIERKILPISLSYDHRVIDGAEGARFCVHLSKSLGKDFAFKLAV

SEQ ID NO: 112695 - protein, 246 aa, Unknown
  Bacterial polypetide isolated from the Sargasso Sea
KKVYKDEYPHEAFGEVEKKDLPRVKKLSGPQLVRSWTEIPHVTQHDEIDITEMEQFRTTLIDNYSGDRIRISPLAFITRAVVNALKEYPNFNSSIDPENNKLIFKKYYHVGFAVDTSHGLMVPKLRNVDQLGLKEIYEELRRVSKQCKELKIDKKEFFGGSMTISSLGGIGGSFFTPIINPPEVAILGVGKTFDKIKKINGQFITRKMLPISLSYDHRVIDGAEGARFCVHLSKSLGKDFAFKLAV

SEQ ID NO: 112696 - protein, 150 aa, Unknown
  Bacterial polypetide isolated from the Sargasso Sea
LHPDSQRLIVKEYINVGIATNTAEGLLVPVIRGADKKGLWELSENIAELAEKARDKKLALDDLGGGTFTVSSLGSIGGTGFTPIVNAPEVAILGVGRLSTQPQWNGQEFLPRQMLPLSLSYDHRVINGVDGGEFMQLLSRLLFDVRRLAL

SEQ ID NO: 112697 - protein, 304 aa, Unknown
  Bacterial polypetide isolated from the Sargasso Sea
NFLRSHASPSIRKFARELGVNLSQVLGTGRKGRITHQDVQSFVKQVLEEVSSGGKTSTISGIPEMPEIDFSKFGSVEIKPLSRIKKKTGINLHRAWLNLPVVTHHDDADITELEHFRKSLSEEAVKKDVKLTLLSFILKACAVAIRKHPNFNSSLSADKGNLVIKHYLNIGVAVDTSDGLVVPVIKNVEQKGLLELAKELEQVSKRARTNKLKSSDIEGGCFSISSLGGIGGTAFTPLVNAPEVAILGVTRSRMVPVWDGKDFNPRLCLPLDLTYDHRVIDGAQAARFMVDLCSILADMRRMSL

SEQ ID NO: 112698 - protein, 109 aa, Unknown
  Bacterial polypetide isolated from the Sargasso Sea
MAERAQELAEKARSKKLALDDLSGGTFTISSLGAIGGTGFTPIINAPEVAILGVGKSVVQPIWQGDAFAPRLRLPLSLSYDHRVINGVDGGNFMATMTALLADIRRLTL

SEQ ID NO: 112699 - protein, 295 aa, Unknown
  Bacterial polypetide isolated from the Sargasso Sea
MGVHASPAVRRIARELDVDLSSVRATGPKNRITKEDVKRYLQGGAGASGLSVAAAPDVDFSQFGSVETVALSKIKRLSGANLHRNWVSIPHVTQFDQADVTELEVFRQAQKKIAAQQGVKLTPIVFIMKALVSSLKAYPSFNASLGSDGTNLVLKSYFHIGVAVDTPNGLVVPVIRDVDKKSLYDLAAELGVISVKAREKGLSIKEMQGGCMTISSLGGIGGTAFTPIINAPEVAIVGVSRLQKTPVYNEDNQLEQRLMMPLSLSYDHRVIDGAEAARFVVHLSSRLADIRTLLL

SEQ ID NO: 112700 - protein, 262 aa, Unknown
  Bacterial polypetide isolated from the Sargasso Sea
GSGEKGRVTKDDLHSHIKAQMYISKTNLYQPDDNIDYKKWGSVDIKKLTKIKKITGQRLTRAWQSIPHVTQFIESDVTELEKLRKDEKTKQGPKGIKITMMPYLMKASVFVLKEHPVFNSSLQNSGENIVYKKYYHIGVAVNTENGLVVPVIKDVDKKSVLEISQELMDVSERARNKKLAPNELKGGTFTISNLGGIGGSFFTPIINPPEVAILGVSRTKEKNEKLILPLSLSYDHRVIDGAAGAAFVVAFSNVLKDIKKFK

SEQ ID NO: 112701 - protein, 437 aa, Unknown
  Bacterial polypetide isolated from the Sargasso Sea
MTLSKIEEIKIPDIGDFDAVEVIEIAVSIGDSVQPEDTLITVESDKASMDIPSPSSGEIKEIKVNIGDKVSEGTPIINLLIVEEGVKKDNKTSKEINNEEIEEKVTSEVDKQTENKVVPPAPPKTPESSQLAGQSKSAKAHASPSVRRFARELGVDLGLVYGKGPKNRILKEDVKAFTKSIMSGEKLTNKGAFSTPEIPPVDFSKFGEVEQKPLTRIRRIAGQSLHRSWITIPHVTQFDEADITELEKFRKSKLESAKKDGVKLTLVTFLIKAVVVALQKFPEFNSSIEPSGENLIIKKYFHVGVAVNTKNGLLVPVLKDVDKKGLFEIATEITELSNKAREGKIAPKDLQGGCFTISSLGGIGGLHFVPIINAPEVAILGVSRAAMKPVYKNESFEPRLILPFSLSYDHRVIDGVAGAQFTQFLSTVLTDIRHILL

SEQ ID NO: 112702 - protein, 417 aa, Unknown
  Bacterial polypetide isolated from the Sargasso Sea
MAEKKLLVPNIGDFKNVEVIEVLVKSGQQIKKNDPLITLESDKSSVEVPATDEGKINKIIVKVGDKVSEGSEILSLDSVSKKEESKKTVEVKENIPEKKIVTETPKEIAPVVKKLSKDGVSSASPKVRKFARELGADIVQIPGSQRAGRVTEDDVKKFVRSQVSVNEGKIEKKVYKDEYPHEAFGEVEKKDLPRVKKLSGPQLVRSWTEIPHVTQHDEIDITEMEQFRTNLIDNYTGERIRISPLAFITRAVIKALKKYPNFNSSIDTKNNKLIYKKYFHIGFAVDTPHGLMVPKIRNADGLGLKEIFEELKRVSKLCKELKIEKKEFFGGSMTISSLGGIGGNFFTPIINPPEVAILGVGKTFEKIRKVNGQFIVRKMLPVSLSYDHRVIDGAEGARFCVHLAESLGKDFAFKLAV

SEQ ID NO: 112703 - protein, 280 aa, Unknown
  Bacterial polypetide isolated from the Sargasso Sea
MIEVRGTGSKSRILKDDVKAFVKSILSGSNNPSIGLPKILSLDYAKYGEVSYQPLTKIQKISGPRLQASWINLPHVTQHDLADITEMEADRLRIKKLKQNKDIKISPLAYVMKACSLVLKDFEKINSSLAEDGHSIILKSYINIGFAADTENGLVVPVIKDVDKKSLIEIAKELLRLSEKARAGKLSSDEMQGATFTISSLGGIGGTAFTPIINAPEVAILGLSRSTTQPVWNGSEFEPKLMLPLSFSYDHRVIDGAYAVRFTTALCDALKKAKNLSKKA

SEQ ID NO: 112704 - protein, 236 aa, Unknown
  Bacterial polypetide isolated from the Sargasso Sea
EAFGEIEKKDLPRVKKLSGPQLVRSWTEIPHVTQHDEIDITEMEQFRTSLIDHYSRQRIRLSPLAFITRAVVKALKRYPNFNTSIDTNSGKLIFKKYFHIGFAVDTPHGLMVPKIRNVDQLGLKEIFGELKRVSKLCKELKIDKKEFFGGSITISSLGGIGGSFFTPIINPPEVAILGVGKTFEKVKKVNGQYINRKILPISLSYDHRVIDGAEGARFCVHLAESLGKDFAFKLAV

SEQ ID NO: 112705 - protein, 183 aa, Unknown
  Bacterial polypetide isolated from the Sargasso Sea
MNKENEKAGVKVTMLAFVIKAVVAALKQFPTFNASLDGDNLVFKQYFHIGFAADTPNGLVVPVIRDADKKGLIDIAKEMTELSKAARDGKLKPDQMQGGCFSISSLGGIGGTNFTPIINAPEVAILGLSRGAMKPVWDGKQFVPRLILPLSLSYDHRVIDGAAAARFNAYLGAILADFRRVIL

SEQ ID NO: 112706 - protein, 421 aa, Unknown
  Bacterial polypetide isolated from the Sargasso Sea
MAKSVKEIILPDLGEGIDGAEVSEVSVAVGDTLSQGDTIVVLESDKASMEIPSDDDGIVKEVLVVTGKEINVGDLLIKLEIEQSSPSKENKESEVKSDANEPGTTETAQPTESKPKPNPQLPVDGKIFASPGVRRLARELSINLQHITASGDKGRITKEDLNNYIKLQMANQQGVAQSINKEIDYTQWGAIEEIKLSKIKKITGRRLQGAWQNIPHVTQFDEADITDLDTKRRKMKQESEKKDIKITFLPFLMKATVEVLQSMPEFNSSLNHTSETLIIKKYYNIGIAVDTPNGLIVPVVRDVDKKTIFDLSVELADISDKARSNALKPKDLSGGTFTISSLGGIGGKYFTPIINPPEVAILGISKSVWENIYNHESKSSEPRYIMPFSLSYDHRIIDGAAAAKFTSAFSNTIEELSFLKK

SEQ ID NO: 112707 - protein, 549 aa, Unknown
  Bacterial polypetide isolated from the Sargasso Sea
MSQAIEVKVPDIGDYKDVPVIEIGVKVGDTVEPEQSLVTLESDKATMDVPSPVGGVVKEIKVKVGDSVSEGSLIILLEGGAAAQANGSAAPAAAPAPAAAPAPAAAAPAAAPAAAGGTLEVKVPDIGDYKDVPVIEIGVKVGDTVEKEQSLVTLESDKATMDVPSPAAGVVKDIKVKVGDSVSEGTLIVLLEAAGAAAAAPQASAPAPAAAAPAPAPAAAPAQAAPAPAAAAPAPAAAQSGEYRASHASPSVRKFARELGVEVARVQGSGPKGRITKEDVTSFVKGVMTGQRAAPAAAAAPAGGGELNLLPWPKVDFSKFGPFEAKPLSRIKKISGANLHRNWVMIPHVTNNDEADITELEALRVQLNKEHEKAGVKFTMLAFVIKAVVAALKKFPTFNASLDGDNLVFKQYYHIGFAADTPNGLVVPVIRDADKKGLVDIAKEMAELSKAARDGKLKPDQMQGGCFSISSLGGIGGTNFTPIINAPEVAILGLSRGQMKPVWDGKQFVPRLTLPLSLSYDHRVIDGAEAARFNAYLGALLADFRRIIL

SEQ ID NO: 112708 - protein, 560 aa, Unknown
  Bacterial polypetide isolated from the Sargasso Sea
MNQIKQVQVPDMGDFQDVEIIEVHIQAGDRVESENPLITLESDKATMDVPAPFSGKVENVLIKVGDKVSEGTPIVDLQTSDDAKAEEISNTDEKRDTQNLEIQQDSGNLSSSSESPEIQTDSGESTKANSFSSEPELMLMPDMGDFTEVDIIEVLVKTGDQLKPEDSVITLESDKATMDVPAPLKGTIQEMFVKTGQKISKGQKIALILPDSETANQAIQKTDTNVKSSVSEVSKKPPTEDRTSTIRRPPVTEPIDHQQFLKAHASPSVRKFARELGVDLSRVNGSGRKGRITHEDVQGHVKERLSAPSTAQGLTGAVPQIPEIDFSQFGEIEINPLSRIRKKGAEHLHRAWLNLPMVTNHDEADITELEAFRQKLKKEAAEQNIRLTMLAFLLKATAANLKKHPDFCSSLSPDGQNLIHKRYCHIGVAVDTEEGLVVPVIRDVDQKGVFELAQNLGDVSEKARSRKLKREDLQGGCFSISSLGGIGGTAFTPLVNAPEVAILGVTRSKMTPQWNGEEFIPRLMLPLDLTYDHRVIDGAAAARFLADFCTLLSDMKRLLL

SEQ ID NO: 112709 - protein, 416 aa, Unknown
  Bacterial polypetide isolated from the Sargasso Sea
MIKEIKLPDLGEGIDGAEISEVPVAVGDTVSPEDTVLVLESDKASMEIPSEMSGVVSEILISEGEEVTTGQLLLKIEVEEGSVENEKSAPEKIEDVPKEDVLEQVQKPTFSPDSEEKSSSSVFASPGVRRLARELGINLEVISGSGQKGRITKDDLHGYIKLQMSMSGGTVPKVKKEIDFSKWGDIEVQKLTKVNRITGDRLQQAWQEIPHVTQHNDADITELEKVRKQLKEEGSQKDIKVTFLPFLLKAVITVLKDIPKFNSSLDHTGENLVLKQYYHIGIAVDTPHGLTVPVVKDVDKKDIFELSKDLMDLSEKARNKKLKPEDLQGSTFTVSSLGGIGGTAFSPIVNPPEVAILGVSKSEWRPVYDLKTEEFIPRYIMPFSISYDHRVVDGAAGASFVERFSQALKDTDSMVG

SEQ ID NO: 112710 - protein, 96 aa, Unknown
  Bacterial polypetide isolated from the Sargasso Sea
KIDKKEFFGGSMTISSLGGIGGNFFTPIINPPEVAILGVGKTFDKIKKVNGQFIVRKMLPISLSYDHRVIDGAEGARFCVHLSKSLGKDFAFKLAV

SEQ ID NO: 112711 - protein, 147 aa, Unknown
  Bacterial polypetide isolated from the Sargasso Sea
NKLIFKKYYHVGFAVDTPHGLMVPKLRNVDQLGLKEIYEELRRVSKQCKELKIDKKEFFGGSMTISSLGGIGGNFFTPIINPPEVAILGVGKTFDKIKKINGQFITRKMLPISLSYDHRVIDGAEGARFCVHLSKSLGKDFAFKLAV

SEQ ID NO: 112712 - protein, 140 aa, Unknown
  Bacterial polypetide isolated from the Sargasso Sea
YYHVGFAVDTPHGLMVPKIRNVDQLGLKEIYEELKRVSKQCKELKIDKKEFFGGSMTISSLGGIGGNFFTPIINPPEVAILGVGKTFDKIKKVNGQFIERKMLPISLSYDHRVIDGAEGARFCVHLSKSLGKDFAFKLAV

SEQ ID NO: 112713 - protein, 573 aa, Unknown
  Bacterial polypetide isolated from the Sargasso Sea
SESKSEAAPAASGNSEVIEVAVPDIGSDDEVDVIDVLVSVGDTIEKEDGLITLETDKATMDVPSTHAGTVKEVFISTGDKVKEGTVVIKLEVAGSGSSSSESASSDASSEASAPAAQESSKQESAPAASASNETIEVAVPDIGEDGEVDVIDVLVSVGDTVEKEDGLITLETDKATMDVPSTHAGTIKEVFIKAGDKVKQGTLVVKLETSGGSSSSAAEKPAEAPKQEETKQDSQQDEAQQASQQEASQGRSPVPPAPEAKNTGKAHASPSVRRIAREFGVDLTQVNGSGPKNRILKEDVQAYVKAELAKPRTAAASGSAPVGDNVLQIVPVKPVDHSKFGEIEEQKLSRIQKISGPFLHRNWATIPHVTQFDEADITEVEEFRKEQNAYHAKIKSGLKITPLVFVMKAVAKALEKYEVFNSSLSDDGESLIIKKFINIGIAVETPGGLVVPVIRDVNKKGIEQLSQELIETSKKAREGKLKAADMQGGTFTISSLGGIGGTAFTPIVNAPEVAILGVSKSEMKPKWNGKEFEPRLMVPLSLSYDHRVIDGAVGARFSTEVAANLTDLRRIIL

SEQ ID NO: 112714 - protein, 633 aa, Unknown
  Bacterial polypetide isolated from the Sargasso Sea
MSKQIMVPDIGADEVEVTEIMVAVGDKVELDQSIIAVEGDKASMEVPAPSAGIVKEILIKVGDKVATGSQIMIFEAEGAAAPAPVQAAAPVAAAPAAAPAAAARKDVHVPDIGDDEVDVTEIMVAVGDMVEADQSIIAVEGDKASMEVPAPFAGRVVEIKVAAGAKVSTGSLVMVFEVAGAAPAVAAAPAQAAAPVAAAPVAAAAKEVNVPDIGGDEVEVTEIMVAVGDKVEADQSLIAVEGDKASMEVPAPFAGVVKEIKVKAGDKVSTGSLIMVFEVAGAAPDAAAAPVAQAAAPVAAAPVAAAPAPVAQAAAASDFVANDAYVHASPAVRRLAREFGVNLAKVKASGRKGRIVKEDVQAYVKDAVKRAESAPAAGQGTGNGNGMSVLAWPKVDFSKFGDVEEVDLTRIQKISGPNLHRNWVMIPHVTQFDEADTTELEVFRKEQNAMLEKQKADVKITPLVFILKAAAKALEAHPRFCSSLSEDGSKLIMKKYIHIGVAVDTPNGLVVPVVRDVNKKGIMELSRDLAEISKKARAGKLTAADMQGGCFTISSLGGIGGTSFTPIVNAPEVAILGVSKSEMKPKWNGKEFAPRLMLPLALSYDHRVIDGADGARFITTMNGVLSDIRRLVL

SEQ ID NO: 112715 - protein, 400 aa, Unknown
  Bacterial polypetide isolated from the Sargasso Sea
MRLPDLGEGIDFATISEIGVAVGQTIKHDDIILVLESDKASMEIPSEVSGVVKSVDVKQGQEVKTNDLLIAIEVENGNETTVEKEDEKEDIKTSSTPALSKKKKETPLINKPTSDGVYASPGVRRLARELEINLNTISGSGEKGRVTKDDLHSHIKAQMYISKTNLYQPDDNIDYKKWGSVDIKKLTKIKRITGQRLTRAWQSIPHVTQFIESDVTELEKLRKDEKTKQDPKGIKITMMPYLMKASVFVLKEHPVFNSSLQNSGENIVYKKYYHIGIAVNTENGLVVPVIKDVDKKSVLEISQELMDVSERARNKKLAPSDLKGGTFTISNLGGIGGSFFTPIINPPEVAILGVSRTKEKNKKLILPLSLSYDHRVIDGAAGAAFVVAFSNVLKDIKKFK

SEQ ID NO: 112716 - protein, 551 aa, Unknown
  Bacterial polypetide isolated from the Sargasso Sea
MRRFFVSELIRVPDIGSGEGEVIELFVKVGDTVEADQSILTLESDKASMEIPAPKAGVVKSLKVKLGDRLKEGDELLELEIEGAADAAPAAAAPAAAAPAPAAEKPAAAEAAPAPAAAPAAATVQDIHVPDIGSSGKAKIIELLVKVGDTVEADQSLITLESDKASMEIPSPAAGVVESIAVKLEDEVGTGDFILKLKVQGAAPAAAPAPAAAPAAKAEAAPAAAAPAPAAKAEAAPAPAAAAPAPAPSGAKVHAGPAVRQLAREFGVELSAVAASGPHGRVLKEDVQVYVKAMMQKAKEAPAAGGATGGSGIPPIRTVDFSRFGEIEEVPMTRLMQIGAAGLHASWLNIPHVTQFDQADITDLEAFRVAQKAVAEKAGVKLTVLPLLLKACAHLLKELPDFNSSLAPSGKAIIRKKYVHIGFAVDTPDGLLVPVIKNVDQKSLLQLAGEAAALAAKARDKKLTPDDMQGACFTISSLGHIGGTGFTPIVNAPEVAILGVSKATIQPVWDGKAFQPKLMLPLSLSYDHRVINGAAAARFTQRLSQLLNDIR

SEQ ID NO: 112717 - protein, 260 aa, Unknown
  Bacterial polypetide isolated from the Sargasso Sea
MIHSSSIIDKDALIGKDVKIGPFCYIGPKVQIADNVELISNIHIEGNTKIGKGTKIYPFASIGTFPQDLKYKGEKNSLEIGENNIIREYVTINPGTKGGGEKTIIGNNCLLMISSHVAHDCKIGNNVVIANNVPLGGHVTVEDSVVIGGNSAVQQFTRIGRLAMIGGMTGVLKDVIPFGLSFGNRNYLRGINLIGLKRKKYENKKIMELDTAYKKIFSSKNLHENLSEINGEYKDNDLVTEVINFISKDKKRPICSPQTE

SEQ ID NO: 112718 - protein, 172 aa, Unknown
  Bacterial polypetide isolated from the Sargasso Sea
EYVTINLGTKGGGGLTKVGKNCLLMIGTHIAHDCIIGDNVIFANHSTLAGHVIVENNVVVGALSAIHQFSRIGEGAMIGGMSGVTADVIPFSTVMGNRAKLSGINLVGLRRNMFQRDEINELRKVFKYIFFNKKNTFEARIKEIKKKKLKFYTIRKILSFHQAETRRSFIMP

SEQ ID NO: 112719 - protein, 160 aa, Unknown
  Bacterial polypetide isolated from the Sargasso Sea
MTSIHKTAIVSPKSNIDDSVEIGAYSLIGDDVVIGKNTIIDSHVVIKGKTKIGQDNHFYPFSSIGDDPQDMKYSNENTEVEIGDRNTIREYTTINKGTIQDVGVTRMGNDNWIMAYVHIAHDCQIGNNTIFANNTTLGGHVEVGDYVIFGVFLVLINFVK

SEQ ID NO: 112720 - protein, 240 aa, Unknown
  Bacterial polypetide isolated from the Sargasso Sea
MKIHSTAIIHEKSKIDDSVEIGPFCIIDEDVEIKKGTKLLSHVVLRGPTIIGEDNIFYQFSTIGEDTPDKKFKGEKTKLEIGNRNIFREGVTVHRGTIQDKSITSIGSDNLLMAYSHVAHDCVVGNGNVFANNAGIAGHVNVGNNITIGALTTIHQFCNIGDYSFIGMNTSINMDIPAFVKVAADPARIIGLNSVGMSRNDISSESISLIKKAYKLVYRKGLKIDEAIKKSKELNKDQND

SEQ ID NO: 112721 - protein, 227 aa, Unknown
  Bacterial polypetide isolated from the Sargasso Sea
MIHKSSVIDTKAKIGKDVKIGPFCFIGPKVQLDDRVELISNVHIEGNTKIGKMTKIYPFASIGTPPQDLKYKGEPNSLVIGENNVIREYVTINPGTDGGGSKTFVGNNCLFMISSHVAHDCKIGNNVVIANNVPLGGHVTIEDSVVIGGNSAVQQFTRIGRLAMIGGMTGVLKDVIPFGLSFGNRNYLKGINLIGLRRKKYDNKKIMELDKAYKEIFSSKNLQENIA

SEQ ID NO: 112722 - protein, 190 aa, Unknown
  Bacterial polypetide isolated from the Sargasso Sea
MIHKTAIVDSKAKISDNVKIGPYSIIGPDVEIGAKSVLYSHVNIVGNTKIGINNQIYPFSSIGTPPQDLKYKGEKNSIIIGDNNKFREYVNINPGTEQGGGVTKIGDNNLFMVYCHVAHDCKISNNIVLANNVQVGGHVSIEQNAIVGGSCAIHQFSRIGESSMIGGMTGVISECNSIWLIYGKQKQLTG

SEQ ID NO: 112723 - protein, 259 aa, Unknown
  Bacterial polypetide isolated from the Sargasso Sea
MIHKTSVIDKKAKISDNVKIGPFCYVGPNVELSEGVELVSNVHIEGFTKIGKGTKIFPFASIGTQPQDLKFKNEKTTLSIGEHNIIREYVTINPGTEGGGSKTIIGNSCLFMISSHIAHDCKIGNNVIIANNVPLGGHVTIEDSVVIGGNSAVQQFTRIGRLAMIGGMTGVLKDVTPFGLSIGNRNYLQGLNLIGLRRKKYDNKKIMGLDRAYKEIFSSKNLHENLSKINGEHKDNELVLEVIRFIEKDKKRPICSPQN

SEQ ID NO: 112724 - protein, 108 aa, Unknown
  Bacterial polypetide isolated from the Sargasso Sea
MKIHPTSIIHDNSKIDDSVEIGPFCIIDEGVEIKKGTQLLSHVVLRGPTIIGEDNVFYQFSTIGEDTPDKKFKGEKTKLEIGDRNIFRERVTVHRGTVQDKSLTSIGS

SEQ ID NO: 112725 - protein, 237 aa, Unknown
  Bacterial polypetide isolated from the Sargasso Sea
KIHPTSIIGENCVIGENTTIGPFCVIEDNVKIGNDNIIYSSTSIGSYTEIGSGNKFFPYSFIGSIPQDLKYKGENSRLLIGNNNTFREHCTVNTGTSADNMETTVGNSSLFMTGVHIAHDCKIGDQVIFANQVTLGGHVEVEDNAVIGGLSAVHQFCRIGKLAMIGGMSAIENDIIPYGLAIGNRAKVTGINIIGLRRANYDNNIIREYSSTVEKIFNGQSINVEKESARNNDNVLV

SEQ ID NO: 112726 - protein, 214 aa, Unknown
  Bacterial polypetide isolated from the Sargasso Sea
MIHKSSVIDPKAKVENNVKIGPFCFVGENVHLKEGVELISNVHIEGNTKIGKFTKLYPFSSIGTSPQDLKFKGEKNSLDIGEYNTIREYVTINPGTAGGGGKTVIGNNCLFMISSHIAHDCNIGNNVIIANNVPLGGHVTIEDSVIIGGNSAVQQFTRIGRLAMIGGMTGVLKDVIPFGLSFGNRNYLKGINLVGLRRKKYDNKKIIELDRAYK

SEQ ID NO: 112727 - protein, 259 aa, Unknown
  Bacterial polypetide isolated from the Sargasso Sea
MIHKSSVVDPKAKISKNVKIGPFCYIGPNVILNDAVELVSNVHIEGNTKVGKGTKIFPFASIGTQPQDLKFKNEKNSLEIGENNLIREYVTINPGTAGGGSKTIVGNNCLFMISSHVAHDCKIGNNVIIANNVPLGGHVTIEDSVVIGGNSAVQQFTRIGRLAMIGGMTGVLKDVIPFGLSIGNRNYLEGLNLIGLRRKKYENQKIMGLSKAYKEIFASKNFYENLSKINGEHKSNELVKEVIAFIEKDKKRPICSPKS

SEQ ID NO: 112728 - protein, 181 aa, Unknown
  Bacterial polypetide isolated from the Sargasso Sea
GKDNKFREYVNINPGTEQGGGITKIGNNNLFMVYCHVAHDCNLSNNIVLANNVQVGGHVHIQDNAIVGGSCAIHQFSRIGESSMVGGMTGVLSDVIPFGLSIGNRNNLVGLNLIGLRRAKISNDDIKIMQNAYNLIFETENFRSNIDNLNSEIKNNIFVNKIVNFITSDKKRPISLPVNIK

SEQ ID NO: 112729 - protein, 131 aa, Unknown
  Bacterial polypetide isolated from the Sargasso Sea
MIHKTAIIDPKAKLDKNVQVGPYSIIGPNVEIGENTIIQSHVNISGKVKIGKGNKIYPFVSINDPQDLKYAGEQTNLTIGDNNKIREYVTINPGTAGGGGETVIGSNCLFMISSHIAHDCKVGNNVIIANN

SEQ ID NO: 112730 - protein, 142 aa, Unknown
  Bacterial polypetide isolated from the Sargasso Sea
MIHNSSVIEKGSKIGKNVKIGPFCYIGPKVQISDGVELSSNIHIEGNTKIGKGTKIFPFASIGTFPQDLKYKGENNSLEIGENNTIREYVTINPGTEGGGGKTVIGNNCLFMISSHVAHDCNIGNDVVVTNNVPLGGHVTVE

SEQ ID NO: 112731 - protein, 197 aa, Unknown
  Bacterial polypetide isolated from the Sargasso Sea
IGSAPQDLKYKGEKSFLIIGNNNTFRENVTVNPGTEGGGLYTTIKDNCLLMVGAHVAHDCIIGSNIILANNATLAGHVEIDNNTIIGGNSAIHQFVKIGNNAMVGGMSGLEKNLIPYGLYLGIRSNMKGLNLIGLKRKGLENSKIIILNNFIEDIFNQNDSIENNINKINNEVKSLEEVKEIIDFINKSNKRGLVTL

SEQ ID NO: 112732 - protein, 254 aa, Unknown
  Bacterial polypetide isolated from the Sargasso Sea
MHKHTLQSYAKINLFLEVIKKLKNGYHDLSSIITRISISDKIKIDIADVFSVKFIGPFCSQVSQESNIHTLFQFLLDNNFINHSNYAILIDKQIPVGSGLGGGSSNVAEILKYLMSEGALSKSQCLFAAKELGSDIEFFLEEGSALITGTGSVKRRINLFSDKIFLIIYPQILMSTKIIFEQHNILSKSNFLYEGQTQISDILQDTSNDLEKTAITLHQETGMAKQFLENDEHCEFARMTGSGSAFFGCYDDEA

SEQ ID NO: 112733 - protein, 152 aa, Unknown
  Bacterial polypetide isolated from the Sargasso Sea
MIHKSSVIDTKAKIGKDVKIGPFCLIGPNVQLEDGVELISSIHIEGNTKIGKGTKIYPFASIGTDPQDLKFKGEQNSLDIGEYNVIREYVTINPGTAGGGSKTVIGNNCLFMISSHIAHDCKIGNNVVIANNVPLGGHVTIEDSVVIGGNSA

SEQ ID NO: 112734 - protein, 203 aa, Unknown
  Bacterial polypetide isolated from the Sargasso Sea
FSFASIGSDPQDLKFNGEKTEIIIGESCKIREYCTINPGTTGGGGVTKVGNDCLLMVGTHVAHDCLISDNVIFANHSTLAGHVNIEKNVVVGALSAIHQFTRIGEGSMIGGMSGITGDVPPFCTAMGNRAKLNGLNVVGLKRNEVSKIEISELRKVYNYIFGSNELTFKERLKEIKAEKTGFYTINKLLDFISGESNRSFCLP

SEQ ID NO: 112735 - protein, 152 aa, Unknown
  Bacterial polypetide isolated from the Sargasso Sea
NLLMVYCHVAHDCMISNNIVLANNVQVGGHVTIQDNAIVGGSCAIHQFSRIGEYAMIGGMTGVLSDVIPFGLSMGNRNNLMGLNLIGLRRSKVSNENIKKIQLSYEIIFKTPSFRENIEQLNNDLKENEFVKKILSFINTDKKRPISLPLNK

SEQ ID NO: 112736 - protein, 158 aa, Unknown
  Bacterial polypetide isolated from the Sargasso Sea
MIHSSSVIDKKAKISKNVKIGPFCFVGPEVQLLDNVELVSHVHIEGNTKIGKGTKIFPFASIGTQPQDLKFKNEKNSLTIGEQNIIREYVTINPGTEGGGYKTEIGNNCLFMISSHIAHDCKIGNNVIIANNVPLGGHVTIEDSVVIGRHSAVHNLQE

SEQ ID NO: 112737 - protein, 244 aa, Unknown
  Bacterial polypetide isolated from the Sargasso Sea
MIHSTAIVDPKAKISNKVKIGPYSFIGPNVEIGEGTLVQSHVNITGDTKIGLNNKIYPFASIGNDPQDLKFKGEKTKLEIGDNNKIREYVTINPGTKGGGGITKVGSNCLFMVSAHIAHDCLVGDNVILANNVPLGGHAHVDDNAIIGGNSAVQQFTRVGKFAMIGGMCGVVRDVIPYGIAHGNRSVLQGLNLIGLRRQDIPNKEIMKLSDAYKEIFKNENLTENLSNLPSELKKNKLVMEVVN

SEQ ID NO: 112738 - protein, 190 aa, Unknown
  Bacterial polypetide isolated from the Sargasso Sea
DKKYDGEATTLEIGKNNIFREGVTVHRGTVQDKSKTAIGSQNLFMAYVHIAHDCIVGDNNVFANATCLAGHVKVGNHVVLGGVTLVHQFCSLGDHSFTGINTIITMDVPAFVKVAANPARPIGLNTVGMQRNNFDNDSVNLIKKAYRIIYRKGYSLDEAIKRLHLLNQDKNPALTTFISSIERSERGLLR

SEQ ID NO: 112739 - protein, 259 aa, Unknown
  Bacterial polypetide isolated from the Sargasso Sea
MIHNSSIIDKKTKLSDNVKIGPFCYVGPDVELSDGVELISNVHIEGNTKIGKNTKIFPFASIGTQPQDLKFNNEKNSLVIGENNIIREYVTINPGTSGGGTKTIIGDNCLFMISSHIAHDCKIGNNVIIANNVPLGGHVTIEDSVVIGGNSAVQQFTRIGRLAMIGGMTGVLKDVTPFGLSIGNRNYLQGINLIGLRRNKYDNKKIMGLDKAYKEIFSSKNLHKNLSKINGEFKDNELVTEVIKFIEKDKKRPICSPQN

SEQ ID NO: 112740 - protein, 171 aa, Unknown
  Bacterial polypetide isolated from the Sargasso Sea
MIHNSSFIEKRAKIGKDVKIGPFCYVGPDVQLEDGVELVSNIHIEGNTLIGKKTKIFPFASIGTQPQDLKFKGEKNNLKIGENNTIREYVTINPGTEGGGGKTVIGNNNLLMISSHVAHDCHIGNNVVIANNVPLGGHVTIEDSVVIGGNSAVQQFTRIGRLAMIGGMTGV

SEQ ID NO: 112741 - protein, 147 aa, Unknown
  Bacterial polypetide isolated from the Sargasso Sea
MIHSSSVIDNKAKIGKNVKIGPFCYVGPKVQINDDVELISNVHVEGNTKIGKGTKIFPFSSIGTQPQDLKYKGENNSLEIGEQNTIREYVTINPGTEKGGGKTVVGNNCLFMISSHIAHDCHVGNDVVIANNVPLGGHVTIEDSVVI

SEQ ID NO: 112742 - protein, 127 aa, Unknown
  Bacterial polypetide isolated from the Sargasso Sea
MSTDLIDGSSQIHKTAEIGSNVRIGPWCSIGKNVKIGDGSILESHIIIRSNTKLGRNNRIFQFSSIGEDPADKKFQGEDTWLEIGDNNVFREGVTAHRGTGSGGGLTKIGNGNLLMPYVHIAHDCDV

SEQ ID NO: 112743 - protein, 221 aa, Unknown
  Bacterial polypetide isolated from the Sargasso Sea
MIHDTAIISKKARIDSDVSIGAYSVIEDEVQIDSGTKIESHVVIQGPTKIGKNNHIFSFAAIGGDPQDKKYNNEVTSLEIGDNNTIREYCTINRGTTQDSKKTLLGNNNWIMAYVHIAHDCVVGNNVIFANNATLAGHVRVDDWAIFGGFTGAHQYTRIGAHSFIGMNTLTTKDIPAYVMAEGQPIKPRGVNIEGLRRRGFNQKQIKNIKDAYRILYRKDL

SEQ ID NO: 112744 - protein, 151 aa, Unknown
  Bacterial polypetide isolated from the Sargasso Sea
MIHKSSVIDTKAKIGKDVKIGPFCFVGSNVQLEDGVELISSIHIEGNTKIGKGTKIYPFASIGTTPQDLKYKGEDNSLEIGEYNVIREYVTINPGTAGGGGKTVVGNNCLFMISSHVAHDCKIGNNVVIANNVPLGGHVTIEDSVVIGGNS

SEQ ID NO: 112745 - protein, 114 aa, Unknown
  Bacterial polypetide isolated from the Sargasso Sea
NPSARPILKGEVALMLAEPRIQLTSIKRKTTQSRVPLNYDRKLFARLKTLRRTIAEEQDVPPYLVFNDATLAEMAAMMPTSPGEMLAVNGVGERKLSRFGGEFLDEIAAYLAGE

SEQ ID NO: 112746 - protein, 192 aa, Unknown
  Bacterial polypetide isolated from the Sargasso Sea
PDKKYKGEKTKLLIGKKNIFREGVTIHRGTIQDKNETIIGNENLFMAYTHVAHDCIVGDKNVFANNAGIAGHVVVGNNITIGALTTIHQFCKIGDFSFVGMNTSITMDVPAFVKVAADPARVVGLNSVGMTRGGIDQKTIALIKKAYKVLYRRNLKIQEALSKLEIIYKETSNENLNVFIKSISLSERGILR

SEQ ID NO: 112747 - protein, 258 aa, Unknown
  Bacterial polypetide isolated from the Sargasso Sea
MNSSISNKAKIHPSTFIGPNCIIDDNVEIGMNNKLIANIVITGNTKIGNNNTFYPFSTIGSDPQDLKYKGEKSFLYIGNNNTFREYVTVNTGTEGGGLKTIIENNCLFMVSSHIAHDCIIKSNVILANNATLAGHVEIFENAVLGGNSAVHQFVKIGRYAMIGGMSGVEKNIIPYSLYTGIRSELKSMNLVGLKRKGLNSKKINYIIRIVKKIFHSGDSIENNIHSLSKDMLILDEISEIIEFIKKYQKRGICKLIDE

SEQ ID NO: 112748 - protein, 156 aa, Unknown
  Bacterial polypetide isolated from the Sargasso Sea
MIGNNCLMMIGTHIAHDCLIGNNVIFANHSTLAGHVILKDNVVVGALSAIHQFSKIGEGAMIGGMSGVTADVVPYSTVVGNRAKLSGLNILGLKRRNIEKKEISELRKVYKYIFHNNQNTLRERVINMKQKEFKEQTIQIFLEFLSEDSDRSFTLP

SEQ ID NO: 112749 - protein, 256 aa, Unknown
  Bacterial polypetide isolated from the Sargasso Sea
MIHSTALIHPSASIADNVEIGAHTIVDKDVQIGPGTVIKENVVIRENTTIGENNLFFQFATIGEVPQDLKFNNEKTTCTIGNNNIFREYCSIHRGTKDGISDTFIGDNNLFMAYTHVAHDCVIKNYCILSNAASLAGHVNLDSYVSLGGFTLVHQFCRIGEYAFSGLGTVISQDVTPYTLVAGNHAKAYKINSIGLKRKGFDSESISSLEKCFKLFVKSKKTSDEKNQIYKENEISNEYTDKFVNFIANSDRGITR

SEQ ID NO: 112750 - protein, 241 aa, Unknown
  Bacterial polypetide isolated from the Sargasso Sea
MIDSKSLIHESASIADNVKIGAYAVIDKNVSIGEGTIIKEHAVIRENTTIGKNNRIYQFATIGEEPQDLKFHDEHTTCTIGDNNTIREYSSIHRGTKDGISDTEIGDNNLLMAYTHVAHDCIIENHCILSNAASLAGHVKLESNVSLGGFTLVHQFCHIGKYAFSGLGTVISQDVTPYTLIAGNHAKAYKINSEGLRRKSFNDATIRDLEKCFKIFIKSTKPLSERLSLFEELNITCNHVN

SEQ ID NO: 112751 - protein, 210 aa, Unknown
  Bacterial polypetide isolated from the Sargasso Sea
CSDTTIGEGCKILHSSSIGEIPQDLKFGGERTKTFIGKRTRIREYVTINRGTKALGETRVGSDCLLMASTHVAHDCIVGDNVIMSNLSTLGGHVEVGDWAILGGGVLVHQFTKIGSHVLIGGGFRAVQDVPPFIIAADHPLIYKGLNLIGLKRRGFSLDERQSIKKIYKLYFKSGLNRSDALNKIYTEIKSSPVKNQIVEFIKASDRGII

SEQ ID NO: 112752 - protein, 231 aa, Unknown
  Bacterial polypetide isolated from the Sargasso Sea
QIEKIINLFHTYQLLGNTTIKNNNIFYPYTSIGSDPQDLKYNFEKSFLEIGNNNKFRENVTINPGTQGGGLKTVIEDNCLFMVGSHVAHDCKIKSNVILANNATLAGHVHIDENAILGGNSAVHQFVRIGKYAMIGGMSGVEKDIIPYGLYTGIRENLKGINLIGLKRKGIPSSSINYINHIVKNIFNSKNTIVKNIKKLNIEDNELNEIKEIMSFISDESKRGICVLEND

SEQ ID NO: 112753 - protein, 199 aa, Unknown
  Bacterial polypetide isolated from the Sargasso Sea
SSIGDDPQDKKYLNEETAVEIGDRNTIREYTTINKGTIQDVGVTRMGNDNWIMAYVHIAHDCQVGNNTIFANNTTLGGHVEVGDYVIFGGFSGAHQFCKIGAHSFLGMYSGVARDLPPYVIVMGQPAEPRGINLEGLKRRDFSKDQIRNIKSAYKALYMSDLRLGESIKAIEDLGDINGELNILVDFLNNTTRGIVRKG

SEQ ID NO: 112754 - protein, 301 aa, Unknown
  Bacterial polypetide isolated from the Sargasso Sea
AFGMGINKSNVRFVVHYVIPKSIEAYYQETGRAGRDGLEAEAFMLFDPADIGRVRHLIEQSEPGPQQQVDFHKLNTMAAFAEAQTCRRQVLLHYFDESALEPCGNCDICLDPPKRYNGTEDAQKVLSCIYRLGQRFGINHLIEVLRGSKGAAIVDRGHDKLSTWGIGKDKSHEYWLSVIRQLIHLGLASQDITRGSSITLNPSARPILKGEVALMLAEPRIQLTSIKRKTTQSRVPLNYDRKLFARLKTLRRTIAEEQDVPPYLVFNDATLAEMAAMMPTSPGEMLAVNGVGERKLSRFGG

SEQ ID NO: 112755 - protein, 199 aa, Unknown
  Bacterial polypetide isolated from the Sargasso Sea
GSSPQDLKYKGESTAIKIGKNCRIREYVTINPGTNGGGKITSVGDDCLLMIGTHVAHDCRIGNKVIFANHSTLAGHVIIEDNVVVGALSAIHQFCRIGEGAMIGGMSGVTADVIPFSTVMGNRAKLSGINILGLKRRNVKKKEISEFRKTFKYIFFDKEFTFRDRISEVMKKKHENHIVSKLLKFLHNHSDRSYCMPDI

SEQ ID NO: 112756 - protein, 122 aa, Unknown
  Bacterial polypetide isolated from the Sargasso Sea
TRGSSITLNPSARPILKGEVALMLAEPRIQLTSIKRKTTQSRVPLNYDRKLFARLKTLRRTIAEEQDVPPYLVFNDATLAEMAAMMPTSPGEMLAVNGVGERKLSRFGGEFLDEIAAYLAGE

SEQ ID NO: 112757 - protein, 123 aa, Unknown
  Bacterial polypetide isolated from the Sargasso Sea
MIHSSSVIDKKAKLGKNVKIGPFCYIGPDVELQQDVELISNVHIEGNTKIGKGTKIFPFASIGTIPQDLKFRGEQNSVLIGENNMIREYVTINPGTEGGGGKTIIGNNCLFMISSHIAHDCKV

SEQ ID NO: 112758 - protein, 256 aa, Unknown
  Bacterial polypetide isolated from the Sargasso Sea
MHHPSAIIDPSAKIDESVEIGPFSLIGPDVTIGKDTKIESHVILKGPTIIGERNHIFQFSTVGDGSPDKKYKNEPTLLKIGNDNIIREGVTVHRGTIQDRGETLIGNRNLIMAYSHIAHDCVIGDDIVLTNQAALAGSVKVGDGAILGGYAIVHQFCSIGSYSFCAMGSSVNKDVPAYVKVRGNPARPFGINTTGIKRLGYSKEVIESLRSAYRSVYRKKLTVEEAMFDLSDLRDKHDEVNTFLASIEESTRGISR

SEQ ID NO: 112759 - protein, 123 aa, Unknown
  Bacterial polypetide isolated from the Sargasso Sea
MIHNSSIIDKKAKLSKNVKIGPFCYIGPNVQLKENVELISNIHIEGNTIIGSGTKIFPFACIGTQPQDLKFKGEENSLVIGNNNVIREYVTINPGTAGGGSKTSVGNNCLFMISSHIAHDCNV

SEQ ID NO: 112760 - protein, 234 aa, Unknown
  Bacterial polypetide isolated from the Sargasso Sea
MIHKTAIIGDKVKIGKDVKIGPFCVIGDGAIIGDNVELKSHVVMEGRVTIGEGTKIYPFASLCYPQTLKYNGEDSEIVIGKNNTIREYVTIQHGTAGDKMITSIGDNCLFMVGVHIAHNCLVGNNVIFANYASLAGHVEVGDFAILGGLSAVQQFCRVGPHTMVGGISAVVRDLVPYGLASSDRAHLEGLNLVGMNRRGFDKKQSIEASKVVKEIFDENSDIVFNKRIERAKEK

SEQ ID NO: 112761 - protein, 176 aa, Unknown
  Bacterial polypetide isolated from the Sargasso Sea
MIDKTAIIDSKAKLDKNVQVGPYCVIGPNVEIGENTVIHSHVNISGNVKIGKGNKIYPFVSINDPQDLKYAGEPTNLIIGDNNKIREYVTINPGTVGGGGKTLIGNNCLFMISSHIAHDCQVGNNVIIANNVPLGGHAIIEDNVVIGGNSAVQQFTRIGKMAMIGGMTGVLHDVIP

SEQ ID NO: 112762 - protein, 188 aa, Unknown
  Bacterial polypetide isolated from the Sargasso Sea
MNFSYISKKANIHSSVKIGPYCVIGDNVEIGKDCVLHSHVSLSGNTKIGNSNIFYPFSSIGSAPQDLKYKGEKSFLIIGNNNTFRENVTVNPGTEGGGLYTKIEDNCLFMVGVHIAHDCMIGSNTILANNATLAGHVEIDNNAIIGGNSAIHQFVKIGKNAMVGGMSGLEKNLIPYGLYIGIRSNMKG

SEQ ID NO: 112763 - protein, 255 aa, Unknown
  Bacterial polypetide isolated from the Sargasso Sea
SIIDPKAKIEKNVKIGPFCYVGSKVHLKEGVELISNVHIEGNTKVGVGTKIYPFASIGTAPQDLKYKGETNSLDIGEANIIREYVTINPGTIGGGSKTLVGNNCLFMISSHIAHDCRIGNNVVIANNVPLGGHVTIEDNVVIGGNSAVQQFTRIGRLAMIGGMTGVLKDVIPFGLSFGNRNYLKGINLIGLRRKKYDNKKIMELDQAYKKIFSSNNLHENLSKINGEFKENELVQEVTKFIENDKRRPICSPLSE

SEQ ID NO: 112764 - protein, 172 aa, Unknown
  Bacterial polypetide isolated from the Sargasso Sea
REGVTVHRGTVQDKSITSIGSDNLLMAYSHVAHDCVVGDGNVFANNAGIAGHVNVGNNITIGALTTIHQFCNIGDYSFIGMNTSINMDIPAFVKVAADPARIIGLNSVGMSRNDISSESISLIKKAYKLVYRKGFKIDEAIKKLKELNKDQNDSFLDIFIKSLEISERGILR

SEQ ID NO: 112765 - protein, 171 aa, Unknown
  Bacterial polypetide isolated from the Sargasso Sea
TVNPGTQGGGLHTIIKNNCLFMVGAHIAHDCQIRSNVILANNATLAGHVEIDDYAIIGGNSAVHQFVNIGKNAMIGGMSGVEKNIIPYGLYTGIRCNLKGLNIVGLKRKGLSNKDILTIRTATNSIFNINSSIEVNIKDLDDKLKLITEIKDIINFILKNKKRGICVLSND

SEQ ID NO: 112766 - protein, 226 aa, Unknown
  Bacterial polypetide isolated from the Sargasso Sea
SIIHSHVNIVGYTKIGKKNEIYPFCSIGTPPQDLKYKGEKNSIIIGDNNKLREYVNINPGTEIGGGVTQIGNNNLFMVYCHVAHDCLIMDNIILANNVQIGGHVTINKRAIVGGSCAIHQFCRIGEHAMIGGMTGVLSDVIPYGLSLGNRNILTGLNLIGLRRSGVSNQDIKIIQNAYDIIFSNSNFRKNIENLSLISKKNKYVNEITKFINSDKKRPISLPTNIS

SEQ ID NO: 112767 - protein, 209 aa, Unknown
  Bacterial polypetide isolated from the Sargasso Sea
TVGKNNVFYQFCTIGEDTPDKKFKGEETTLEIGDENIFREGVTVHRGTVQDTSTTIIGNKNLFMAYAHVAHDCVVGNDNVFANNSGIAGHVTVRNNVTIGALTTIHQFCQMGDYSFAGMNASITMDVPSYIKVASNPARVVGLNSVGMERGGIDKETITILKKAYKIIYRKGFNLKDAIKKVESMDSSEIQEVRNFIDSIKSSERGILR

SEQ ID NO: 112768 - protein, 221 aa, Unknown
  Bacterial polypetide isolated from the Sargasso Sea
MIHKTAIVDSNAKISKNVTIGPYSVIGPDVEIGEGTIVQSHVNIKGNTIIGSNNKIYPFVSIGNDPQDLKFKGEKTSLEIGDNNKIREYVTINPGTKGGGGKTKVGNNCLFMVSSHIAHDCIVGDNVILANNVPLGGHAHVGDNAILGGNSAVQQFTRVGKFAMIGGMCGVVRDVIPYGIAHGNRSILQGLNLIGLRRKNIPNKEILSLSEAYKKIFKNEN

SEQ ID NO: 112769 - protein, 141 aa, Unknown
  Bacterial polypetide isolated from the Sargasso Sea
MIHTSSVIDKKARIGKNVKIGPFCFIGPGVEISEDVELISNVHIEGNTKVGKGTKIFPFASIGTQPQDLKFKGENNSLEIGEKNTIREYVTINPGTEGGGGKTIIGNNCLFMISSHVAHDCSVGNDVVIANNVPLGGHVTI

SEQ ID NO: 112770 - protein, 184 aa, Unknown
  Bacterial polypetide isolated from the Sargasso Sea
MIHKSAIIDPKSKISSNVNIGPFTVIGPNVEIGEGTFIQTHVNITGNTKIGKNNRIFPFASIGNIPQDLKYNGEETKLIIGDGNTIRENTTINTGTVGGGNITKIGNNNLLMIGVHIAHDCSIGNNVIIANSGAIAGHAVIDDDVIIGGNCGVQQFTRIGKMAMIGGMTGVSRDVIPYGLSLGN

SEQ ID NO: 112771 - protein, 218 aa, Unknown
  Bacterial polypetide isolated from the Sargasso Sea
MVIHKTAIINKNSKISEDVEIGPYCIVGPEVEIGKNTVLHSHVNLVGNTKIGKNNEIFPFASIGTPPQDLKYKGEKNSLVIGDNNKFREYVNINPGTKNGGEVTKIGNNNLLMVYCHVAHDCNLSNNIVLANNVQVGGHVTIDDNAIVGGSCAIHQFSRIGESAMIGGMTGVLSDVIPYGLSIGNRNSLVGLNLIGLRRLKISNENIKIMQKAYDIIF

SEQ ID NO: 112772 - protein, 200 aa, Unknown
  Bacterial polypetide isolated from the Sargasso Sea
MVHRHRDLKYKGEKNSIIIGDNNKLREYVNINPGTSQGGTITKLGNNNLLMVYCHVAHDCNLGDNIVLANNVQVGGHVIIEDNAIVGGSCAIHQFSRIGSYAMVGGMTGVLSDVIPYGLSLGNRNNLVGLNLIGLRRAKISNEDIKILQKFYDKVFYNQYFRSNIENLNTEIKENKYVKIIIDFINSDKKRPISLPENIK

SEQ ID NO: 112773 - protein, 228 aa, Unknown
  Bacterial polypetide isolated from the Sargasso Sea
NNTKIHSHVNIDGNTSIGSGNEIFPFASIGTPPQDLKYKGEKNSLVIGDNNKLREYVNINPGTEQGGGTTKIGNDNLFMVYCHIAHDCNILNNIVLANNVQVGGHVTIYNNAIVGGSCAIHQFSRIGESSMVGGMTGVLSDIIPYGLSLGNRNNLVGLNLIGLRRARISNENIKIMQQAYEIIFKNENFRSNINNLSSEVKNNEFVNKIITFINSDKKRPISLPENNK

SEQ ID NO: 112774 - protein, 327 aa, Unknown
  Bacterial polypetide isolated from the Sargasso Sea
MSQILRIFTRTCCPTLGRMSIYDIRRPQLLGVLAAIEKRKAFTTAEKVRTWFNQLFRYALVIAEGLEVNPAADLDVVAEPKPPVAHNPYLHLPEMPEFLQKLRLYNPRGWQTQLGVRLLFLTGVRTGELRLAEPEQFDLDRGLWIIPPQIVKQLQDEMRKAGKRPQDVPPYIVPLSLQAIEIVRYLLGVMRPAQKYLLSHRSELKKRISENTLNKAVQLMGYEGRLTGHGIRGTISTALNEIGYPKIWVDAQLSHSDPNKVSSSYNHAKYVEPRRRMMQDWADRLDLLEQGEVEAASAHLTIRIDGAPAMAEVEEAVDATLAMAEPT

SEQ ID NO: 112775 - protein, 207 aa, Unknown
  Bacterial polypetide isolated from the Sargasso Sea
GKNNVFYQFCFIGEDTPDKKFKGEETTLEIGDENIFREGVTVHRGTVQDKSTTIIGNKNLFMAYAHVAHDCVVGSANVFANNAGIAGHVTVGNNVTIGALTTIHQFCQMGDYSFAGMNASITMDVPAYIKVASNPARVIGLNSVGMERGGIDQETITILKKAYKTIYRKGFNLKDAIEKVESMESNDVQEVRNFVDSIKSSERGILR

SEQ ID NO: 112776 - protein, 134 aa, Unknown
  Bacterial polypetide isolated from the Sargasso Sea
ILKNDIILANGVQLGGHVEIDDYGIVGGMTPVHQFCKIGMHAFIGGGLRVVQDVPPYIIANGEPLKFSGINILGLRRRKFSSEERNNIKKVYKLLYNSDYNTSQAIKKIESTFEINDSIQNIINFILSSKRGLI

SEQ ID NO: 112777 - protein, 191 aa, Unknown
  Bacterial polypetide isolated from the Sargasso Sea
MNQPLAYVHPGAKIAKNVVVEPFATISSNVEIGEGTWVGSNVTIMEGARIGKNCNIYPGAVISGVPQDLKFEGEESLCEIGDNTTIRECVTINRGTKDRGTTKIGDNCLIMAYSHIAHDCFVGDNCIFSNSSTLAGHITVGDYVILSGFVAVHQFCKIGSHAFVAGGSLVRKDVPPFVKAAREPLSYVGIN

SEQ ID NO: 112778 - protein, 154 aa, Unknown
  Bacterial polypetide isolated from the Sargasso Sea
TIIGCNNLFMAYSHIAHDCVIKDNCILSNAASLAGHVTLGNNVSLGGFTLVHQFCDIGDYAFSGLGTVISRDVTPYTLVAGNHAQAYKINSAGLKRKGFDDSVISSLEKVFKLFIKSKAGREQAEASFHKLKIKLPEVDYFLNFIKNSERGVTR

SEQ ID NO: 112779 - protein, 136 aa, Unknown
  Bacterial polypetide isolated from the Sargasso Sea
MNNIHPTAIIDEKAELGNHLSIGPYCRIGAEVELGDGCQLKSHVVVDGPCRIGSENIFFPFSIIGGDPQDLKFNQEKTQLIVGSNNTFREGVSVHRGTIGGGGKTLIGNSNLLMGYVHVAHDCRIGNNNILANYTG

SEQ ID NO: 112780 - protein, 203 aa, Unknown
  Bacterial polypetide isolated from the Sargasso Sea
FSSIGSEPQDLKYNNEKSYIEIGSNNKFRENVTINPGTEAGGLKTVIKNNCLLMVGSHIAHDCKINSNVVLANNATLAGHVEIDNNAILGGNSAVHQFVRIGKYSMIGGMSGVEKDIIPYGLYTGIRENLKGINLIGMKRKGLNSSSINEINIIIKKIFQQNGTITNNIEKLNSNEKKILEIEEIIDFINNSSKRGLCPLENE

SEQ ID NO: 112781 - protein, 204 aa, Unknown
  Bacterial polypetide isolated from the Sargasso Sea
MIHNSSVIDKKAKISKKIRIGPFCYVGPDVELKDDVELISNVHIEGNTTIGKGTRIFPFASIGTQPQDLKFKGEKNNLVIGENNLIREYVTINPGTEGGGSKTIIGNNCLFMISSHIAHDCKIGNNVIIANNVPLGGHVTIEDSVVIGGNSAVQQFTRIGRLAMIGGMTGVLKDVIPFGLSIGNRNFLQGLNLIGLRRHKYDNQ

SEQ ID NO: 112782 - protein, 219 aa, Unknown
  Bacterial polypetide isolated from the Sargasso Sea
TCKYFSGNVKIGKRNKIYPFVSINDPQDLKYAGEPTNLIIGDNNKIREYVTINPGTVGGGGKTVIGNNCLFMISSHIAHDCHVGNNVIIANNVPLGGHVIIEDNVVIGGNSAVQQFTRIGKMAMIGGMTGVLHDVIPYGLSTGNRNSLQGLNLIGLRRAKFENKDILILSEAYKEIFATKDVNENISKLNGSFHENPLVKNVIDFITKDKKRSICTPFS

SEQ ID NO: 112783 - protein, 124 aa, Unknown
  Bacterial polypetide isolated from the Sargasso Sea
MIDKTAIIDSKAKLEKNVQVGPYCVIGPNVEIGENTVIQSHVNISGNVKIGKGNKIYPFVSINDPQDLKYAGEPTNLIIGDNNKIREYVTINPGTVGGGGKTIIGNNCLFMISSHIAHDCQVGN

SEQ ID NO: 112784 - protein, 240 aa, Unknown
  Bacterial polypetide isolated from the Sargasso Sea
MINKHHTSIVSEKAELGFNVTIGPYCIINENVKIGNNVNLVAHTYVDGNTTIGDNCKFFPYCSIGTSPQDLKYKGEKSILKIGNNNIFREYVTVNPGTEGGGLETIIGNDCLFMINAHVAHDCKIGNNVIMVNNASIAGHVILEDYAIMGALSGAHQFCRIGKHSMIGGLSGVDSDVIPYGTVIGNRAYLSGLNIIGLKRRGFSKDTIQDLRKAYGLLFSSQEGTFSDRVKEVSEEFLDN

SEQ ID NO: 112785 - protein, 256 aa, Unknown
  Bacterial polypetide isolated from the Sargasso Sea
MHHPSAIIDPSAKIDESVEIGPFSLIGPDVTIGKDTRIESHAILKGPTIIGQRNHVFQFSTVGDGSPDKKYKNEPTLLRIGDDNIIREGVTIHRGTIQDKGETIIGNRNLIMAYSHIAHDCILGDDIVLTNQAALAGSVKVGNGAILGGYAIVHQFCSIGSYSFCAMGSSVNKDVPAYVKVRGNPARPFGVNTTGIKRLGYSKEVIESLRSAYRSIYRKKLTVEEAMSDLSDLRDKYDEVNTFLLSIEESTRGISR

SEQ ID NO: 112786 - protein, 233 aa, Unknown
  Bacterial polypetide isolated from the Sargasso Sea
MIHKSSVIDPKAKIGKDVKIGPFCFIGPKAQLDNGAELISNVHIEGNTKIGKGTKIYPFASIGTAPQDLKYKGEENSLEIGDNNVIREYVTINPGTAGGGSKTVIGNNCLFMISSHIAHDCKIGNNVVIANNVPLGGHVTIEDSVVIGGNSAVQQFTRIGRLAMIGGMTGVLKDVIPFGLSFGNRNYLKGINLIGLRRKKYDNKKIMELDQAYKKIFSSKNLQENLSKINGEY

SEQ ID NO: 112787 - protein, 205 aa, Unknown
  Bacterial polypetide isolated from the Sargasso Sea
MNTSDMKAFEEGDILVGATLLNNPNDDHAGPGRIIQFDSDLNLKGTLWTDNTTHLVGGLKFDSNKDLWAFDSQNCSAIKVNASGEQSDQADFGDRSFSNVNFLGNGEILLGEHLTGDESNNKALEGPRKLGTVLPFMPGTERYGDGNIYKYSQDGNHIETYETETHGGMPGFLGVTSSAITPDESKIIYISELGNRIFQFDIENN

SEQ ID NO: 112788 - protein, 225 aa, Unknown
  Bacterial polypetide isolated from the Sargasso Sea
MNTSDMKAFEEGDILVGATLLNNPEDDHAGPGRIIQFDSDLNLKGTLWTDNTTHLVGGLKFDSNKDLWAFDSQNCSAIKVNASGEQIDQSDFGDRSFSNVNFLDNGEVLLGEHLTGDESNNKALEGPRKLGTVLPFMPGTERYGDGNIYKYSQDGNHIETYETETHGGMPGFLGVTSSAITPDESKIIYISELGNRIFQFDIENNNQLDDLITYEPDSGNMVMQS

SEQ ID NO: 112789 - protein, 607 aa, Unknown
  Bacterial polypetide isolated from the Sargasso Sea
METQLLDIHDDPLSQRLAQVFGYRDFRDGQREVIERVCSGEDCLVIMPTGGGKSLCYQLPALLMPGITIVVSPLISLMKDQVDSLLQTGVNAAYLNSSQPREQSVEVLRQLHRGELKLLYVSPERLLTGDFIERMRSLPLSMFAIDEAHCISQWGHDFRPEYAALGQLKQFFPHVPMMALTATADQATRQNICERLGINPFRLLSSFDRPNIRYTVAEKLNAANQLRQFLLQQNGSSGIVYCSSRRRVDEVAERLTLQGFHAKAYHAGMTPQERGEVQDSFLKDQIDIVVATVAFGMGINKSNVRFVVHYDIPKSIEAYYQETGRAGRDGLEAEAFMLFDPADIGRVRHLIEQSEPGPQQQVDFHKLNTMAAFAEAQTCRRQVLLHYFDESALEPCGNCDICLDPPKRYNGTEDAQKVLSCIYRLGQRFGINHLIEVLRGSKGAAIVDRGHDKLSTWGIGKDKSHEYWLSVIRQLIHLGLASQDITRGSSITLNPSARPILKGEVALMLAEPRIQLTNIKRKVTQSRAPLNYDRKLFARLKALRRTIAEEQDVPPYLVFNDATLAEMAAMMPTSPGEMLAVNGVGERKLSRFGDDFLDEIAAYLAGE

SEQ ID NO: 112790 - protein, 260 aa, Unknown
  Bacterial polypetide isolated from the Sargasso Sea
MTNIHKTAVVSPKSNIDPSVAIGAYSIIGDDVEIGKNTKIESHVVIKGNTKIGEDNHFYSFSSIGDDPQDKKYLNEETAVEIGDRNTIREYTTINKGTIQDVGVTRMGNDNWIMAYVHIAHDCQVGNNTIFANNTTLGGHVEVGDNVIFGGFSGAHQFCKIGAHSFLGMYSGVARDLPPYVIVMGQPAEPRGINLEGLKRRDFSKDQIRNIKSAYKALYMSDLRLEEAIKAIQDLGDINGELNILVDFLNNTTRGIVRKG

SEQ ID NO: 112791 - protein, 258 aa, Unknown
  Bacterial polypetide isolated from the Sargasso Sea
MSIHESSIIHPSAEIDENVEIGPFCIVGEKVKVKSGSKLLSHVVLKGPTTVGKNNVFYQFCTIGEDTPDKKFKGEETTLEIGDENIFREGVTVHRGTAQDKSTTIIGNKNLFMAYAHVAHDCVVGSDNVFANNAGIAGHVTVGNNVTIGALTTIHQFCQMGDYSFAGMNASITMDVPAYIKVASNPARVIGLNSVGMERGGIDQETITILKKAYKTIYRKGFNLKDAIEKVESMESNDVQEVRNFVDSIKSSERGILR

SEQ ID NO: 112792 - protein, 142 aa, Unknown
  Bacterial polypetide isolated from the Sargasso Sea
MIHKSSVIDPKAKIGKNVKIGPFCFIGPQVQLDDGIELISNIHIEGNTKIGKGTKIYPFASIGTAPQDLKYKGEANSLYIGENNVIREYVTINPGTSGGGSKTTVGNNCLLMISSHVAHDCKIGNNVVIANNVPLGGHVTIE

SEQ ID NO: 112793 - protein, 260 aa, Unknown
  Bacterial polypetide isolated from the Sargasso Sea
MNQPLSYVHPAAKIAKTVVIEPFTTIAKDVIIGEGTWIGSNVTIMEGARIGKNCSVFPGAVISAIPQDLKFKGEETTAVIGDNTVIRECVTINRGTNWRKKTEIGKNCLIMAYCHIAHDCKVGDNSIFSNNSTLAGHVTVQDYVILAGMVAVHQFCNIGRHAFIAGGSLVRKDIPPFVKAAREPLSYVGINSVGLRRRGFESEKIREIQNIYRILYQKKFNNTQAIDIIEAEVEATTARDEILLFIKNSQRGIMKGYVQN

SEQ ID NO: 112794 - protein, 260 aa, Unknown
  Bacterial polypetide isolated from the Sargasso Sea
MTSIHKTAIVSPKSNIDDSVEIGAYSLIGDDVVIGKNTIIDSHVVIKGKTKIGQDNHFYPFSSIGDDPQDKKYSNENTEVEIGDRNTIREYTTINKGTIQDIGTTRMGNDNWIMAYVHIAHDCQIGNNTIFANNTTLGGHVEVGDYVIFGGFSGAHQFCKIGAHSFLGMYSGVARDLPPYVIVMGQPAEPRGINLEGLKRRDFSEDQIRNIKSAYKALYMSDLRLEEAIESIQDLGDINGEINILVDFLTNTTRGIVRKG

SEQ ID NO: 112795 - protein, 260 aa, Unknown
  Bacterial polypetide isolated from the Sargasso Sea
MTKIHNTAVVSPKSNIDPSVEIGAYSIIGDDVEIGKNTKIESHVVIKGKTKIGEDNHFYSFSSIGDDPQDKKYLNEDTAVEIGDRNTIREYTTINKGTIQDVGVTRMGNDNWIMAYVHIAHDCQVGNNTIFANNTTLGGHVEVGDNVIFGGFSGAHQFCKIGAHSFLGMYSGVARDLPPYVIVMGQPAEPRGINLEGLKRRDFSKDQIRNIKSAYKALYMSDLRLEQAIKAIQDLGDINGELNILVDFLNNTTRGIVRKG

SEQ ID NO: 112796 - protein, 215 aa, Unknown
  Bacterial polypetide isolated from the Sargasso Sea
MSNIHQTAIIDASALIHDSVKIGPYSVIGPDVRIAEKCELKSHVVLKGPSNIGPGNKFFSFCVIGEDTPDLKYKGEKSGLEIGENNTFREFCKVHRGTEVDLGYTKIGDNNLIMPGVMIAHDCVIGDGNILVDNSALAGHVVLGDHVTLGGYTLIHQFCKLGSYSFTGLSAHITMDVPAFTRVAGMPTKQAGLNSIGLERNGFIKEEIMNLKKAY

SEQ ID NO: 112797 - protein, 127 aa, Unknown
  Bacterial polypetide isolated from the Sargasso Sea
MIDSKSLIHESASIADNVKIGAYVVIDKNVSIGEGTVIKEYAVIRENTTIGKNNLIYQFATIGEEPQDLKYHGEHTTCTIGNNNIIREYSSIHRGTEDGISDTEIGNNNLLMAYTHIAHDCVIANDC

SEQ ID NO: 112798 - protein, 260 aa, Unknown
  Bacterial polypetide isolated from the Sargasso Sea
MVHNSSVVDKNAKIGKNVKIGPFCYVGPNVELSESVELISNVHIEGNTIIGKGTKIFPFASIGTIPQDLKYKGESNSVVIGENNMIREYVTINPGTEGGGGKTIIGNNCLFMISSHIAHDCKVGNNVVIANNVPLGGHVTLEDSVVIGGNSAVQQFTRIGRLAMIGGMTGVLKDVIPFGLSFGNRNYLQGINLIGLRRKKYENKKILELDSAYKKIFSSEKLHENLAKINGEFKDNDLVKEVVDFIAKDKKRPICTPLAK

SEQ ID NO: 112799 - protein, 260 aa, Unknown
  Bacterial polypetide isolated from the Sargasso Sea
MIHKSSVIDSKAKIGKDVKIGPFSFVGPNVELKDGVELVSNVHIEGNTKIGNNTKIFPFASIGTQPQDLKYKGENNSLEIGDYNVIREYVTVNPGTSGGGSKTIIGNNCLFMISSHVAHDCVIGNNVVIANNVPLGGHVTIEDSVVIGGNSAVQQFTRIGRLAMIGGMTGVLKDVIPFGLSFGNRNYLKGINLIGLRRKKYDNKKILELDQAYKKIFSTNNLQENLNKINGEFKANELVQEVTKFIEKDKKRPICTPLSE

SEQ ID NO: 112800 - protein, 256 aa, Unknown
  Bacterial polypetide isolated from the Sargasso Sea
MHHSSAIIDPSANIDESVDIGPFSLIGPNVTIGKDTKIESHVILKGPTTIGERNHVFQFSTVGDGSPDKKYKNEPTLLTIGDDNIIREGVTIHRGTIQDKGETLIGNRNLIMAYSHIAHDCVLGDDIVLTNQAALAGSVKVGDGAILGGYAIVHQFCSIGSYSFCAMGTSVNKDVPAYVKVRGNPAKPFGINTTGIKRLGYSKEVIESLRSAYRSVYRKKLTIEEAMVDLSEMRNKYDEVNNFLKSIEESTRGISR

SEQ ID NO: 112801 - protein, 607 aa, Unknown
  Bacterial polypetide isolated from the Sargasso Sea
METQLLDIHDDPLSQRLAQVFGYRDFRDGQREVIERVCSGEDCLVIMPTGGGKSLCYQLPALLMPGITIVVSPLISLMKDQVDSLLQTGVNAAYLNSSQPREQSVEVLRQLHRGELKLLYVSPERLLTADFIERMQSLPLSMFAIDEAHCISQWGHDFRPEYAALGQLKQLFPHVPMMALTATADQATRQNICERLGINPFRLLSSFDRPNIRYTVAEKLNAANQLRQFLLQQNGSSGIVYCSSRRRVDEVAERLTLQGFHAKAYHAGMTAEERGEVQDSFLKDQIDIVVATVAFGMGINKSNVRFVVHYDIPKSIEAYYQETGRAGRDGLEAEAFMLFDPADIGRVRHLIEQSEPGPQQQVDFHKLNTMAAFAEAQTCRRQVLLHYFDESALEPCGNCDICLDPPKRYNGTEDAQKVLSCIYRLGQRFGINHLIEVLRGSKGAAIVDRGHDKLSTWGIGKDKSHEYWLSVIRQLIHLGLASQDITRGSSITLNPSARPILKGEVALMLAEPRIQLTSIKRKTTQSRVPLNYDRKLFARLKTLRRTIAEEQDVPPYLVFNDATLAEMAAMMPTSPGEMLAVNGVGERKLSRFGGEFLDEIAAYLAGE

SEQ ID NO: 112802 - protein, 258 aa, Unknown
  Bacterial polypetide isolated from the Sargasso Sea
MIDKTAIIDPKTKLDKNVQIGPYSVIGPNVEIGEDTIIQSHVNISGNVKIGKGNKIYPFVSINEPQDLKYAGEPTYLIIGDNNKIREYVTINPGTVGGGGKTVIGNNCLFMISSHIAHDCQVGNNVIIANNVPLGGHAIIEDNVIIGGNSAVQQFTRIGKMAMIGGMTGVLHDVIPYGLSTGNRNSLQGLNLIGLRRAKFENKDILGLSKAYKEIFATKNINENISKLNGSFQENPLVKNVIDFITKDKKRSICTPFS

SEQ ID NO: 112803 - protein, 256 aa, Unknown
  Bacterial polypetide isolated from the Sargasso Sea
MIHETAIVSDKADIDSSVSVGPYCIIDENVTIGPNTILESHVVIKKNVVIGNGNHFYQFSSIGEQPQDLKFKGEDSLLIIGNNNIFREYCTLNRGTKEGINKTQIGSNNLFMAYTHVAHDCVIKDHCIFSNAASLAGHVIVGDYVSLGGFTLVHQFCNIGDYAFSGLGTVISRDVTPYTLIAGNHAKAYKINTEGLKRKGFDSDLIVALEKTFKLFIKSKKTREEATIIFNNYNFNYNETKYFFDFLRNSSRGVTR

SEQ ID NO: 112804 - protein, 234 aa, Unknown
  Bacterial polypetide isolated from the Sargasso Sea
MGLKFGENNNLISHVSIVGDTTIENSNTFYPFCSIGSEPQDLKYNKEKSYLKIGSNNKFRENVTVNPGTSGGGLNTIIGNNCLFMVGSHVAHDCIIKSNVILANNATLAGHVEIDNNAILGGNSAIHQFVRIGKYAMIGGMSGVEKDIIPYSLYTGIRENLRSLNLIGLKRKGLTSNAINEIKNLINIIFDKNDTIENNIKNNFVESSEILEIKEIIEFLNSDSKRGITTFEND

SEQ ID NO: 112805 - protein, 206 aa, Unknown
  Bacterial polypetide isolated from the Sargasso Sea
DNHFYSFSSIGDDPQDKKFLNEETAVEIGDRNTIREYTTINKGTIQDVGVTRMGNDNWIMAYVHIAHDCQVGNNTIFANNTTLGGHVEVGDNVIFGGFSGAHQFCKIGAHSFLGMYSGVARDLPPYVIVMGQPAEPRGINLEGLKRRDFSKDQIRNIKSAYKALYMSDLRLEEAIKAIQDLGDINGELNILVDFLNNTTRGIVRKG

SEQ ID NO: 112806 - protein, 260 aa, Unknown
  Bacterial polypetide isolated from the Sargasso Sea
MNQPLSYVHPAAKIAKTVVIEPFTTIAKDVIIGEGTWIGSNVTIMEGARIGKNCSIFPGAVISAIPQDLKFKGEETTAVIGDNTVIRECVTINRGTNWRKKTEIGKNCLIMAYCHIAHDCKVGDNSIFSNNSTLAGHVTVQDYVILAGMVAVHQFCNIGRHAFIAGGSLVRKDIPPFVKAAREPLSYVGINSVGLRRRGFESEKIREIQNIYRILYQKKFNNTQAINIIEAEVEATTARDEILLFIKNSQRGIMKGYVQN

SEQ ID NO: 112807 - protein, 168 aa, Unknown
  Bacterial polypetide isolated from the Sargasso Sea
GVTIHRGTIQDRGETLIGNRNLIMAYSHIAHDCVLGNDIVLTNQAALAGSVHVGDGAILGGYAIVHQFCSIGSYSFCAMGSAVNKDIPAYVKVRGNPAKPFGVNVTGIKRIGYSKETIEALRSAYRSIYRKKLMVDEAVKDLDSLRKDFREVDIFLSSIEDSKRGISR

SEQ ID NO: 112808 - protein, 329 aa, Unknown
  Bacterial polypetide isolated from the Sargasso Sea
MSTGSTITFKRALAFSLVFGVLLISMKLQFTLAQKIPFNETNKTFVIYKGDSLYKVLARLEESHDLQDTSWLKLKYIFRDSPVIKAGRYTIHRGTDLSSLIDRFVIGDVEKFKFTIIEGTVAKNNLNKLEKILADNDLSFEIPQKVLDIFSSESLILPDTYFFSDQEDLIKVLEDSKLSLQEHVDALWANKPTDNPLKSTSEALVLASIIEREALLNSEQTIIASVFLNRLKKNMKLQADPTSSYGYYKDYGEKIGRAVLDDKNEFNTYFIKGLPPSPICFPSKGAIEAAILSSPGEYLYFVAKGDGSHVFSKTYEEHNKAVKKYIYPK

SEQ ID NO: 112809 - protein, 266 aa, Unknown
  Bacterial polypetide isolated from the Sargasso Sea
MREKIPEVAVSIHPQAIVEEGAELGEDVVVEAFSMVGPKAKLGDGCRVLHHATVEGRVDMGRNNVVHPYALIGGLTHDLKYEGGEPGLRIGDDNVFREYVTAHVATGADDETIIGSGNVFLAYSHVAHDCVIGNHLVMSSHSALAGHVEVADHVNVAWGAGVHQFCRLGRHCMVSACSKLVQDVPPFMLADGSPAEVRSINKVGMERSGFSGDEVETARGVFKVLYKSDLNRSQAIKRLENEFSAASPDIVGEIIEFARSSERGLA

SEQ ID NO: 112810 - protein, 236 aa, Unknown
  Bacterial polypetide isolated from the Sargasso Sea
MIDKSAIVDPKAKLDKNVQIGPYCVIGPNVEIGENTIIQSHVSISGNVKIGKGNKIYPFVSINDPQDLKYAGEPTNLIIGDNNKIREYVTINPGTVGGGSKTVIGNNCLFMISSHIAHDCQVGNNVIIANNVPLGGHAIIEDNVVIGGNSAVQQFTRIGKMAMIGGMTGVLHDVIPYGLSTGNRNTLQGLNLIGLRRAKFENKDILGLSEAYKKIFATKNINENISKLNGSFQKIH

SEQ ID NO: 112811 - protein, 259 aa, Unknown
  Bacterial polypetide isolated from the Sargasso Sea
MIHNSSVIDKKAKISKKIKIGPFCYVGPNVELKDDVELISNVHIEGNTTIGKGTRVFPFASIGTQPQDLKFKGEKNNLVIGEYNLIREYVTINPGTEGGGSETIIGNNCLFMISSHIAHDCKIGNNVIIANNVPLGGHVTIEDSVVIGGNSAVQQFTRIGRLAMIGGMTGVLKDVIPFGLSIGNRNFLQGLNLIGLRRHKYENQKIIGLDKAFKEIFSSKNLHENLNKINGEYKDNELVGEVIRFIEKDKKRPICAPQN

SEQ ID NO: 112812 - protein, 256 aa, Unknown
  Bacterial polypetide isolated from the Sargasso Sea
MNSNFISDKAKIHSSVNIGPYCVIGENVEIGENCTLHSHVVITGNTKIGDNNIFYPFTSIGNAPQDLKYIGEESYLVIGNNNTFRENVTVNPGTDGGGLYTRIKDNCLFMVGCHIAHDCIIGSNVILANNATLAGHVEIDNNTIIGGNSAIHQFVQIGKNAMVGGMSGLEKNLIPYGLYIGIRSNLKGLNVIGLKRKGLENNKIKTLNHFIKNIFDKNDSIENNINKLDDEIKSTEEVSEIIKFIEKSNQRGLVTL

SEQ ID NO: 112813 - protein, 255 aa, Unknown
  Bacterial polypetide isolated from the Sargasso Sea
MTNSVIDSSAKIDKSVKIGPFCVIGPDVEIGPDCILHSHVVIKGPTKISSGNIFFQFSTIGEDTPDKKYDGEATTLEIGKNNIFREGVTVHRGTIQDKSKTVIGNDNLFMAYSHIAHDCIVGDQNVFANTAGLAGHVTVGNNVILGAVTLVHQFCSLGDHSFTGLNTLITMDVPAFVKVAANPARPIGLNTVGMQRNNFDNDSVNLIKKAYRIIYRKGYSLDEAIKRLHLLNQDKNPALTTFISSIERSERGLVR

SEQ ID NO: 112814 - protein, 221 aa, Unknown
  Bacterial polypetide isolated from the Sargasso Sea
MKPCQHWSQVEYLHLTVSNPNIHLKGRHSYYSGAWDGPFEEAAVRYLHGDSFSRSPETGWEPLWHIDQLHIGDYVQIAAGVKILMGGNHTHNADFISTYPFADLDALQRSYRPAGDTRIGNDVWIGMDAMIMPGVTVGDGAIIAARALVNQDVPPYAMVAGTPAKVIRMRFAEEEIARLQALAWWEWPDAQVQALLPLIQQGEVALLEQAAAHWQQARQPS

SEQ ID NO: 112815 - protein, 251 aa, Unknown
  Bacterial polypetide isolated from the Sargasso Sea
MIHKSSEIDKKAIISKNVKIGPFCYVGPGVELKENVELISNVHIEGNTSIGNGTKIFPFASIGTQPQDLKFKGEKSTLSIGENNVIREYVTINPGTEGGGLQTVIGNNCLFMISSHIAHDCKIGNNVIIANNVPLGGHVTIEDSAIIGGNSAVQQFTRIGRLAMIGGMTGVLKDVIPFGLSIGNRNYLQGLNLIGLRRQKYDNQKIMGLDKAFKEIFASKNLYENLSKVNGEYKDNELVSEVIKFIEKDKK

SEQ ID NO: 112816 - protein, 150 aa, Unknown
  Bacterial polypetide isolated from the Sargasso Sea
MDENNTELSGDEIQSNPIDNDAKAVNIGSGVRVDGRIEGAETSDISGTLTGTLKSSNININSKGAFSGDMSGQEITISGSVDGEINSEDYLIVNNSANIKGVIEYASLQVSYGARIQGTLRHRGTVQSYSPVSTDEVKEDEINENQEVDQ

SEQ ID NO: 112817 - protein, 312 aa, Unknown
  Bacterial polypetide isolated from the Sargasso Sea
MKAFEEGDILVGATLLNNPEDDHAGPGRIIQFDSNLNLKGTLWTDNTTHLVGGLKFDSNKDLWAFDSQNCSAIKVNASGEQSDQADFGDRSFSNVNFLDNGEVLLGEHLTGDESNNKALEGPRKLGTVLPFMPGTERYGDGNIYRYSQDGNHIETYETETHGGMPGFLGVTSSAITPDESKIIYISELGNRIFQFDIENNKQLDDLITYEPDSGNMVIAIGFSSDGDFYSIKANFREGFSLCHHDLESGSILDEKVLPGPGWATLCLCNDGQHAVLGNFFNGQIGKFELASGQMVASAETEVERSVAGIAEF

SEQ ID NO: 112818 - protein, 312 aa, Unknown
  Bacterial polypetide isolated from the Sargasso Sea
MKAFEEGDILVGATLLNNPNDDHAGPGRIIQFDSDLNLKGTLWTDNTTHLVGGLKFDSNKDLWAFDSQNCSAIKVNASGEQIDQSDFGDRSFSNVNFLDNGEVLLGEHLTGDESNNKALEGPRKLGTVLPFMPGTERYGDGNIYKYSQDGSHIETYETETHGGMPGFLGVTSSAITPDESKIIYISELGNRIFQFDIENNNQLDDLIAYEPESGNMVIAIGFSSGGDFYSIKANFREGFSLCHHDLESGSILDEKVLPGPGWATLCLCNDGQHAVLGNFFNGQIGKFELASGQMIASAETEVERSVAGIAEF

SEQ ID NO: 112819 - protein, 233 aa, Unknown
  Bacterial polypetide isolated from the Sargasso Sea
MKAFEEGDILVGATLLNNPDDDHAGPGRIIQFDSDLNLKGTLWTDNTTHLVGGLKFDSNKDLWAFDSQNCSAIKVNASGEQIDQSDFGDRSFSNVNFLSNGEVLLGEHLTGDESNNKALEGPRKLGTVLPFMPGTERYGDGNIYKYSQDGNHIETYETETHGGMPGFLGVTSSAITPDESKIIYISELGNRIFQFDIENNNQMDDLITYEPDSGNMVIAIGFSSGGDFYSIKA

SEQ ID NO: 112820 - protein, 176 aa, Unknown
  Bacterial polypetide isolated from the Sargasso Sea
MIHPSSIIDPTAIIADSVEIGPFCLIGPDVEIDEDTRIESHVILKGPTKIGKRNHIFQFSTLGDGSPDKKYKNEPTTLTIGDDNIVREGVTIHRGTVQDRGDTLIGNRNLIMAYSHIAHDCVLGDDIVLTNQAALAGSVTVGDGAILGGYAIVHQFCSIGSYSFCAMGSAVNKDIP

SEQ ID NO: 112821 - protein, 246 aa, Unknown
  Bacterial polypetide isolated from the Sargasso Sea
MRRSGEIVPIHSSSIIDSAAKIHDSVEIGPFCTIGADVEIEAGTVLKSHVVVKGPSKIGPHNIFFQFCTIGEDTPDKKYKDERTQLIIGSNNIFREGVTVHRGTIQDKGLTKIGDNNLLMAYAHVAHDCEVGDYNVFANNSGIAGHVNVGNKVTIGALTTIHQFCQMGDYSFAGMNSSITMDVPAFVKVASNPARVVGLNTIGMDRGGISKDTIQKLKDAYRLVYRKSLSIEEAIKAIEAMDLSNN

SEQ ID NO: 112822 - protein, 254 aa, Unknown
  Bacterial polypetide isolated from the Sargasso Sea
TAIIHDKSKIDDSVEIGPFCIINEDVEIKKGTKLLSHVVLRGPTIIGEDNIFYQFSTIGEDTPDKKFKGEKTKLEIGNRNIFREGVTVHRGTVQDKSITSIGSDNLLMAYSHVAHDCIVGDGNVFANNAGTAGHVNVGNNITIGALTTIHQFCNIGDYSFIGMNTSINMDIPAFVKVAADPARIIGLNSVGMSRNDISSESISLIKKAYKLVYRKGLKIDEAIKKLKELNKDQNDSFLDIFIKSLEISERGILR

SEQ ID NO: 112823 - protein, 257 aa, Unknown
  Bacterial polypetide isolated from the Sargasso Sea
MKIHSTAIIHDKSKIDDSVEIGPFCIIDEDVEIKKGTKLLSHVVLRGPTIIGEDNIFYQFSTIGEDTPDKKFKGEKTKLEIGDRNIFREGVTVHRGTVQDKSITSIGSDNLLMAYSHVAHDCVVGDGNVFANNAGIAGHVNVGNNITIGALTTIHQFCNIGDYSFIGMNTSINMDIPAFVKVAADPARIIGLNSVGMSRNDISSESISLIKKAYKLVYRKGLKIDEAIKKSKGLNKDRNDSFLDIFIKSLEISERGI

SEQ ID NO: 112824 - protein, 158 aa, Unknown
  Bacterial polypetide isolated from the Sargasso Sea
KHLGETKIGSSCLLMASTHIAHDCIVGDNVIMSNLSTLGGHVVLEDWVVLGGGVLVHQFTKIGQHAFVGGGFRVTQDVPPYILAAENPLTYKGVNSTGLKRRGFSLEERKEIKKIYQIYFQSGINRKKSIGIVQSELPSTNIKNKIIDFILSSQRGII

SEQ ID NO: 112825 - protein, 253 aa, Unknown
  Bacterial polypetide isolated from the Sargasso Sea
MSIHESSIIHPSSEIDDDVEIGPFCIIGEKVKIKSGSKLLSHVVLKGPTTIGKNNVFYQFCTIGEDTPDKKFKGEVTTLEIGDENIFREGVTVHRGTVQDKSTTLIGNKNLFMAYAHVAHDCIVGNDNVFANNSGIAGHVTVGNNVTIGALTTIHQFCQMGDYSFAGMNASITMDVPSYIKVASNPARVVGLNSVGMERGGIDQETITILKKAYKIIYRKGFNLKDAIEKVESIESSNILEVRSFIDSIKSQK

SEQ ID NO: 112826 - protein, 227 aa, Unknown
  Bacterial polypetide isolated from the Sargasso Sea
MEYQLGNNTTIGNNTTICSGTTVGSNSKIFHNCSIGEIPQDLKFTGEETETIIGNNTIIRENVTINRGTSALGKTTVGNNVLLMAAVHIAHDCIVKDNVIMANMSTLGGHVEIQEYASLGGGVLVHQFCKIGSHVFIGGGFRAVQDVPPYILAVGEPLRFGGINSIGLKRRGYSSDSISKIKKAYRMYFRSDLTRSIALEKMKEKLSNNVDVDNIINFIDNSERGII

SEQ ID NO: 112827 - protein, 205 aa, Unknown
  Bacterial polypetide isolated from the Sargasso Sea
MIHPSSIVDDSAKIDNSVEIGPFCLIGPEVEIDAGTKIESHVILKGPAKIGKGNHIFQFSTLGDGSPDKKYNNEPTTLVIGDDNIIREGVTIHRGTIQDRGETLIGDRNLIMAYSHIAHDCVLENDIVLTNQAALAGSVHVGDGAILGGYAIVHQFCSIGSYSFCAMGSAVNKDIPAYVKVRGNPAKPFGINVTGIKRSVILKKL

SEQ ID NO: 112828 - protein, 250 aa, Unknown
  Bacterial polypetide isolated from the Sargasso Sea
MNNIHPTAIIDERAELGNNLSIGPFCRIGSEVELGDGCQLKSHVVLDGPSTIGSENIFFPFSFIGGDPQDLKFNQEKTQLIVGNKNTFREGVSVHRGTIGGGGKTLIGDGNLFMGYVHVAHDCRIGNHNILANYTGLSGHVSLDDYVTLGGQNGVAQFLRIGSFVYTGAGSLIDRNVPPYSTGYGNRFEVKGVNIVGLKRQKFSREKIAEILETHRIYYRSELKNDEALRVIEETFGESDAVRTFLDFIY

SEQ ID NO: 112829 - protein, 200 aa, Unknown
  Bacterial polypetide isolated from the Sargasso Sea
MSQIHATSLVENGAVIGKNVEIGPFCHVGANVSIGDECILKSHVVIDGWTTLGEKNTIYPFTSIGGEPQDLKYQNEKTLVTIGSENIIREGVTIHRGTNGGGGETNLGDHNLLMGYVHIAHDCHIGNHNILSNYTGLSGHCTLDDHINLGGQNGIAQFLHIGSYVFTGGGSLIDRNIPPYSTGFGNRFEVKGVNIVGLKR

SEQ ID NO: 112830 - protein, 194 aa, Unknown
  Bacterial polypetide isolated from the Sargasso Sea
MLIEQDRRISSLVHPASIINENVNIGKNVKVGPFSIIEDGVSIGNNTTIGNNTTICSGTTVGSNSKIFHNCSIGEIPQDLKFTGEETETIIGNNTIIRENVTINRGTSALGKTTVGNNVLLMAAVHIAHDCIVKDNVIMANMSTLGGHVEIQEYASLGGGVLVHQFCKIGSHVFIGGGFRAVQDVPPYILAVGE

SEQ ID NO: 112831 - protein, 163 aa, Unknown
  Bacterial polypetide isolated from the Sargasso Sea
MSCQRRGQAGLLGRNHLRGTEDMSLIDPRAIIDPAARLADDVQVGPWSIIGPDVEIGEGTVIASHVVIKGPTRIGRHNRIYQFSSVGEDTPDLKYKGEPTRLVIGDHNVIREGVTIHRGTVQDRSETTLGDHNLIMAYAHIGHDSVIANHCILVTTPRWPVTS

SEQ ID NO: 112832 - protein, 91 aa, Unknown
  Bacterial polypetide isolated from the Sargasso Sea
RELGGYISQDVPPYILVAGSPTEYSGINSVGLKRRGFSKKDRQDIKKIYNIFFRSKKNRKENLLTINKNFSDNDYLKTISGFIQNSKRGII

SEQ ID NO: 112833 - protein, 259 aa, Unknown
  Bacterial polypetide isolated from the Sargasso Sea
MKIHPTAIVHEKSQIHESVEIGPFCIINEDIEIKKGTKLLSHIVLRGPTIIGEDNIFYQFSTIGEDTPDKKFKGEKTKLEIGDRNIFREGVTIHRGTVQDKSITSIGSDNLLMAYSHVAHDCVVGDGNVFANNAGIAGHVNVGNNITIGALSTIHQFCNIGDYSFIGMNTSINMDIPAFVKVAADPARIIGLNTVGMSRNDISSESISLIKKAYKLVYRKGLKIDEAIKKLKELNKDQNDSFLDIFIKSLEISERGILR

SEQ ID NO: 112834 - protein, 192 aa, Unknown
  Bacterial polypetide isolated from the Sargasso Sea
MLSNSSFISPKAKIHSSVKIGPFCYVDDNVIIDKNCELKSHVSIVGNTTIGENNIFYPFCSIGSNPQDLKFNNEKSYLVIGNKNIFRENVTVNPGTTGGGLNTNIKDNCLFMVGSHIAHDCKIDSNVILANNATLAGHVEIGQNAIVGGNSAIHQFVQVGKFAMIGGMSGVEKNILPYCLYIGIRTNLKGLN

SEQ ID NO: 112835 - protein, 230 aa, Unknown
  Bacterial polypetide isolated from the Sargasso Sea
MKIHSTAIIHDKSIIDDSVEIGPFCIIDEDVEIKKGTKLLSHVVLRGPTIIGEDNIFYQFSTIGEDTPDKKFKGEKTKLEIGDRNIFREGVTVHRGTVQDKSITSIGSDNLLMAYSHVAHDCVVGNGNVFANNAGIAGHVNVGNNITIGALTTIHQFCNIGDYSFIGMNTSINMDIPAFVKVAADPARIIGLNSVGMIRNDISSESISLIKKAYKLVYRKGLKIDEAIKK

SEQ ID NO: 112836 - protein, 228 aa, Unknown
  Bacterial polypetide isolated from the Sargasso Sea
MSQIHATSLVENGAVIGKNVEIGPFCHVGANVSIGDGCILKSHVVIDGWTTLGEKNTIYPFTSIGGEPQDLKYQNEKTLVTIGSENIIREGVTIHRGTKGGGGETNLGDHNLLMGYVHIAHDCHIGNHNILSNYTGLSGHCTLDDHINLGGQNGIAQFLHIGSYVFTGGGSLIDRNIPPYSTGFGNRFEVKGVNIVGLKRKGFSREAISEILEAHRLYFRADLKSDEA

SEQ ID NO: 112837 - protein, 191 aa, Unknown
  Bacterial polypetide isolated from the Sargasso Sea
STLGIGSGNVIREHVTMNPGTGGGGMVTEVGDHCLFMVGAHVAHDCHVGDNVILANNATLAGHVEVGDFAILGGLSAIHQFVRIGRHAMIGGMSGVENDVIPYGSAMGNRAHLSGLNVVGLKRRGFSRETIHEMRKAYRLLFAEEGTMTERMEDVLESFGQVEPVMEIIQFIQSGADSSRAICRPKFNRAA

SEQ ID NO: 112838 - protein, 118 aa, Unknown
  Bacterial polypetide isolated from the Sargasso Sea
MSQIHATSLVENGAVIGKNVEIGPFCHVGANVSIGDGCILKSHVVIDGWTTLGEKNIIYPFTSIGGEPQDLKYQNEKTLVTIGSENIIREGVTIHRGTKGGGAETNLGDHNLLMGYVH

SEQ ID NO: 112839 - protein, 202 aa, Unknown
  Bacterial polypetide isolated from the Sargasso Sea
MTNSIIDPSAKIDKSVKIGPFCVIGPDVEIGPNCILHSHVVIKGPTKIGKGNSFFQFSTIGEDTPDKKYAGEATTLDIGDNNIFREGVTVHRGTVQDQSKTVIGNENLFMAYVHIAHDCIVGENNVFANATCLAGHVKVGNNVVLGGVTLVHQFCSLGDYSFTGINTIITMDVPAFIKVAANPARPIGLNTVGMQRNGFDND

SEQ ID NO: 112840 - protein, 174 aa, Unknown
  Bacterial polypetide isolated from the Sargasso Sea
MIHPSAVIAKNAEIHETTNIGPFCIIGDRVKIGENNNLISHVSIVGDTTIENSNTFYPFCSIGSEPQDLKYNKEKSYLNIGSNNKFRENVTVNPGTSGGGLNTIIANNCLFMVGSHVAHDCKIQSNVILANNATLAGHVEIDHNAILGGNSAIHQFVRIGKYAMIGGMSGVKKI

SEQ ID NO: 112841 - protein, 158 aa, Unknown
  Bacterial polypetide isolated from the Sargasso Sea
MPINNSYVSKNALIHPSVKIGPFCYIGDNVKIDKNCELKSHVSILGNTQIGKDNIFYPFSSIGSEPQDLKFEKEKSYLIIGDNNTFRENVTANPGTKGGGLKTLIKNNCLFMVGSHIAHDCQIDSNVILANNATLAGHVEIGENAIIGGNSAVHQFVQ

SEQ ID NO: 112842 - protein, 203 aa, Unknown
  Bacterial polypetide isolated from the Sargasso Sea
MTDIHPTAIIHPDAEIGENVFIGPFCNVGKYAKLAEGVQLYSHVVVEGRTTIGANSRIFPFASIGHEPQDLKFHGEKSELIIGRDNTIREHVTLNPGTEGGGMVTTIGDGCLFMMSSHVAHDCVIGDNVILVNNATLAGHVVIGNWAIIGGLSAVHQFVRIGRHAMVGGMSGVENDVIPYGSVVGNRAHLSGLNLVGLKRRDF

SEQ ID NO: 112843 - protein, 248 aa, Unknown
  Bacterial polypetide isolated from the Sargasso Sea
KSKIDDSVEIGPFCIIDEDVEIKKGTKLLSHVVLRGPTVIGEDNIFYQFSTIGEDTPDKKFKGEKTKLEIGDRNIFREGVTVHRGTVQDKSITSIGSDNLLMAYSHVAHDCVVGDGNVFANNAGIAGHVNVGNNITIGALTTIHQFCNIGDYSFIGMNTSINMDIPAFVKVAADPARIIGLNSVGMSRNDISSESISLIKKAYKLVYRKGLKIDEAIKKSKELNKDQNDSFLDIFIKSLEISERGILR

SEQ ID NO: 112844 - protein, 261 aa, Unknown
  Bacterial polypetide isolated from the Sargasso Sea
MIHPSAVISKNAEIHESTHIGPFCIIGDQVKIGENNNLISHVSIVGDTTIENSNTFYPFCSIGSEPQDLKYNKEKSYLKIGSNNKFRENVTINPGTSGGGLNTTISNNCLFMVGSHVAHDCIIKSNVILANNATLAGHVEIDHNAILGGNSAIHQFVRIGKYAMIGGMSGVEKDIIPYGLYTGIRENLKSLNLIGLKRKGLTSNAINEIKILINIIFDKNDTIENNIKNNYVESSEILEIKEVIEFLNSNSKRGITTFEND

SEQ ID NO: 112845 - protein, 162 aa, Unknown
  Bacterial polypetide isolated from the Sargasso Sea
NRGTSALGKTTVGNNVLLMAAVHIAHDCIVKDNVIMANMSTLGGHVEIQEYASLGGGVLVHQFCKIGSHVFIGGGFRAVQDVPPYILAVGEPLRFGGINSIGLKRRGYSSNSISKIKKAYRMYFRSDLTRSIALEKMKEKLSNNVDVDNIINFIDNSERGII

SEQ ID NO: 112846 - protein, 200 aa, Unknown
  Bacterial polypetide isolated from the Sargasso Sea
MSQIHATSLVENGAVIGKNVEIGPFCHVGANVSIGDGCILKSHVVIDGWTTLGEKNTIYPFTSIGGEPQDLKYQNEKTLVTIGSENIIREGVTIHRGTKGGGAETNLGDHNLLMGYVHIAHDCHIGNHNILSNYTGLSGHCTLDDHINLGGQNGIAQFLHIGSYVFTGGGSLIDRNIPPYSTGFGNRFEVKGVNIVGLKR

SEQ ID NO: 112847 - protein, 241 aa, Unknown
  Bacterial polypetide isolated from the Sargasso Sea
MRIHPTSIIDPSAKIASDVKIGPFCSIGEDVEIESGSKIISHAVIKGPTVIGKNNCIYQFSTIGDDTPDKKFKGEKTKLIIGNNNIFREGVTIHRGTTQDESVTTIGSNNLFMPFAHVAHDCKVGNDNVFANLAALAGHVHVGSNVSIGGITTVHQHCKLGDFCFAGMNSSITMDVPAYVKVASDPARVVGINSVGMSRKNVSKETITNIKKAYKLVYRKNLKIEEALKELSLLYEQTQDS

SEQ ID NO: 112848 - protein, 153 aa, Unknown
  Bacterial polypetide isolated from the Sargasso Sea
CLFMVGSHIAHDCVIKSNVILANNATLAGHVEIDNNAIIGGNSAIHQFVRIGKYAMIGGMSGVEKDIIPYGLYIGIRENLKSLNLIGLKRKGLTSNDINEIKSLINLIFNKNDTIENNINNNFIAKSEIIEIKEVIEFLNSNSKRGITTFEND

SEQ ID NO: 112849 - protein, 222 aa, Unknown
  Bacterial polypetide isolated from the Sargasso Sea
MNQPLSYVHPGAKVAKTVVLEPFSTIDNNVKIGEGTWIGSNVTILEGARIGKNCSIFPGAVISGVPQDLKFNGEETTAEIGDNTVIRECVTINRGTSDRNKTVIGKNCLIMAYSHIAHDCQVGDYSIFSNNSTLAGHVNVGNHVTLAGMVAVHQFCHIGRHSFVAGGSLVRKDIPPYVKAAREPLSYVGINSVGLRRRGFEADTIKSIQNIYRILFQMKFNN

SEQ ID NO: 112850 - protein, 183 aa, Unknown
  Bacterial polypetide isolated from the Sargasso Sea
MIHPSAVIAKNAEIHETTHIGPFCIIGDGVKIGENNNLISHVSIVGETTIENSNTFYPFCSIGSEPQDLKYNKEKSYLQIGSNNKFRENVTVNPGTSAGGLKTIISNNCLFMVGSHVAHDCIIKSNVILANNATLAGHVEIDHNAILGGNSAIHQFVRIGKYAMIGGMSGVEKILFHMVCIRE

SEQ ID NO: 112851 - protein, 189 aa, Unknown
  Bacterial polypetide isolated from the Sargasso Sea
MLTEQDRRISILVHPASIINENVKIGKNVKVGPFSIIEDGVSIGNNTTIGNNTTICSGTTVGSNSKIFHNCSIGEIPQDLKFTGEETETIIGNNTIIRENVTINRGTSALGKTTVGNNVLLMAAVHIAHDCIVKDNVIMANMSTLGGHVEIQEYASLGGGVLVHQFCKIGSHVFIGGGFRAVQDVPPYI

SEQ ID NO: 112852 - protein, 235 aa, Unknown
  Bacterial polypetide isolated from the Sargasso Sea
MSEIHSTAVIQEGAQIGKGCRIGPYCVIGSNVTLGAGCELHSHVVIDGHTEIGSENAFYPFASIGLRTQDLKWDGGTAWTRIGSNNTFREYVTVHSATGDGDATVIGSHNNLLAYTHVAHDCQLGDHIIMSNVGTLAGHVTVEDRAIVGGLAAVHQFCRIGTMSIIGGCSKVVQDVPPYMMVDGNPAGTRTLNKEGLKRNGVSEETQKSIRQAYRILFRSEQTFTNAVKQVRADV

SEQ ID NO: 112853 - protein, 222 aa, Unknown
  Bacterial polypetide isolated from the Sargasso Sea
GCVLKSHVVVRGPTRIGKNNKFYQFSSIGEDCQDKKYAGEPTELVIGDDNEFREGVTVHRGTIQDNGITIIGSRSLFMANAHVAHDCVLGNDIIVANNVAIAGHVHIDDFVIIGGATGIHQFCKVGAHAFLGAGGIILRDVPPFVMVSGQKNIPQGINSEGLKRRGFAKEEVLEIKRAYKAIYREGNTIDEAIEKMTQSAEKFSAVAQMVDFLKNASRGIIR

SEQ ID NO: 112854 - protein, 260 aa, Unknown
  Bacterial polypetide isolated from the Sargasso Sea
MKNSSYISKSAKIDKSVKIGPFCYVGENVKISKNCNLISHVHLSGNTTIGENNTFYPFCTIGSAPQDLKYNGEKSFLNIGNNNTFRENVTVNPGTIGGGLKTIIKDNCLFMVGSHIAHDCKIESNVILANNATLAGHVEINKNAILGGNSAIHQFVKIGQYSMIGGMSGVEKDVIPYGLYIGIRTNLKGINIIGLKRKGLSNKTINQINIAVKKIFNKKNSIEKNISILSQEYKSIKEINEIISFIQNNNKRGLSIISND

SEQ ID NO: 112855 - protein, 249 aa, Unknown
  Bacterial polypetide isolated from the Sargasso Sea
HSSAEIDDDVEIGPFCIIGENVKIKAGSKLHSHVILKGPTTVGKNNVFYQFCTIGEDTPDKKFKGEETTLEIGDENIFREGVTVHRGTVQDKSTTTIGNKNLFMAYAHVAHDCVVGNDNVFANNAGIAGHVTVGNNVTIGALTTIHQFCQVGDYSFAGMNASITMDVPSYIKVASNPARVVGLNSVGMERGGIDQETITILKKAYKIIYRKGFNLKDAVKKVESMESSDVQEVLNFIDSIKSSQRGILR

SEQ ID NO: 112856 - protein, 183 aa, Unknown
  Bacterial polypetide isolated from the Sargasso Sea
TKLIVGDTNIFREGVTIHRGTIQDQGITQIGSNNLFMAYSHVAHDCTVGDNNVFANLAGIAGHVSIGNNVNVGAITTVHQFCKMGDFSFAGMNTSITMDVPAFVKVASDPARVIGLNSVGMKRNNINEESISLMKKAYKLLYRKNLKIDEAIKKIKELHSESNDSYLETFISSIEVSKRGILR

SEQ ID NO: 112857 - protein, 196 aa, Unknown
  Bacterial polypetide isolated from the Sargasso Sea
NCSIGEIPQDLKFTGEETKTIIGNNTIIRENVTINRGTSALGKTTVGNNVLLMAAVHIAHDCIVKDNVIMANMSTLGGHVEIQEYASLGGGVLVHQFCKIGSHVFIGGGFRAVQDVPPYILAVGEPLRFGGINSIGLKRRGYSSNSISKIKKAYRMYFRSDLTRSIALEKMKEKLSNNVDVDNIINFIDNSERGII

SEQ ID NO: 112858 - protein, 266 aa, Unknown
  Bacterial polypetide isolated from the Sargasso Sea
MIHPLAVVSKNTDIHESTNIGPFCVIGDGVKIGKDNNLISHVSITGNTSIKDNNSFYPFCSIGSEPQDLKYNKEKSFLKIGSNNKFRENVTVNPGTSGGGLNTIIGNHCLFMVGSHVAHDCIIKSNVILANNATLAGHVEIDNNAILGGNSAIHQFVRIGKYAMIGGMSGVEKDIIPYGLYTGIRENLKSLNLIGLKRKGLTSNEINKIKNLINIIFDKNDTIEKNIKNNFFESSEILEIKEVIEFLNSNSKRGITNLKMTKIGII

SEQ ID NO: 112859 - protein, 259 aa, Unknown
  Bacterial polypetide isolated from the Sargasso Sea
MKVHPTSIIHPKSKIDDSVEIGPFCIVGEDVEIKKGSKLLSHIVLKGPTSIGEENIFYQFSTIGEDTPDKKFKGEKTKLEIGNRNIFREGVTVHRGTVQDNSITSIGSDNLLMAYSHIAHDCVVGDGNVFANNAGIAGHVSVGNNITIGALTTIHQFCNIGDYSFIGMNTSINMDIPAYVKVAADPARVIGLNSVGMTRNNITSDSISLIKKAYKLVYRKGLKIEEAIKKSKELNKKANDPFLDVFIQSLEVSERGILR

SEQ ID NO: 112860 - protein, 192 aa, Unknown
  Bacterial polypetide isolated from the Sargasso Sea
MKNIHPTAIIDEGAELGSHLSIGPFCRVGAEVKLGDGCHLKSHVVLDGPSTIGSENTFFPFSFIGGEPQDLKFNQEKTHLIVGSKNTFREGVSVHRGTAGGGGETVIGDGNLLMGYVHVAHDCRIGDHNILANYTGLSGHVTLDNYVTLGGQNGVAQFLRIGSYVYTGAGSLIDRNVPPYSTGYGNRFEVKG

SEQ ID NO: 112861 - protein, 264 aa, Unknown
  Bacterial polypetide isolated from the Sargasso Sea
MTKIHDTAIISSSVKVGKDVTIGPFCNIYGDVTIGDKVTLLSHISVSGRTTIGEGTKIWPFSVIGSEPQDLKYDDENSALVIGSNNKIREHVTMHSGTKEGGMITEIGDNNLFMVGAHIAHDCKVGNNCVFANNATLAGHVEVGDWAILGGLSAVHQWSRVGCHSFIGGLAAVTRDLLPFGMAVGNRANLEGVNLVGMRRRNFSKNEIEEVKRAYSILFDENELEFKSRVKKLSEEKFEFNSAKIITSFVSVETNRAYVSPTEV

SEQ ID NO: 112862 - protein, 178 aa, Unknown
  Bacterial polypetide isolated from the Sargasso Sea
MIIHETSIVHPSSKIDDSVEIGPFCIVGENVEIKKDTKLLSHVVIKGPTSIGENNIFYQFSTIGDDTPDKKFKGEKTKLEIGDNNIFREGVTVHRGTVQDKGLTKIGSDNLLMAYSHVAHDCVVGNDNVFANNAGIAGHVNVGNNITIGALTTVHQFCKLGDFCFVGMNTSINMDIPA

SEQ ID NO: 112863 - protein, 195 aa, Unknown
  Bacterial polypetide isolated from the Sargasso Sea
MIHPTSVIETGAVLGQNVKVGPFCYIAANVVIGDNTVLESHVVLKGPTVIGKGNHFYQFTSIGEDCQDKKYNGEPTELIIGDNNVFRENCTVHRGTIQDKGVTRIGSNNLFMNNTHVAHDCVIGDNVIFASGAQSAGHVHIGDWAILGGMSGIHQFCHIGAHAFIGGGSIVVKDVPPYLMAHGSHAVPAGLNVEG

SEQ ID NO: 112864 - protein, 255 aa, Unknown
  Bacterial polypetide isolated from the Sargasso Sea
MSDQSFIHPSAKIDSSATVGPFCFIGEGVTVGPECELKSHVVIKGPTTIGPKNVFYQFCTIGEDTPDKKYQGEKTTLQIGEGNIFREGFTAHRGTVQDKSTTVIGDYNLFMAYSHVAHDCVVGNNNVFANNSGIAGHVNVGNYATLGAVSLIHQFCNVGSYAFTGLNTVITMDIPAFVKVAANPARPIGLNTVGMQRNGFSDDEIAVLKKAYRIVYRKGYSLEDAISSLNELDINQKGLKEFILSVEQSSRGLLR

SEQ ID NO: 112865 - protein, 257 aa, Unknown
  Bacterial polypetide isolated from the Sargasso Sea
MIDPTAIVHPDASIDSNVIIGPYTVIKKDVSIGSGTEIGSHVVISGPTKIGSHNKIFNFCSIGEDPQDKKYKDDSNSYLEIGSGNTIREYVSINRGTSNGGGKTSIGSNNWIMAYVHIAHDCCIGNNSTFANNTTLAGHVSIGDFVILGGFTGVHQFCRVGNYSFSAISSVIVKDVPPYILVSGNTAKPSGLNREGLKRNGFNSDDINLLKKAYRIIYRDGYILAEALEELLKISKDSKEVELLYSFISSSERGIVR

SEQ ID NO: 112866 - protein, 249 aa, Unknown
  Bacterial polypetide isolated from the Sargasso Sea
PAWTLRSRWGPYTVIGAHVTIGAGTTVGAHCVIDGHTTIGADNRIFQFNSIGAIPQDKKYAGEPTELVIGDRNTIREFCTLNLGVPQAGGITTVGHDNWIMAYTHIAHDCHVGNHTTLANNTTLAGHVHLGDWVTVGGLTGIHQFVKIGAHAMVGFASAVSQDVPPFMLVDGNPLAVRGYNVVGLRRRGFSAERIAAVKQMHKLIYRQGLTLEAARAAIAELAESAPQAGDDAAMMERFLADATRGIAR

SEQ ID NO: 112867 - protein, 246 aa, Unknown
  Bacterial polypetide isolated from the Sargasso Sea
DSSAELGSNVKIGPYTVIEPNVIIGDNCIIGNHVTICSNTTIGKNCKIFHCSSIGEIPQDLKFEGEETITNIGDKTVIREYVTINRGTKALGKTSIGSRCLLMASTHVAHDCILGDNVIMSNLSTLGGHVELEDWVILGGGVLIHQFTKIGSHAFIGGGFRAVQDVPPYILAAEDPLKFKSVNSLGLKRRGFSLEERKQIKKIYKIYFRSGSNREESLKHIIDEIDSSDVKDQIVNFINTSQRGII

SEQ ID NO: 112868 - protein, 103 aa, Unknown
  Bacterial polypetide isolated from the Sargasso Sea
VHQFCKIGEHSFIGAGGYISQDVPPYILVAGSPIEYSGINSVGLKRRGFSKKDRQDIKKIYNIFFRSKRNRKENLSTINKEFSDNYYLKTISEFIQNSKRGII

SEQ ID NO: 112869 - protein, 258 aa, Unknown
  Bacterial polypetide isolated from the Sargasso Sea
MSIHESSIIHPSAEIDENVEIGPFCIVGEKVKIKSGSKLLSHVVLKGPTTIGKNNVFYQFCTIGEDTPDKKFKGEETTLVIGDENIFREGVTVHRGTVQDKSTTVIGNKNLFMAYAHVAHDCVVGNDNVFANNSGIAGHVTVGNNVTIGALTTIHQFCQMGDYSFAGMNASITMDVPSYIKVASNPARVVGLNSVGMERGGIDQETITILKKAYKIIYRKGFNLKDAIEKVESIESSNVQEVRNFIDSIKSSERGILR

SEQ ID NO: 112870 - protein, 256 aa, Unknown
  Bacterial polypetide isolated from the Sargasso Sea
MHHETAIIDKKAKIDEGVTIGPYSVIGPGVRILKGTIIESHVILSGPTKIGKNNHIFQFSTVGDGSPDKKYKGEPTKLTIGDGNQIREGVTIHRGTVQEKGVTKIGNNNLLLAYSHVAHDCEIADNVVLTNQAALAGAVKVGEGAILGGYAIVHQYCSIGAYSFCAMGSAVNKDVPAFVRVRGNPAGVYGINSIGLRRQGFSKSAIESLKSAYRSVYRKNLTVEEALKEIRPLATKHKEVKLFTSTIKKSTRGIAR

SEQ ID NO: 112871 - protein, 191 aa, Unknown
  Bacterial polypetide isolated from the Sargasso Sea
MIIHETSIVHPSSKIDDSVEIGPFCIVGENVEIKKDTKLLSHVVIKGPTSIGANNIFYQFSTIGDDTPDKKFKGEKTKLEIGDNNIFREGVTVHRGTVQDKGLTKIGSDNLLMAYSHVAHDCVVGNDNVFANNAGIAGHVNVGNNITIGALTTVHQFCKLGDFCFVGMNTSINMDIPAYLKVAADPARVIG

SEQ ID NO: 112872 - protein, 258 aa, Unknown
  Bacterial polypetide isolated from the Sargasso Sea
MSIHESSIIHPSAEIDENVEIGPFCIVGEKVKVKSGSKLLSHVVLKGPTTVGKNNVFYQFCTIGEDTPDKKFKGEETTLEIGDENVFREGVTVHRGTVQDKSTTIIGNKNLFMAYAHVAHDCVVGSDNVFANNAGIAGHVTVGNNVTIGALTTIHQFCQMGDYSFAGMNASITMDVPAYIKVASNPARVVGLNSVGMERGGIDQETITILKKAYKTIYRKGFNLKDAIEKVESMESNGVKEVRNFVDSIKSSERGILR

SEQ ID NO: 112873 - protein, 258 aa, Unknown
  Bacterial polypetide isolated from the Sargasso Sea
MSIHESSIIHPSAEIDENVEIGPFCVVGEKVKIKSGSKLLSHVVLKGPTTVGKNNVFYQFSTIGEDTPDKKFKGEETTLEIGDENIFREGVTVHRGTVQDKSTTIIGNKNLFMAYAHVAHDCVVGSDNVFANNAGIAGHVTVGNNVTIGALTTIHQFCQMGDYSFAGMNASITMDVPAYIKVASNPARVVGLNSVGMERGGINQETITILKKAYKTIYRKGFNLKDAIEKVESMESNDLQEVQNFLDTIKSSERGILR

SEQ ID NO: 112874 - protein, 264 aa, Unknown
  Bacterial polypetide isolated from the Sargasso Sea
MTDIHDTAIINPKVKIGDNVSIGPYCNIDGDVTIRDNVTLVSHISISGSTTIGENTKIWPFSVIGSEPQDLKYDSEDGKLVIGANNKIREHVTMHSGTKEGGMLTEIGENNLFMVGAHIAHDCKVGNNCVFANNATLAGHVEVGDWAILGGLAAVHQWSRIGCHSFIGGLAAVTRDLLPFGMAVGNRANLEGINLVGMRRRNFSKSEIDEVKKAYSILFDNNDLEFKNRIKKLKDEEFKLNSAKIITNFVSVETNRAYVSPSEV

SEQ ID NO: 112875 - protein, 256 aa, Unknown
  Bacterial polypetide isolated from the Sargasso Sea
MSQIHATSLVENGAVIGKNVEIGPFCHVGANVSIGDGCILKSHVVIDGWTTLGEKNTIYPFTSIGGEPQDLKYQNEKTLVTIGSENIIREGVTIHRGTKGGGGETNLGDHNLLMGYVHIAHDCHIGNHNILSNYTGLSGHCTLDDHINLGGQNGIAQFLHIGSYVFTGGGSLIDRNIPPYSTGFGNRFEVKGVNIVGLKRKGFSREAISEILEAHRLYFRADLKSDEALRIIEETYGDRKEIREFLDFMVKTDGTA

SEQ ID NO: 112876 - protein, 259 aa, Unknown
  Bacterial polypetide isolated from the Sargasso Sea
MIIHKTSIVHPSSKIDDSVEIGPFCIVGENVEIKKDTKLLSHVVIKGPTSIGANNIFYQFSTIGDDTPDKKFKGEKTKLEIGDNNIFREGVTVHRGTVQDKGLTKIGSDNLLMAYSHVAHDCVVGNDNVFANNAGIAGHVNVGNNITIGALTTVHQFCKLGDFCFVGMNTSINMDIPAYLKVAADPARVIGLNTVGMTRNGIEKESISLIKKAYKLVYKKNLKINTAINEMKKLNHDSQNTYLNTFIASIEASERGILR

SEQ ID NO: 112877 - protein, 264 aa, Unknown
  Bacterial polypetide isolated from the Sargasso Sea
MTNIHETAIISPDVKIGDNVSIGPYCNINGDVSIKDNVTLISHISISGSTTIGENTKIWPFSVIGSEPQDLKYDSEDGKLVIGANNKIREHVTMHSGTKEGGMLTEIGENNLFMVGAHIAHDCKVGNNCVFANNATLAGHVEVGDWAILGGLAAVHQWSRIGCHSFIGGLAAVTRDLLPFGMAVGNRANLEGINLIGMRRRNFSKSEIDEVKKVYSILFNANDLEFKNKINKLKKEKFSSDPAKIITDFVNVETNRAYVSPTEI

SEQ ID NO: 112878 - protein, 259 aa, Unknown
  Bacterial polypetide isolated from the Sargasso Sea
MSIHSSSIIHPSSVIDESVHIGPFCIIGEDVEIKKGSKLLSHVVLKGPTTIGENNTIYQFATVGDDTPDKKYKGEKTKLIVGDNNIFREGVTIHRGTIQDQGITQIGSNNLFMAYSHVAHDCIVGDNNVFANLAGIAGHVSIGNNVNVGAITTVHQFCKMGDFSFAGMNTSITMDVPAFVKVASDPARVIGLNSVGMKRNNINEESISLMKKAYKLLYRKNLKIDEAIKKIKELHSESNDSCLETFISSIEVSERGILR

SEQ ID NO: 112879 - protein, 165 aa, Unknown
  Bacterial polypetide isolated from the Sargasso Sea
MTNSVIDSSAKIDKSVKIGPFCVIGPDVEIGPNCILHSHVVIKGPTKIGMGNSFFQFSTIGEDTPDKKYAGEATTLEIGDNNIFREGVTVHRGTVQDQSKTLIGNENLFMAYVHIAHDCIVGDNNVFANATCLAGHVKVGNNVVLGGVTLVHQFCSLGDHSFTGN

SEQ ID NO: 112880 - protein, 278 aa, Unknown
  Bacterial polypetide isolated from the Sargasso Sea
MYRRADVRQTRGLTHVIDQTAIIHDTAVVHESAVIGKGVEIGPFSVIGAEVEIGDNTWVSSHVVIKGPTKIGRGNKIFQHTSIGEDCQDKKYAGERTFLEIGDNNVFRENCTVHRGTIQDQSLTRIGSGNLFMVNVHVAHDCIIGDNCIFANNATLAGHVVIGDFVIFGGLSAIHQFGRVGSHAFVGGCAALNKDVPPYVMAAGNYAKPFGVNSEGLRRRGYTPEAISAVKRAYKEIFRSGKTIEEVLPVLTEMAQAEPAIQLYVDFLKDNERGIIRA

SEQ ID NO: 112881 - protein, 179 aa, Unknown
  Bacterial polypetide isolated from the Sargasso Sea
MVIGDNNVIRENCTIHRGTVQDRGETRIGSGNLLMAYVHVAHDCIVGDNTILANCATLAGHVSVGDHAILGGGTMVHQFCHIGPHSMAAGGSIVLKDIPAYVMASGQSAQPHGMNVEGLKRRGFSKDVLMALRRAYKVVYRQGLTTEQAIEELEKSFNDVPEVRPLIDSLRGADRGIIR

SEQ ID NO: 112882 - protein, 142 aa, Unknown
  Bacterial polypetide isolated from the Sargasso Sea
VHVAHDCTVGDNTILANCATLAGHVSVGDFAILGGGTMVHQFCHIGAHSMAAGGSIVLKDIPAYVMASGQSAEPHGMNVEGLKRRGFSKDVLLALRRAYKVIYRQGLTTEQAVEELEKSYSDVAEIRPLIDSLRGAHRGIIR

SEQ ID NO: 112883 - protein, 144 aa, Unknown
  Bacterial polypetide isolated from the Sargasso Sea
MNSIDPRAIIDPSAKLADGVEVGPWSIVGPDVEIGEGTVIGPHVVLKGPTRIGKHNRIFQFSSIGEDTPDLKYKGEPTRLVIGDHNVIREGVTIHRGTVQDRSETTVGDHNLIMAYAHIGHDSVIGNHCILVNNTAWQVMYMWV

SEQ ID NO: 112884 - protein, 256 aa, Unknown
  Bacterial polypetide isolated from the Sargasso Sea
MIHPTAVIEPGAVLGQNVKVGPFCYIAANVVIGDDTVLESHVVLKGPTVMGKGNHFYQFTSIGEDCQDKKYNGEPTELIIGDNNVFRENCTVHRGTVQDKGVTRIGSNNLFMNNTHVAHDCVIGDNVIFASGAQSAGHVHIGDWAILGGMSGIHQFCHIGAHAFIGGGSIVVKDVPPYLMAHGSHAVPAGLNLEGLKRRGFSSDAILEVRRAYKEVYRKGLTVQEALDALAEKSAEFPEVKAFTDFIANSSRGIIR

SEQ ID NO: 112885 - protein, 115 aa, Unknown
  Bacterial polypetide isolated from the Sargasso Sea
MFVIDKTAVIHPTAVIEEGAVIGAGVRIGPYCCVGGDVEIGEGTVLKSHVVVSGHTRIGRDNIVYPFATIGEDNQDLKYAGEPTLVEIGDRNRIRESVTIHRGTVQGGGVTRVET

SEQ ID NO: 112886 - protein, 288 aa, Unknown
  Bacterial polypetide isolated from the Sargasso Sea
FEHIRALMTRGNSIEFFPEGGRSRTGLSLPSRPGLLSLVIRSFASLKDQNVKIVPVYIGYEKILEGQSYLSELTGGKKKKESFMDPIKVFKDFRNYLGNSYLNFADPIDLDTFLKDQVNDDYSISSPQEKPEWLPDATGKLGQSVIRAINNSVAVTSTSLFSVALLTSSTQTMDEDDLEERINFFISLIEKSPDYKDVWITQREAKDMISKTKKLGFIEPIMIAAKKVYRPTSDQVATLSFYKNNIIHLFILYSLICESLKFIKKASKEEIIKLIEMIYPILQKIFIE

SEQ ID NO: 112887 - protein, 550 aa, Unknown
  Bacterial polypetide isolated from the Sargasso Sea
DLKAGENIALRRAARLLRTKFRLQREATLGPNFTDRKQFIEELANSRRVRKEIEQLAQTEKSQMKKRLRAFQISNTVVANMSHRKLRIFYRLLSWFWNKIYDGLAITGANEVMITSESHTLVYVPSHRSHIDYMALSYSLYEVGLMTPHIAAGDNLNLPMLGNFLRGSGAFFMRRTFREDPLYSAIFSEYVHKLLYKGHCIEFFPEGGRSRTGRLLRAKYGLLKLCLESHLTDLPKPIAFVPVYFGYERILEANTYIEQLKGTKKKTEKLLDILSALKFTRNYYGRLSVNLGKPIELDTWLEARKDRKTVRSFDATLIALGNHLMHSINKKAIANDVNFCATILLNTRANSMSLEEYERHTIFFRDLLIRVNGNSSTTTAHDSNQTVIDRLLKLEFINVSNQETGTIVSLKENALQSAHWYQNNTIHLFMPSAVIAFLLTRQKTGITALSLRAISRRVYQYLYDGPSEESSMQIKKSLELLSSRETLSVKDGRLWPPKRKDPGYSELKILSRLVEPILEELFVILSLASTRRFNELHLRDKTESILSYLG

SEQ ID NO: 112888 - protein, 767 aa, Unknown
  Bacterial polypetide isolated from the Sargasso Sea
NVVFALPLDSASDLMALAIANHENQTPSPLDKLTSSNIERFICLKDPTYIISEQKIKRQNPENLKEILDLQKEKLLIVPVSFTWGKHPDKQQSIFKIIFSPSWRTSGSIKKFFKIIFHGRNLLITFHNPLQVDSLVELSNSNEKNTQLLSRYLRALFRKSKQAMLGPDISHRRTMVRSLVKNINVREEINKQSNGRKSRKRRLKKKAYKYAREMCSDLNYPIVRMLVRGFTWFWNSRYDGLNIRNIDHIKSISKDNALVYVPCHRSHIDYCALTFILYENGLMLPQIAAGNNLNLPVLGSILRGAGAIFMRRSFMNNAVYSTVFFEYIKSLMVRGSSIEFFPEGGRSRTGLSLTPRPGLLSLVLRSFASLRGQKVKIIPIYIGYEKILEGQSYLSELSGSKKKTESVLDPFKVLKDFNNYLGNAYLNFGEPVDLEKFLIENVSKDFHIDSPLDKPDWLKPTTSLLGDTIIRSVNNSVAVSSTSLFAMGLLTDPTQTLNKETLKNRISFYVDLIKNSESYKDVWLTEESAEEIIDRSEKLRFIKHQLIGSDEVYRPNASEVAALSFYKNNISHIFMLYSLICESVRYVDEISKDEMYKLIKMVYPIFSREYFLKSTNITKEEIDQALTTLLDKGVLDSKTQKIYCKPQDKDDNINKYLSLCNICEPSLKRFYITMSVLWEKENISKDMLQTICDSISKNLETIEGWPYPEFSDSTKFQNFIEFLITERYVKKDEQSGNLSASKITLKAQKSYKTFFDSKFLKLMQNIN

SEQ ID NO: 112889 - protein, 790 aa, Unknown
  Bacterial polypetide isolated from the Sargasso Sea
MSFFIKPLISSKLRTEDLNKLESNRNIVYALASESVIDLAALNEICKQNNLPSPLENLSSIGSKRFICLKSPKYLISEQKFKRQKTHNLEEILSYEDDIAIIPVTISWGNRPDKEQSLFKIIFSPSWRPAGTVKRIFKLIIHGRNLTIQFERLFDIKQEVEQNNSTEKNALIISRYLRAVFRKSKQAMLGPDISHRRTLVKSLVRNKYVRNEIKTLADGNNSRKRQLTKKAYRYANEICSDLNYPIVNLLASGFTWFWNTRYEGLHTKNLEEIRELSKDNSLIYLPCHRSHIDYCALTYLLYENGLMVPQVAAGNNLNLPIIGGILRGAGAVFMRRTFMSNALYSTVFFEHIRALMTRGNSIEFFPEGGRSRTGLSLPSRPGLLSLIIRSYASLKNQNVKIVPVYIGYEKILEGQSYLSELAGGKKKKESIFDPLKVFKDFRNYLGNAYLNFSEPIDLDSFLKEHVGDYSISSPQEKPEWLQQATSQLGQKVIKSINNSVAITSTSLFSVALLTSSTQAMSEEDMISRIKFFMTLISNSSDYKDVWFTQEDIQEMIHKTEKLGFVSPTFVSSKKIYRPSADQISTLSFYKNNIAHLFILYSLICESIKFVKKASEDDVVNLLVMIYPIFAKDFHLKQSIASTETVKAAMVVLKGMGVLNSDEEGNIVPPSENSPSFNNYIALSNLCEPSLKRFYIVMSSIWKKEKIMKEDLKIQCKELAESLELIEGWPYPEFSDKAKFDNFVYMMKETKYFKEDEEGYLSASKITKRAKKLYKQFFDKDFLEFVDSFPS

SEQ ID NO: 112890 - protein, 365 aa, Unknown
  Bacterial polypetide isolated from the Sargasso Sea
SLFKIIFSPSWRPAGTLKRIFKLIVHGRNLKLQLEKTFHVKEEIEQKNGIKKNALILSRYLRAVFRKSKQAMLGPDISHRRTLVKSLVRNKYVREEVKKLANGNKSRKKRLTKKAYKYANEICSDTNYSILSLLDSGFTWFWNTRYEGLHTNNLEKIKELSKDNSLIYLPCHRSHIDYCALTYLLYENGLMIPQVAAGNNLNVPIVGSILRGAGAVFMRRTFMSNSLYSTVFFEHIRALMTRGNSIEFFPEGGRSRTGLSLPSRPGLLSLVIRSFASLKDQNVKIVPVYIGYEKILEGQSYLSELTGGKKKKESLMDPIKVFKDFRNYLGNSYLNFADPIDLDTFLKAHVNDEYSISTPQEKQDG

SEQ ID NO: 112891 - protein, 435 aa, Unknown
  Bacterial polypetide isolated from the Sargasso Sea
KGYPVKYYSEGGRSRTGRLLQPKTGMLAMTVQAALRGIDRPISLVPVYLGYEHVMEVNTYLTELKGSSKKKESISGVFSAARKLRDYGYGYVNFGQPISLNAFLNQQAPDWRASMETADTQKPAWLNPAVATLATEMMQRINQAAALNSINLIATCLLATRQHSLTRQELTRQLEFYRNLQHYAPYHAGVTLPEGSVSQWIDHAISLKKVEVSQDSFGQIIQLTPENAILLSYYRNNVCHLFMLPAILATALLQHPQLSKVQLINICQLLQPLLQHELFLKPEHFNAYIEQLLEQLQKHQLIEAVGASLQAVPVQQAGHFMLELLAHNAQDVLQRYAVVLNLLQLHSPLTRADLEQQSHELAQRLSTLHGISSPEYLDKQLFATLITALREAGYCHTNEQNELEATAILLPLQQTVNGLLRADILQTVLSIVKKT

SEQ ID NO: 112892 - protein, 791 aa, Unknown
  Bacterial polypetide isolated from the Sargasso Sea
MSFFVRHLSSSSLKKEELKIIHSEKNIVYALPTESLIDLASLNEICKQNNLPLPVENIQDTKLKRFICLQSPKYLISEQKFKRQKTHNLEELLKLDHEISIIPVSISWGNRPDKKQSLFKIIFSPSWRPAGSLKRIFKLIVHGRNLKLQVERTFYVKEEIDQKNDIKKNALILSRYLRAVFRKSKQAMLGPDISHRRTLVKSLVRNRYVREEVKKLADGNKSRKKRLTKKAYKYANEICSDTNYSILSLLDSGFTWFWNTRYEGLHTNNLEKIKKLSKDNSLIYLPCHRSHIDYCALTYLLYENGLMIPQVAAGNNLNVPILGSILRGAGAVFMRRTFMSNSLYSTVFFEHIRALMIRGNSIEFFPEGGRSRTGLSLPSRPGLLSLIIRSFASLKNQNVKIVPVYIGYEKILEGQSYLSELTGGKKKKESLMDPIKVFKDFRNYLGNSYLNFADPIDLDSFLKTHVNDEYTISSPQKKPEWLTEVTVKLGQSVIRAINNSVAVTSTSLFSVALLSSSTQTMDEENLEERINFFISLIEKSSDYKDVWITQREVKDIISKTKKLGFIEPIMIASRKVYRPTSDQVATLSFYKNNIVHIFILYSLICESLKFIKKAQKEEIIKLIEMIYPIFAKDFHLKNEIIDKELISNAIRVLQIKGILLEDKAGNIKPPSENSLVFQHYIALSNLCEPSLKRFYIVMSTIWKSESILKEDLNMKCKKLAEDLEEIEGWPYPEFSDKAKFDNFIYMMKQTKFFKEDSEGKLSASLITKKAKNLYEQFFDKDFLEFIERQSN

SEQ ID NO: 112893 - protein, 304 aa, Unknown
  Bacterial polypetide isolated from the Sargasso Sea
ADSIASNMSTPTIRALTFLLNWFWNRIYEGIELKGIDKVNAVSRTHSLIYVPCHRSHVDYLLLSFLLFHKGLMIPHIAAGDNLNIPILGRILRQGGAFFMRRSFSGDELYSQVFKEYLYQTCNRGHSIEFFPEGGRSRTGRLLSPKLGFLNMCVESHERGLNKPVAFIPVYIGYEKIIEGATYVSEMRGAQKTTERLSDILINLKLIKQNFGKVQVNIGQILKLDEWAVKSKKPNQNSTEFLARKIMCAINDAATVNAVNLAALVFLGTARQSLDEETLKEQLELYINLVKNLYDSETLTNNVE

SEQ ID NO: 112894 - protein, 279 aa, Unknown
  Bacterial polypetide isolated from the Sargasso Sea
MPVKNGPSHSFFFLYKRIGGLFRGGRHKPVPTREFGDLVRFGLEHPEQDVQIVPVSLFWGRSPDKEKSLVKLLLSDTWSVAGRLQKFLIILVHGRNTYVQFNQPLSLNQVVEEYRNNEQKANRKLARLLRTHFRRVRQAVLGPDLSHRRTLVEGLVRTQAVKEAIRETAAKDDIPPEKVRAKAYKYADEIAASMSIVTIRFLELVLAWLWNRIYNGIAINNIKVAKETAQDNAVVYVPCHRSHIDYLLLSYVLYKNGLMPPHIAAGINLNMPVVGPILR

SEQ ID NO: 112895 - protein, 281 aa, Unknown
  Bacterial polypetide isolated from the Sargasso Sea
EVATYHKELSGKKKQKESVWQVFGAIRKLGNFGQGYVNFGEPITLQTFLNEMAPNWRAELADDPEQKPTWLTPAVNVLANRVMTRINDAAAASSVTLTSLALLASEQNALERCLLERQLDLYLTLLKRVPYTSFTSVAEGDGKHLVQQGIDLNKFSVSCDPLGEIVSIDANQAISMTYYRNNIIHLFIIPSLIASCLTHNEQSQRQQIVAIVNDFYPLLKAELFMGIKDIPSYVNQVLDLFIEQGLITESDNLSVVTEHSSQLVLLSGSVSETLQRYAIIF

SEQ ID NO: 112896 - protein, 281 aa, Unknown
  Bacterial polypetide isolated from the Sargasso Sea
RSRTGRMLRPKTGMLAITLRSFLRSNRLPIVFVPVYIGYERVLEGRTYLGELRGASKKKESIFDLFKVLGALKQRFGQVSVNFGEPIKLAEFLDQQQPGWREQELGPQYRPAWLNDTTNRLGERVARHLNEAASINPVNLVALALLSTSKLALDDRALARVLDLYLALLRAVPYSPHTTLPDGDGATLIEHVKGMDLLAEQKDALGKILYLDEQNAVLMTYYRNNVLHIFALPALLASFFQSSARISREQILRYAGALYPYLQSELFIRWEQSELEGVIDP

SEQ ID NO: 112897 - protein, 282 aa, Unknown
  Bacterial polypetide isolated from the Sargasso Sea
LLFHKGLMIPHIAAGDNLNIPILGRILRKGGAFFMRRSFNGDELYSQVFKEYLYQTCNRGHSIEFFPEGGRSRTGRLLSPKLGFLKMCVESHERGLSKPVAFIPVYIGYEKIIEGATYVSEMRGAQKTTERLSDILINLKLIKQNFGKVQVNIGQVLKLDEWTAESKTPNQNSTEFLARKIMCAINDAATVNAVNLTALVFLATARQSLDEETLKEQLELYINLVKNLYNSETLTNNVEDANSIILRLTSLGLLKMDVEEFGQVFYLEPFSAVLMTWYQNNV

SEQ ID NO: 112898 - protein, 285 aa, Unknown
  Bacterial polypetide isolated from the Sargasso Sea
RPVADVAVGDHVEPAAFFFLNPATSWFGRRTRLVAPPTLVRLVGALEHNAVENAQIIPVSVFWGQSPNRETSAWKLLFADSWAVTGRLRKLLSILVLGRKTRVQFSAPIQLNELIALNKGHERTLRMVHRMLRVHFRNQKTAVIGPDLSHRRNLVKGLVHAPQVRQAIRDEAERENISIERAEARALRYGNEVASDYAYTAVRFLEVVLSWFWNKIYDGIRVNHIEPLQEAVRGYEVIYVPCHRSHIDYLLLSYLLFRNGLTPPHIAAGINLNMPVIGSLLRRGG

SEQ ID NO: 112899 - protein, 303 aa, Unknown
  Bacterial polypetide isolated from the Sargasso Sea
IQNQKATTLGPNFENRTELLNSIATSNAVKDSLTNHPDQSETFPRKIADSIASNMSYPTIRALTFLLNWFWNRIYEGIELTGIDKVNAVSRTHSLIYVPCHRSHVDYLLLSFLLFHKGLMIPHIAAGDNLNIPILGRILRQGGAFFMRRSFSGDELYSQVFKEYLYQTCNRGHSIEFFPEGGRSRTGRLLSPKLGFLKMCVESHERGLSKPVAFIPVYIGYEKIIEGATYVSEMRGAQKTTERLSDILINLKLIRQNFGKVQVNIGQVLKLDEWTAQSKTPNQNSTEFLARKIMCAINDAATV

SEQ ID NO: 112900 - protein, 451 aa, Unknown
  Bacterial polypetide isolated from the Sargasso Sea
MVKAHSIPVNVETELGIDKSKPIVYLLPTNSVTDQLALRMSTKALGLPSPTETLTLAGREYSSTLFLRKTQPLFRSSAKDTGIEDVFTDLFHLHRDHENLDLQVVPVYVTWGRAPGRGKPGLSDLIADKAAPSWLRKLFIVLFLGRDNFINYSKAVSARAMSNQHGSDQSIAHKLVRVASTHFQRKRQSMTGPTLLERQELNNSVLGSDAVRRAIAEESRSKKVSHEKAKETAQTYITEIAADYREGLIRFGDRLLTRIWNKIYNGISVGHADRIRELAANGHEIIYVPCHRSHMDYLLLTYVIYHEGMVTPHIAAGINLNFWPVGKMFRRGGAFFLRRSFAGNKLYTAVFREYLELLFNKGYSVKYYPEGGRSRTGRLIPPKTGMLAMTIQAMLKGVNRPVSIVPVYIGYENVMEVKSYLNELKGSKKKKESNLQVFSAIRKLKIMVTDT

SEQ ID NO: 112901 - protein, 368 aa, Unknown
  Bacterial polypetide isolated from the Sargasso Sea
VSVFWGRRPEKENSMWRILFSDNWSPAGFIKKFFIIITQGRQLYVQFSQPLSLRTLVDQCQTDDQAVRKASRILRVHFRRQQEAAIGPDLSHRRTLTNTVVDSISVREVISAEAKRQDLSEEKLEAKARAYAMEIAADYSHTVIRTLELFLNWLWNRLYGGIRLYNMDNLTKVAGDHEVIYVPCHRSHIDYLLLSFVMFRNGLVPPHIAAGINLNLPIVGTVLRRGGAFFMRRSFRGNPLYAAVFSEYLHTITTRGFSIEYFVEGGRSRSGRMLKPRTGMLAMTVRSFLRDSRKPIAFVPVYVGYEKVIEAGSYIGELHGKKKQKESVGGLMKSLSVLRSHFGQVHLNFGEPIKLVDYLDGHNPKMAQ

SEQ ID NO: 112902 - protein, 304 aa, Unknown
  Bacterial polypetide isolated from the Sargasso Sea
PAIRFLEVVLSWFWNKIYDGIKVNNIEGVQKVAQGYEVIYVPCHRSHIDYLLLSYLLFKNGLTPPHIAAGINLNMPVIGSLLRRGGAFFMRRTFKGNPLYTSVFNEYLHTLFTKGFPVEYFVEGGRSRTGRMLQPKTGMLAITLRSFLRSSRMPIVFVPVYIGYERVLEGRTYLGELRGASKKKESIFDIFKVVGALKQRFGQVAVNFGEPIKLAEFLDAEQPDWRAQELGPNYKPAWLNETTNRLGEQVARHLNEAAAVNPVNLVALALLSTTRLALDEQAMARQLDLYLALLRRVPYSPHTT

SEQ ID NO: 112903 - protein, 234 aa, Unknown
  Bacterial polypetide isolated from the Sargasso Sea
LYRGLSVNGAEKVRQLAQEGHEIVYVPCHRSHMDYLLLSYVIYHQGMVPPHIAAGINLNFWPAGPIFRHGGAFFIRRTFKGNPLYSTVFREYLNLLFAKGYSVEFFTEGGRSRTGRLLPPKTGMLAMTLQAMMRGLDRPVTLVPVYLGYEHVMEVNTYHNELKGSRKEKESFLQVLGILRKLRNYGRGFVNFGEPLTLNSYLSEHIPDWKQHIGEEERPEWMAGTVNQLAELLM

SEQ ID NO: 112904 - protein, 254 aa, Unknown
  Bacterial polypetide isolated from the Sargasso Sea
EAKAKNISQTEARQNALKLLDEIAANYSEAMIRVADRFLTWLWNKLYNGIHIKHTEQLHELTNKGHEIIYMPCHRSHMDYLLLTYSIYHLGLVPPHIAAGVNLNFFPAGGIFRRSGAFFIRRSFAGNKLYSAIFKEYLSQLFIKGYSVKFYTEGGRSRTGRLLPPKTGMLAMTFQAMLRGIDRPVSIVPVYIGYEHVMEINTYLKELAGKDKKGESVFGIFKAIKNLKNYGRGYLNFGDPISVNQYLNDNQPDW

SEQ ID NO: 112905 - protein, 293 aa, Unknown
  Bacterial polypetide isolated from the Sargasso Sea
RESIDPIEAVRPAWLTPTVNGIAAELMVRINNAGAANAMNLCCTALLASRQRSLTREQLTEQLNCYLDLMRNVPYSSDSTVPSVSAGDLIDHALQMNKFEVEKDTIGDIIILPREQAVLMTYYRNNIAHMLVLPSLMAAIVTQHRHISREALLQHVDVLYPMLKAELFLRWERDELAGVIDALTAEMQRQGLITVQDDELHINPAHSRTLQLLAAGARETLQRYAITFWLLSANPSINRGTLEKESRTVAQRLSVLHGINAPEFFDKAVFSSLVLTLRDEGYISDTGDAEPGE

SEQ ID NO: 112906 - protein, 300 aa, Unknown
  Bacterial polypetide isolated from the Sargasso Sea
RGRPRLPARHDLFKKLLASKAIAKAVEDEARSKKISHEKAQQNAIALMEEIAANFSYEMIRLTDRILSFTWNRLYQGINVNNAERVRQLAHDGHEIVYVPCHRSHMDYLLLSYVLYHQGLVPPHIAAGINLNFWPAGPIFRRLGAFFIRRTFKGNKLYSTVFREYLGELFSRGYSVEYFVEGGRSRTGRLLDPKTGTLSMTIQAMLRGGSRPITLVPIYIGYEHVMEVGTYAKELRGATKEKESLPQMLRGLSKLRNLGQGYVNFGEPMPLMTYLNHHVPEWRESIDPIEAVRPAWLTPT

SEQ ID NO: 112907 - protein, 421 aa, Unknown
  Bacterial polypetide isolated from the Sargasso Sea
MLLSYLLFRNGLTPPHIAAGINLNMPVIGGLLRRGGAFFMRRTFKGNPLYTAVFNEYLHTLFSKGFPVEYFVEGGRSRTGRMLRPKTGMLAITLRSFLRSNRLPIVFVPVYIGYERVLEGRTYLGELRGASKKKESIFDLFKVLGALKQRFGQVSVNFGEPIKLAEFLDQQQPGWRQQELAPQYRPAWLNDTTNRLGERVARHLNEAASINPVNLVALALLSTSKLALDDRALARVLDLYLALLRAVPYSPHTTLPEGDGAALIEHVKGMDLLAEQKDALGKILYLDEQNAVLMTYYRNNVLHIFALPALLASFFQSSARISREQILRYAGALYPYLQAELFIRWEIEQLDDVVDQWLAAFVEQGLLKVEGDVYVRPAPSSRQFVLLTLLSRSVAQNLQRFYMAIALLLNAGQNAISAEEL

SEQ ID NO: 112908 - protein, 807 aa, Unknown
  Bacterial polypetide isolated from the Sargasso Sea
MPKQDSLWLKSLRWIQKHLVHTIVVPQDPFADLNLDASRPLAYVMKTESLSDIAALSEITTKLGLPSPYEPLVVNGVVAPRVVCLEGRKPLFGDRASNEPFLECFMRLLAVHKEKPELDIQLVPVSLYWGRTPGKEDDTMKAAVLERENPTWLRKCLMILFLGRHNFVQFSNAVSLRYMADEHGTDMGIAHKLARVARVHFRRQRKVMTGPVLPNRQAMFHSLLKSESLRKAIQEEAASKKISETQARETAIEYLDEIAANYSDSLVRIAERFLTWLWNKLYSGINIKGAEQIRQLHHDGHEIVYVPCHRSHMDYLLLSYILYYQGMVPPHIAAGINLNFWPAGPLFRRGGAFFIRRSFNGNKLYTAVFREYLDQLFAKGYSVEYFSEGGRSRTGRLLAPKTGMIAMTINSVLRGIERPVTLVPVYLGYDHVMEVATYHKELSGKKKQKESVWQVFGAIRKLGNFGQGYVNFGEPITLQNFLNETAPNWRTEVADDPEQKPTWLTPAVNVLANRVMTRINDAAAASSITLTSLVLLASEQNALERCLLERQLDLYLTLLKRVPYTSFTSVAEGDGKHLVQQGLELNKFSIHADPLGEIVSIDANQAISMTYYRNNIIHLFIIPSLIASCLTNNKQISRAQILGIVSDFYPLLKAELFMGIKDLPSYVNQVLDLFIEQGLVQESDTLSVVTEHTSQMLLLAGSVSETLQRYAIIFNLLAHRPKMERSELESESHLLAQRLGALHGITAPEFYDKKLYNTLSVKLKELGYFSEKEDKSDVERIRDQANSLLRASVRQTIVASVTAEHIV

SEQ ID NO: 112909 - protein, 375 aa, Unknown
  Bacterial polypetide isolated from the Sargasso Sea
GRAPGKEDSVKSMLGESESPSWLAKLFIVLISGRHTLVRFSKAVSVRQIIENATVNEDTAHKLLRVARFHFYRQRLAATGPKLPDRAALFNSLLASDALKKAIEEEAQSKKISIREARAEALKLLEEIAADYRESTLRVGDRFLGWLWKKLYSGLKITNGQVLTDLVQKGHEIVYVPCHRSHMDYLLLSYVIYHQGLAPPHIAAGINLNFWPVGNFFRRGGAFFIRRSFSGEKLYSAVFREYLSQLFSKGYPVKYYSEGGRSRTGRLLQPKTGMLAMTVQAVLRGIDRPISLVPVYLGYEHVMEVNTYLTELKGSSKKKESIGGVFSAARKLRDYGYGYVNFGQPISLNAFLNQQAPDWRASLETADLQKPSWLK

SEQ ID NO: 112910 - protein, 807 aa, Unknown
  Bacterial polypetide isolated from the Sargasso Sea
MSLGQNISRAILQWPVSGLVNHKSLPENPITELKLDPARPIVYALKTSSITDLMTLQQCCEDLGLPGPFTPLELNGQLLPRYVCLDRPPPLFGKRSKPLPFLQEFHQLLDLHKQDPALDIQVVPVTLFWGRAPGREGEEASGWNIISSLAPNRLKKALIVILKGRENLVRFSPPLSLRHMADKHGTDEAIAHKLARVARTHFSRQQLAATGPKLPNRNLLFKQLLDSNVIQQAIEEEAQREGISLEKAQKRAHGYMDEIASDFSYRLIRLGESFLGWLWNKLYRGLSVNGAEKVRQLAQEGHEIVYVPCHRSHMDYLLLSYVIYHQGMVPPHIAAGINLNFWPAGPIFRHGGAFFIRRTFKGNPLYSTVFREYLNLLFAKGYSVEFFTEGGRSRTGRLLPPKTGMLAMTLQAMMRGLDRPVTLVPVYLGYEHVMEVNTYHNELKGSRKEKESFLQVLGILRKLRNYGRGFVNFGEPLTLNNYLNEHVPSWKEHIGEEERPEWMAPTVNQLAELLMTRINGAAAVNGLTLSALALLAAERHALTRDELQAQLNTYLDLLKQVPYSPHSTIPDEDAKTLLDQAMELNKFEVSEDKLGQIVSLDRYQAILLTYYRNNILHLFAMPSLVAALIERCEGISRSEIVARCIDIYPLLKTELFLRYEEDELPELVDALLAELQRQQLIEARDGGFWVNPVNQTRLLLLAESIQETLQRYAIVLTRVLAQPRIEAEQLEADGLMMAERLGTLHGINAPEFFDQKLFSTLIHTLRSEGYLDPGCKPDLGRFQALADNIVPLLSTKIRRTIQAGNRL

SEQ ID NO: 112911 - protein, 807 aa, Unknown
  Bacterial polypetide isolated from the Sargasso Sea
MPKQDSLWLKSLRWIQKHLVHTIVVPQDPFADLNLDASRPLAYVMKTESLSDIAALSEITTKLGLPSPYEPLVVNGVVAPRVVCLEGRKPLFGERASNEPFLECFMRLLAVHKEKPELDIQLVPVSLYWGRTPGKEDDTMKAAVLERENPTWLRKCLMILFLGRHNFVQFSNAVSLRYMADEHGTDMGIAHKLARVARVHFRRQRKVMTGPVLPNRQALFHSLLKSESLRKAIQEEAASKKISETQARETAIEYLDEIAANYSDSLVRIAERFLTWLWNKLYSGINIKGAEHIRQLHHDGHEIVYVPCHRSHMDYLLLSYILYYQGMVPPHIAAGINLNFWPAGPLFRRGGAFFIRRSFNGNKLYTAVFREYLDQLFAKGYSVEYFSEGGRSRTGRLLAPKTGMIAMTINSVLRGIERPVTLVPVYLGYDHVMEVATYHKELSGKKKQKESVWQVFGAIRKLGNFGQGYVNFGEPITLQNFLNETAPNWRSEVADDPEQKPTWLTPAVNVLANRVMTRINDAAAASSITLTSLVLLASEQNALERCLLERQLDLYLTLLKRVPYTSFTSVAEGDGKHLVQQGLELNKFSINADPLGEIVSIDEKQATSMTYYRNNIIHLFIIPSLIASCLINNKQISRAQILGIVNDFYPLLKAELFMGIKDLPSYVNQVLELFIEQGLVQESDMLSVVTEHTSQMLLLAGSVSETLQRYAIIFNLLAHRPKMERSDLESESHLLAQRLGALHGITAPEFYDKKLYNTLSVKLKELGYFSGKEDKSDVERIRDQANSLLRASVRQTIVASVTAEHIA

SEQ ID NO: 112912 - protein, 272 aa, Unknown
  Bacterial polypetide isolated from the Sargasso Sea
MQEAVIIDAVRTPMGKSKEGMFRNVRAENLSSALIIELLDRYPELNPDDVEDVIWGCVNQTKEQGFNIARFASLLTPLPHTCSAQTINRLCGSSMTAVHTASMSIMCGVGDVFICGGVEHMGHVPMDHGLDPNPSMSKFSAKASGMMGLTAEMLSIMHKISRQDQDEFALRSHNNASFAAKSKRFKKEIVPIEGHDEEGRLKLCSEDEVIRHDANMEALASLPPVFNPVSGTVTAGNSSAISDGASAVLLMSSQKAEDLGLNPLAKVKSMAT

SEQ ID NO: 112913 - protein, 115 aa, Unknown
  Bacterial polypetide isolated from the Sargasso Sea
MQEAVIIDAVRTPMGRSKGGMFRNVRAENLSAALIIELLDRYPDLNTDEVEDVIWGCVNQTKEQGFNIARFASLLTPLPHTCSAQTVNRLCGSSMTAVHSAAMSIMCGVGEVFIC

SEQ ID NO: 112914 - protein, 436 aa, Unknown
  Bacterial polypetide isolated from the Sargasso Sea
MKEPLKLTTRQGERIAVVAGLRTPFAKQATAFHGVPAVDLGKLVVSEMLARTDLDPKLIDQLVFGQVVQMPEAPNIAREIVLGTGMSVSTDAYSVSRACATSFQAVANVTESIMAGTVDIAIAGGADSSSVLPIGVSKKLARALVDLNKARNLQQRFNILRQLRVKDLLPVPPAVAEYSTGLSMGQTAEQMAKSHQISREAQDALAHRSHTLAAQAWADGKLSGEVFTAHVPPYKAPLERDNNIRESSDLASYAKLKPVFDRVHGSVTAANATPLTDGAAAVLLMREGRARELGLEPLGYIRSFAFSAIDVWQDMLMGPSYATPLALDRAGITLADLTLIDMHEAFAAQTLANLKMFASKEFAQSKLGRDQAIGEVDMDKFNVLGGSLAFGHPFAATGARMITQTLHELRRRGGGLGLNTACAAGGLGVAMVLEVE

SEQ ID NO: 112915 - protein, 248 aa, Unknown
  Bacterial polypetide isolated from the Sargasso Sea
MKQAVIVDCIRTPMGRSKAGIFRNVRAEELSAYVMAALVERNPALDPAEIDDVIWGCVQQTLEQGFNVARNAALLAGIPHSVPAVTVNRLCGSSMQALHDAVRAIQTGMGDVYLIGGVEHMGHVPMTHGVDFHPGLGKNIAKAAGMMGLTAELLGKLHGISRQQQDEFGARSHRLAYEATLQGRFKNEIIPVQGHDADGVLKVFDTDEVIRPETTVEALAGLRPVFDPANGTVTAGTSSALSDGASGM

SEQ ID NO: 112916 - protein, 260 aa, Unknown
  Bacterial polypetide isolated from the Sargasso Sea
MKQAVIVDCIRTPMGRSKAGVFRNVRAETLSAELMKALLVRNPQLDPNDIEDVIWGCVQQTLEQGFNIARNASLLAGIPKTAGAVTVNRLCGSSMDALHQAARAIMTGQGDTFIIGGVEHMGHVPMNHGVDFHPGLANRVAKASGMMGLTAEMLGKMHGITREQQDAFAVRSHQRAHAATIEGRFAKEIWGIEGHDANGALIKVMTDEVIRPETSLESLAGLRPAFDPANGTVTAGTSSALSDGASAMLVMEESKARALG

SEQ ID NO: 112917 - protein, 158 aa, Unknown
  Bacterial polypetide isolated from the Sargasso Sea
MQEAVIIDAVRTPMGRSKGGMFRNIRAENMSAILIIELLDRYPELNPDEVEDVIWGCVNQTKEQGFNIARFASLLTQLPHTCSAQTVNRLCGSSMTAVHTAAMSIMCGVGDVFICGGVEHMGHVPMDHGLDPNPSTSKFSAKASGMMGLTAEMLSIMH

SEQ ID NO: 112918 - protein, 387 aa, Unknown
  Bacterial polypetide isolated from the Sargasso Sea
MEEAVIIDAVRTPMGRSKGGMFRNVRAENLSAVLINEILERHPEVKPDEVEDVIWGCVNQTKEQGFNIARFISLMTPLPHSCAAQTVNRLCASSMTAIHSAAMAIMSGQGEVFFCGGVEHMGHVPMNHGVDPNPASSLFSAKASGMMGLTAEMVAIQHRVSRENQDSFAFRSHQRASKSTTSGRFSREIVGVEGHDQEGNLQFCLEDEVIRHDAKLVEIAALKPVFNPVSGTVTAGNSSAISDGASAVLMMSHKRAKELVLKPMAKVRAMASTGVDPSIMGYGPVPAVWKALKRGGLEINDIELFELNEAFAAQSLPVLRDLKLEDSMEERVNLNGGAIALGHPLGCSGARITTTLLHEMKEKDAQLGVATMCVGLGQGVATVYERI

SEQ ID NO: 112919 - protein, 368 aa, Unknown
  Bacterial polypetide isolated from the Sargasso Sea
MEEAVIIDAVRTPMGRSKGGMFRNVRAENLSAALINEILERHPEVSPDEVEDVIWGCVNQTKEQGFNIARFISLMTPLPHSCAAQTVNRLCASSMTAIHSAAMAIMSGQGEVFFCGGVEHMGHVPMDHGVDPNPSSSLFSAKASGMMGLTAEMVAIQHRVSREDQDSFAFRSHQRASKSTTSGRFSREIVGVEGHDQEGNLQFCLEDEVIRHDAKLDEIAALKPVFNPVSGTVTAGNSSAISDGASAVLMMSHKRAKELGLKPMAKVMAMASTGVDPSIMGYGPVPAVRKALKRGGVEISDIELFELNEAFAAQSLPVLRDLKLEDSMEERVNLNGGAIALGHPLGCSGARITTTLLHEMKEKDAQLE

SEQ ID NO: 112920 - protein, 323 aa, Unknown
  Bacterial polypetide isolated from the Sargasso Sea
RLHVARNAQLLTKIPRTTGAVTVNRLCGSSMQALHDATSGIMSGRGDIYMIGGVEHMGHVPMNYNIDFHPGLAKYTAKASGMMGMTAELLGRQNGITREQQDAFGARSHQLAHKAHLEGRWANEIVPVEGHDANGVLKLIDHDEVVRPESTVESMAALRPVFDPVNGTVTAGTSSALSDGASGMLLMSADRAKELGLTPRAKIRSMAVAGCDAAIMGYGPVPATQKALKRAGLTMDDIELAEFNEAFAAQALSCIKQLGWMDHLDTKINLNGGAIALGHPLGCSGSRISGTLINLMESQDVSLGLATMCIGLGQGIATVFERV

SEQ ID NO: 112921 - protein, 319 aa, Unknown
  Bacterial polypetide isolated from the Sargasso Sea
ECRIAMFLAGFPKEVPVRTTNRQCSSGLQACADVAAGIKAGYYDMGIGAGVETMTANPMKWEGGFNPRIASSSDAQNCLIPMGVTSENVAEKFGISREAQDTMAARSHARAANARATGRFTQEIVPVRTKNAEGVNVVVSEDDGIREGTTVATLAKLPAVFKKGGSTTPGNASQVSDGAAAVVLARRSYAEKHGLPILATWRSFAAVGCDPAIMGVGPAVAIPEALRAVNLNVNDVDLYELNEAFASQATYSIEKLGLDPERVNVNGGAIALGHPLGATGARCLATLIHEMHRRGGKVGICSMCIGSGMGAAATLTRDD

SEQ ID NO: 112922 - protein, 387 aa, Unknown
  Bacterial polypetide isolated from the Sargasso Sea
MQEAVIIDAVRTPMGRSKGGMFRNVRAENLSAALIIELLDRYPELNTNEVEDVIWGCVNQTKEQGFNIARFASLLTPLPHSCSAQTVNRLCGSSMTAVHSAAMSIMCGVGEVFICGGVEHMGHVPMDHGLNPNPSTSKFSAKASGMMGLTAEMLSIMHKISRQDQDEFALRSHKNASLATKSKRFEKEIVPIEGHDELGRLQLCSEDEVIRHDANMEALAALPPVFNPASGTVTAGNSSAISDGASAVLMMSSQKAKDLNLNPLAKIKSMATAGVDPAIMGYGPVPAVRKALKRSKLEIEDIDIVELNEAFAAQSLTVLRDLKIGDLIEEKVNPNGGAISLGHPLGCSGTRILGTLLHEMREKDAELGVATMCIGLGQGVATVVERV

SEQ ID NO: 112923 - protein, 260 aa, Unknown
  Bacterial polypetide isolated from the Sargasso Sea
MSRNVAKAAGMMGLTAEMLSRLHGISREMQDAFAARSHARAWAATQSGAFKNEIIPTGGHDADGVLKQFSYDEVIRPETTVEALSTLRPAFDPVTGTVTAGTSSALSDGAAAMLVMSESRARELGLTPRARVRSMAVVGCDPSIMGYGPVPASKLALKKAGLTASDIDLFEMNEAFAAQILPCIKDLGLMEQIDEKINLNGGAIALGHPLGCSGARISTTLINLMERKDAQFGLATMCIGLGQGIATVLRECKSGKVSQS

SEQ ID NO: 112924 - protein, 247 aa, Unknown
  Bacterial polypetide isolated from the Sargasso Sea
MEQVVIVDAVRTPMGRSKGGAFRHVRAEDLSAHLMRSLLSRNPSLEASTIDDIYWGCVQQTLEQGFNIARNAALLAEIPHSVPATTVNRLCGSSMQALHDAARMIMTGDASVCLIGGVEHMGHVPMSHGVDFHPGLSRNVAKAAGMMGLTAEMLARLHGISREMQDQFAARSHARAWAATQSGAFKAEIVPTGGHDAEGVLKSYSYDEVIRPETTVEALAALRPAFDPVTGTVTAGTSSALSDGAAA

SEQ ID NO: 112925 - protein, 387 aa, Unknown
  Bacterial polypetide isolated from the Sargasso Sea
MKDVVIVDCIRTPMGRSKGGAFRNVRAEDLSSHLMKSILLRNPNLDPNEIEDIYWGCVQQTLEQGFNIARNAALLAGIPKQVGAVTVNRLCGSSMQALHDASRAIQVGDGDIFIIGGVEHMGHVPMSHGVDFHPGMAKSVAKASGMMGLTAEMLGKLHGISRQQQDEFAARSHRRAHAATVEGRFAKEIVGLEGHDASGARFFYDYDEVIRPETTVETLSQLRPVFDPVNGTVTAGTSSALSDGAAAMLVMSADRAKALGLTPRAKIRAMAVAGCDAAIMGYGPVPATQKALKRAGLTIGDIDLFELNEAFAAQSLPCVKDLGLQDVVDEKVNLNGGAIALGHPLGCSGARISTTLLNLMEEKDATLGVATMCIGLGQGIATVFERV

SEQ ID NO: 112926 - protein, 374 aa, Unknown
  Bacterial polypetide isolated from the Sargasso Sea
MGRSKAGVFRNVRAETLSAELMKGLLLRNPQLDPNTIEDVIWGCVQQTLEQGFNIARNASLLAGIPKTAGAVTVNRLCGSSMEAIHQAARAIMTGMGDTFIIGGVEHMGHVPMNHGVDFHPGLANNVAKASGMMGLTAEMLGKLHGITREQQDAFAVRSHQRAYAATVEGRFAKEIYGIEGHDANGALIKVLHDEVIRPETTMESLAALRPVFDPANGTVTAGTSSALSDGASAMLIMEESKARALGLPIRARIRSMAVAGCDAAIMGYGPVPATQKALARAGITVADLDVIELNEAFAAQSLPCVKDLGLADVVDDKINLNGGAIALGHPLGCSGARISTTLINLMEHKDATLGLATMCIGLGQGIATVFERV

SEQ ID NO: 112927 - protein, 388 aa, Unknown
  Bacterial polypetide isolated from the Sargasso Sea
MKQAVIVDCIRTPMGRSKAGIFRNVRAEELSAYVMAALVERNPALDPAEIDDIIWGCVQQTLEQGFNVARNASLLAGIPHSVPAVTVNRLCGSSMQALHDAVRAIQTGMGDVYLIGGVEHMGHVPMTHGVDFHPGLGKNIAKASGMMGLTAELLGKLHGISRQQQDEFGARSHRLAYEATLQGRFKNEIIPVQGHDADGVLKVFDTDEVIRPETTVEALAALRPVFDPANGTVTAGTSSALSDGASGMLVMSEEKAKALGLKIRAKVIGMGIAGCDPSIMGYGPVPASQKALKAAGITIADIDYAELNEAFAAQALPVMKDLGLLEHMNTKVNLNGGAIALGHPLGCSGSRISTTLINVMEDKGGKYGLATMCIGLGQGIATVFERVE

SEQ ID NO: 112928 - protein, 389 aa, Unknown
  Bacterial polypetide isolated from the Sargasso Sea
MNNPVIVDCIRTPMGRSKGGVFKNKRAEDLSAHLMKGLLERNPAVDPASIDDIYWGCVQQTLEQGFNVARNASLLAGIPHSVPATTVNRLCGSSMQALHDAARAIMTGAGDTYLIGGVEHMGHVPMTHGNDFHPGLATSIAQASGSMGLTAEYLATIHGISRQQQDEFAYRSHQRAHAATVEGRFRREILAMEGHAADGSLILVEDDEVIRPETTVEGLSQLRPVFNPASGSVTAGTSSALSDGASAMLVMSEEKAKELGLPIRARIKAMAVAGCDPSIMGYGPVPASKKALAQAGITIDDIDVAELNEAFAAQSLPVLKDLGLADVVDEKVNLNGGAIALGHPLGCSGSRISTSLIHLMEDKNAKYGLATMCIGLGQGIATVFERVQD

SEQ ID NO: 112929 - protein, 387 aa, Unknown
  Bacterial polypetide isolated from the Sargasso Sea
MKQAVIVDCIRTPMGRSKAGVFRNVRAETLSAELMKGLLLRNPQLDPNTIEDVIWGCVQQTLEQGFNIARNASLLAGIPKTAGAVTVNRLCGSSMEAIHQAARAIMTGMGDTFIIGGVEHMGHVPMNHGVDFHPGLANNVAKASGMMGLTAEMLGKLHGISREQQDAFAVRSHQRAHAATVEGRFAKEIYGIEGHDASGALIKVLHDEVIRPETSMESLAALRPVFDPANGTVTAGTSSALSDGASAMLVMEESKARALGLPIRARIRSMAVAGCDAAIMGYGPVPATQKALARAGITVNDLDVIELNEAFAAQSLPCVKDLGLLDVVEDKINLNGGAIALGHPLGCSGARISTTLINLMEHKDATLGLATMCIGLGQGIATVFERV

SEQ ID NO: 112930 - protein, 388 aa, Unknown
  Bacterial polypetide isolated from the Sargasso Sea
MKQALIVDCIRTPMGRSKAGIFRNVRAEELSAYVMAALVERNPALDPAEIDDVIWGCTQQTLEQGFNVARNSALLAGLPHSVPAVTVNRLCGSSMQALHDAVRAIQTGMGEVYLIGGVEHMGHVPMTHGVDFHPGLGKNIAKAAGMMGLTAELLGKLHGISRQQQDEFGARSHRLAHEATIQGRFKNEIIPVEGHDADGVLKVFDTDEVIRPETTVETLGALRPVFDPANGTVTAGTSSALSDGASGMLVMSEEKAKALGLKIRAKVIGMGVAGCDPSIMGYGPVPATKKALKAAGITIADIDYAELNEAFAAQALPVMKDLGLLEVMDSKVNLNGGAIALGHPLGCSGSRISTTLINVMEDKGGKYGLATMCIGLGQGIATVFERVE

SEQ ID NO: 112931 - protein, 335 aa, Unknown
  Bacterial polypetide isolated from the Sargasso Sea
VIWGCVNQTLEQGWNIARMASLMTQIPHTSAGQTVSRLCGSSMSALHTAVQAIQTGNGDVFVVGGVEHMGHVGMMHGVDPNPHLSLYAAKASGMMGLTAEMLGKMHGISREAQDAFGERSHRLAHKATVEGKFKDEIIPMQGYDENGFLKVYDFDETIRPETTLESLAALKPAFNPKGGTVTAGTSSQITDGASCMIVMSAQRAQDLGIQPMAVVRAMAVAGVDPAIMGYGPVPSTQKALKRAGLSMADIDFVELNEAFAAQALPVLKDLKLLDKMEEKVNLHGGAIALGHPFGCSGARISGTLLNVMKQNGGTLGVSTMCVGLGQGITTVFERV

SEQ ID NO: 112932 - protein, 190 aa, Unknown
  Bacterial polypetide isolated from the Sargasso Sea
MTNYFDSPFKGKLLSEQVKNPNIQVGRYSYYSGYYHGHPFEECARYLLSDREDVDKLIIGSFCSIGSGASFIMAGNQGHRYDWASSYPFFYMQEEPAFSSSLDAFQKAGDTVIGNDVWIGSEAMIMPGIKVGHGAVIGSRALVTKDVEPYTIIGGNPAKQIKKRFCDDEIVLLLEMEWWNWSLDQIKAAM

SEQ ID NO: 112933 - protein, 170 aa, Unknown
  Bacterial polypetide isolated from the Sargasso Sea
MNFNKIDLDNWKRKEIFNHYLNQQTTFSITTEIDISVLYRNIKQEGYKFYPAFIFLVTRVINSNTAFRTGYNSDGELGYWDKLEPLYTIFDGVSKTFSGIWTPVKNDFKEFYDLYLSDVEKYNGSGKLFPKTPIPENAFSLSIIPWTSFTGFNLNINNNSNYLLPIITAG

SEQ ID NO: 112934 - protein, 93 aa, Unknown
  Bacterial polypetide isolated from the Sargasso Sea
YGENLAYFPKGFIENMFFVSANPWVSFTSFDLNVANMDNFFAPVFTMGKYYMQGDKVMMPLAIQVHHAVCDGFHVGRMLNELQQYCDEWQGGA

SEQ ID NO: 112935 - protein, 219 aa, Unknown
  Bacterial polypetide isolated from the Sargasso Sea
MAGAFLSTIARWLTGVEIHPGAKIGRRFFIDHGMGVVIGETAEIGDDVTLYHGVTLGGTSWNPGKRHPTLGNGVVIGAGAKVLGPLYVGESARIGSNAVVVKDVPPGATVVGIPGRIVAKQDMTLTEQRQQMAKKFGFDAYAVSSDNPDPVANAMGRMLDHMHFLDNKVTELCQSINKLGGNVCEMVPEIAIEDETFIQAEREAAEQRKKAVEAFDPTI

SEQ ID NO: 112936 - protein, 191 aa, Unknown
  Bacterial polypetide isolated from the Sargasso Sea
MSEFLESIKKRDPAAKSILSIILTYPGVKAVLFHRISNFFHVASFYLIARIISQTSRFLTGIEIHPGAKIGKNLFIDHGMGVVIGETSEIGDNVTIYHAVTLGGSSPSIDSERQRHEKRHPTIGDDVVIGSGAQIIGPVVVGKNARIAANAVVVKDVPESATMVGIPAKAVKLENKGKFIPYGVDDKVKDE

SEQ ID NO: 112937 - protein, 119 aa, Unknown
  Bacterial polypetide isolated from the Sargasso Sea
MNDFINSIKKRDPAATSSLGIILTYPGVKAVFFYKISNFFHIAGFKLLARVMSQAVRFFTGVEIHPGAKIGKNLFIDHGMGVVIGETSEIGDDVTIYQAVTLGGISPSIDSERQRHAKR

SEQ ID NO: 112938 - protein, 240 aa, Unknown
  Bacterial polypetide isolated from the Sargasso Sea
MFARIKDDIKGVFHRDPAARNTFEVLTNYPGLHAVWLHRVSHKLWKAEWKWLARTLSTFSRWLTGIEIHPGATLGRRVFIDHGMGVVIGETAEIGDDVTLYHGVTLGGTSWKAGKRHPTLKKGAVVGAGAKVLGPIIIGENAKVGSNSVVVKDIPDGATAVGIPGRIIISKQDDGKATVNPQRDKIAQKYGFDAYAVAPDNPDPVANAMGVMLEHMHQMDTKVEEMCKVIQSLGGDVCTE

SEQ ID NO: 112939 - protein, 192 aa, Unknown
  Bacterial polypetide isolated from the Sargasso Sea
MNEYLQSIIDRDPAARSKLSVILTYPGVKAVFFYKIANFFSLAKFHLVAKIISQFARFLTGIEIHPGAKIGKNLFIDHGMGVVIGETSDIGDNVTIYHNVTLGGISPSINSDEQRNNKRHPTIKDNAVIGSGAQILGPIIVGKNSKIGSNAVVTNDVPENAVMVGIPARNIGVSSEEFKPYAVTEETKKEKR

SEQ ID NO: 112940 - protein, 191 aa, Unknown
  Bacterial polypetide isolated from the Sargasso Sea
MKDYLDSIKKRDPAAKSLLSIVLTYPGVKAVFFHQISNFFYKAGFDLIARIVSQTIRFFTGVEIHPGAKIGKNLFIDHGMGVVIGETSEIGDNVTIYHAVTLGGSSPSIDSERQRHEKRHPTIGNDVVIGSGAQIIGPIKVGNNARIAANAVVVKDVPENATMVGIPAKAVKLENKGSFRPYGVDDKVKDE

SEQ ID NO: 112941 - protein, 192 aa, Unknown
  Bacterial polypetide isolated from the Sargasso Sea
MKNYLESIKSRDPAAKSLLSIILTYPGVKAVFFHKISNFFYIAGFDLIARIISQTVRFFTGIEIHPGAKIGKNLFIDHGMGVVIGETSEIGDNVTIYHAVTLGGISPSINSDNQRNEKRHPSIGDDVVIGSGAQIIGPIKIGNGSRIAANAVVVKDVPDNSTMVGIPAKAVKVGNQGNFRPYGVDDKVKDEQ

SEQ ID NO: 112942 - protein, 137 aa, Unknown
  Bacterial polypetide isolated from the Sargasso Sea
MLDHIRADLAIIRERDPAARGWLEIFFCYPGFHAISLHRLSHRLWSCHLPLKLLARCLSQVGRALTGIEIHPGARIGTGVFIDHGMGVVIGETAEVGHRCLLYQGVTLGGTGKEHGKRHPTLAENVVVGAGAKVLGA

SEQ ID NO: 112943 - protein, 98 aa, Unknown
  Bacterial polypetide isolated from the Sargasso Sea
MFRTFKSDIEIIKERDPAARGILEIFLCYPGFQSIVIHRLTHKLWQLKFPLIPRLLSHLNRLATGIEIHPGAKIGKRVFIDHGMGVVIGETAEIGNNC

SEQ ID NO: 112944 - protein, 217 aa, Unknown
  Bacterial polypetide isolated from the Sargasso Sea
MANLEEKYVQLDPVWDRLRNEAEDAVIAEPAIGGFIQTSILQHPSFENALAHRVASKLASAEISEQTLRDICSKAISKDPQIANAARADVMAVVDRDPACNRYMQPLLYFKGFLAVQAYRVSNWLWMNSQRDMAYFFQMRTSEVFGIDIHPAAKIGKGLMIDHAHSIVIGETSVVGDNVSMLHSVTLGGTGKEDEDRHPKIGDGVMIGAGAKVLGNI

SEQ ID NO: 112945 - protein, 191 aa, Unknown
  Bacterial polypetide isolated from the Sargasso Sea
ADPQIANAARADVMAVVDRDPACNRYMQPLLYFKGFLAVQAYRVANWLWINSQKDMAYFFQMRTSEFFGIDIHPAAKIGKGLMIDHAHSIVIGETSVVGDNVSLLHSVTLGGTGKDNGDRHPKIGDGVMIGAGAKVLGNIKVGSCCRIAAGSVVLQEIPPKKTVAGVPAKIVGEAGCSRPSIKMDQILLSD

SEQ ID NO: 112946 - protein, 109 aa, Unknown
  Bacterial polypetide isolated from the Sargasso Sea
MIDYLKSIKSRDPAAKSLVSIILTYPGVKAVFFHKIASFFFIAGFELLARIISQTTRFFTGIEIHPGAKIGKNLFIDHGMGVVIGETSKIGDNVTIYHAVTLGGISPSI

SEQ ID NO: 112947 - protein, 167 aa, Unknown
  Bacterial polypetide isolated from the Sargasso Sea
IDHGMGVVIGETAEVGHRCLLYQGVTLGGTGKDHGKRHPTLAENVVVGAGAKVLGAINIGANTRIGAGSVVVRDVDADCTVVGIPGRVIHQSGVRINPLAHSALPDAEANVIRNLMERIDELESTVSNLQRCLKEVAEGRQLRDVCRGESQSLKDREILEFLGENTG

SEQ ID NO: 112948 - protein, 174 aa, Unknown
  Bacterial polypetide isolated from the Sargasso Sea
WGKIGKRVFIDHGMGVVIGETAEIGNNCLLYQGVTLGGTGKSHGKRHPTLMENVVVGAGAKVLGSITVGSNTRIGAGSVVVRNVEGNSTVVGVPGRVVHQSGVKVNPLAHSALPDAEANVIKNLMDRIDSLENEILKLQKTLQCIASSESIDISKLGDSQNLKDKEIFEFLGDD

SEQ ID NO: 112949 - protein, 166 aa, Unknown
  Bacterial polypetide isolated from the Sargasso Sea
FIDHGMGVVIGETAEIGNNCLLYQGVTLGGTGKSHGKRHPTLMENVVVGAGAKVLGSITVGSNTRIGAGSVVVRNVEGNSTVVGVPGRVVHQSGVKVNPLAHSALPDAEANVIKNLMDRIDSLENEILKLQNTLQCIASSESIDIPKLGDSQNLKDKEILEFLGDN

SEQ ID NO: 112950 - protein, 193 aa, Unknown
  Bacterial polypetide isolated from the Sargasso Sea
MSDFLQSIIDRDPAAKSKLSLILTYPGVKAVFFHRLAHFFSVAKFDLIARIISQFSRFLTGIEIHPGAKIGKNLFIDHGMGVVIGETSEIGDNVTIYHMVTLGGISPSINSNNQRNIKRHPTLMDNVVVGSGAQILGPVIVGKNSKIGANAVVTKNVEENAVMIGIPAKNVGTATEEFKPYAVENDNSEKNND

SEQ ID NO: 112951 - protein, 134 aa, Unknown
  Bacterial polypetide isolated from the Sargasso Sea
IEIHPAAKIGKNLFIDHGMGVVIGETSEIGNNVTLYHAVTLGGVSPSIDSESQRSVKRHPTLENDVVVGSGAQILGPINIGQNAKIGANAVVTKDVPKDAVMIGIPAKNINKDDSIKDKKFRPYGITTDIDKES

SEQ ID NO: 112952 - protein, 191 aa, Unknown
  Bacterial polypetide isolated from the Sargasso Sea
MNDYLESIKKRDPAAKSIMSIILTYPGVKAVFFHQISNFFYKAGFDLIARIVSQTIRFFTGIEIHPGAKIGKNLFIDHGMGVVIGETSEIGDNVTIYHNVTLGGSSPSIDSERQRDEKRHPTIGNDVVIGSGAQIIGPIKIGNNARVAANAVVVKDVPENATMVGIPAKAVKLENKGSFRPYGVDDKVKDE

SEQ ID NO: 112953 - protein, 151 aa, Unknown
  Bacterial polypetide isolated from the Sargasso Sea
MIDYLESIKKRDPAAKSILSIILTYPGVKAVFFHQISNFFYKASFDLVARIISQTVRFFTGIEIHPGAKIGKNLFIDHGMGVVIGETSEIGNNVTIYHAVTLGGSSPSIDSERQRHEKRHPTIGDNVVIGSGAQIIGPIKVGNNSKDSRKR

SEQ ID NO: 112954 - protein, 185 aa, Unknown
  Bacterial polypetide isolated from the Sargasso Sea
MNEYLQSIIDRDPAARSKLSVILTYPGVKAVFFYKIANFFSLAKFHLVAKIISQFARFLTGIEIHPGAKIGKNLFIDHGMGVVIGETSDIGDNVTIYHNVTLGGISPSINSDQQRNIKRHPTIMNNAVIGAGAQILGPIIVGKNSKIGSNAVVTNDVPENAVMVGIPARNIGVSNEEFKPYAVTE

SEQ ID NO: 112955 - protein, 97 aa, Unknown
  Bacterial polypetide isolated from the Sargasso Sea
MNDFLESIKSRDPAAKSVLSIVLTYPGVKAVFFHKFAHLFYVAGFDLIARIISQTIRFFTGIEIHPGAKIGKNLFIDHGMGVVIGETSEIGDNVTIY

SEQ ID NO: 112956 - protein, 177 aa, Unknown
  Bacterial polypetide isolated from the Sargasso Sea
IHPGAKIGRRVFIDHGMGVVIGETAEIGNNCLLYQGVTLGGTGKSHGKRHPTLMENVVVGAGAKVLGSITVGSNTRIGAGSVVVRNVEGNSTVVGVPGRVVHQSGVKVNPLAHSALPDAEANVIKNLMDRIDSLENEILKLQKTLQCIANSESIDISKLGDSQNLKDKEIFEFLGDD

SEQ ID NO: 112957 - protein, 191 aa, Unknown
  Bacterial polypetide isolated from the Sargasso Sea
MIDYLESIKKRDPAAKSLLSVILTYPGVKAVFFHQISNFFYKAGFDLVARIISQTVRFFTGIEIHPGAKIGKNLFIDHGMGVVIGETSEIGNNVTIYHAVTLGGSSPSIDSERQRHEKRHPTIGDDVVIGSGAQIIGPIKVGNNSRIAANAVVVKDVPDNATMVGIPAKAVKLENKGSFRPYGVDDKVKDE

SEQ ID NO: 112958 - protein, 89 aa, Unknown
  Bacterial polypetide isolated from the Sargasso Sea
LHSVTLGGTGKEEGDRHPKIGNGVLLGAGAKVLGNINVGDCAKIASGSVVLTDVPDRKTVAGIPAKVVGEVPEEILPSKSMDHKLNDNN

SEQ ID NO: 112959 - protein, 268 aa, Unknown
  Bacterial polypetide isolated from the Sargasso Sea
MIFKGVFHRDPAARNTFEVLTNYPGLHAVWLHRISHKLWKAEWKWLARSLSTFSRWLTGIEIHPGATLGRRVFIDHGMGVVIGETAEIGDDVTLYHGVTLGGTSWRAGKRHPTLKKGAVVGAGAKVLGPIIIGENAKVGSNSVVVKDIPDGATAVGIPGRIIISKQKEMNASVNPERDKIAQKYGFDAYAVAPDNPDPVANAMGIMLEHMHQMDTKVEEMCKVIQSLGGDVCTDNLHNISAEDFAETGFDLTETQEREKAHSSFDPAI

SEQ ID NO: 112960 - protein, 203 aa, Unknown
  Bacterial polypetide isolated from the Sargasso Sea
MFARIKDDIQGVFHRDPAARNTFEVLTNYPGLHAVWLHRISHKLWKAECKWLARSLSTFSRWLTGIEIHPGATLGRRVFIDHGMGVVIGETAEIGDDVTLYHCVTLGGTSWRAGKRHPTLKKGAVVGAGAKVLGPIIIGENAKVGSNSVVVKDIPDGATAVGIPGRIIISKQKEMNASVNPERDKIAQKYGFDAYAVAPDNPD

SEQ ID NO: 112961 - protein, 210 aa, Unknown
  Bacterial polypetide isolated from the Sargasso Sea
ASQEMSEQILRELCDDAYKSEGELSMAGRADIVAVYQRDPACNTYLQPLLFFKGFQALQAYRVAHWLWMKGRKDMAYFLQMRCSEVFGIDIHPGARIGKGIMIDHAHSIVIGETAVVGDNVSMLHSVTLGGTGKDDEIRHPNIGDGVLLGAGAKVLGNISVGSCSRVAAGSVVLQNVPEKTTVAGVPAKVVGAAGCTNPSISMDQIIKRK

SEQ ID NO: 112962 - protein, 176 aa, Unknown
  Bacterial polypetide isolated from the Sargasso Sea
KSLASIVLTYPGVKAVFFHIISNFFYKAGFDLLARIISQSVRFFTGIEIHPGAKIGKNLFIDHGMGVVIGETSEIGDNVTIYHAVTLGGSSPSIDSESQRYEKRHPTIGDDVVIGSGAQIIGPIKIGNNSRIAANAVVVKDVPENATMVGIPAKAVRLENKGNFRPYGVDDKVKDE

SEQ ID NO: 112963 - protein, 192 aa, Unknown
  Bacterial polypetide isolated from the Sargasso Sea
MIDYLESIKSRDPAAKSLVSIILTYPGVKAIFFHKIANFFSVAGFDLIARIISQTARFFTGIEIHPGAKIGKNLFIDHGMGVVIGETSEVGDNVTIYHAVTLGGISPSIDSERQRHEKRHPSIGNNVVIGSGAQILGPVKIGDNARVAANAVVVNDVKENATVIGIPAKEIKIGNKGTFKPYGVDDKVKDEK

SEQ ID NO: 112964 - protein, 268 aa, Unknown
  Bacterial polypetide isolated from the Sargasso Sea
MGKKKEVLDALDPVWERIQIEAKAAVEKEPLLGGSLHSCILHHSSIEQALAYRIASKLASQEMSEQILRELCDDAYKSEGELSMAGRADIVAVYQRDPACNTYLQPLLFFKGFQALQAYRVAHWLWKKGRKDMAYFLQMRCSEVFGIDIHPGARIGKGIMIDHAHSIVIGETAVVGDNVSMLHSVTLGGTGKDDEIRHPNIGDGVLLGAGAKVLGNISVGSCSRVAAGSVVLQNVPEKTTVAGVPAKVVGAAGCTNPSISMDQIIKRK

SEQ ID NO: 112965 - protein, 191 aa, Unknown
  Bacterial polypetide isolated from the Sargasso Sea
MNDFIKSIKERDPAAKSTLSIVLTYPGVKAIFLHQIANFFHVAGFDLIARIISQTSRFFTGIEIHPGAKIGKNLFIDHGMGVVIGETSEIGNDVTIYHAVTLGGISPSVDSERQRNEKRHPTIGNKVVIGSGAQIIGPVKVGDGSRIAANAVVVKDVEENTTMVGVPAKAVKSANQGNFRPYGVDQEVKDE

SEQ ID NO: 112966 - protein, 268 aa, Unknown
  Bacterial polypetide isolated from the Sargasso Sea
MVNFEKKYAQLDPVWDRLRNEAEDAVIAEPAIGGFIQTSILQHPSFENALAHRVASKLASAEISEQTLRDICSKAISKDPQITNAARADVMAVVDRDPACNRYMQPLLYFKGFLAVQAYRVSNWLWINSEGDMAYFFQMRTSEVFGIDIHPAAKIGQGLMIDHAHSIVIGETSVVGDNVSMLHSVTLGGTGKEDEDRHPKIGDGVMIGAGAKVLGNIKVGSCCRIAAGSVVLQDIPPKKTVAGVPAKIVGEAGCSTPSIKMDQILSSD

SEQ ID NO: 112967 - protein, 134 aa, Unknown
  Bacterial polypetide isolated from the Sargasso Sea
MNDFLESIMHRDPAAKSKISIILTYPGVKAVFFHRIANFFSVAKLDLIARIISQFSRFMTGIEIHPGAKIGKNLFIDHGMGVVIGETSDIGDNVTIYHMATLGGIAPSINSDNQRDVKRHPTLKDNVCVWIGCS

SEQ ID NO: 112968 - protein, 75 aa, Unknown
  Bacterial polypetide isolated from the Sargasso Sea
DRHPKIRSGVLISAGAKVLGNIEIGEGAKIGAGSVVLNSVPPHTTVVGVPARVVGTPASNSPAETMQQNVLEDEQ

SEQ ID NO: 112969 - protein, 192 aa, Unknown
  Bacterial polypetide isolated from the Sargasso Sea
MIDYLESIKSRDPAAKSLVSIILTYPGVKAVFFHKIGNFFFVAGFDLIARIISQTARFFTGIEIHPGAKIGKNLFIDHGMGVVIGETSEIGDNVTIYHAVTLGGISPSIDSDRQRHEKRHPSIGNNVVIGSGAQILGPVKIGDNARVAANAVVVNDVKENATVIGIPAKEIKIGNKGTFKPYGVDDKVKDEK

SEQ ID NO: 112970 - protein, 193 aa, Unknown
  Bacterial polypetide isolated from the Sargasso Sea
MSEFLQSIIDRDPAAKSKLSLILTYPGVKAVFFHRLAHFFSVAKFDLIARIISQFSRFLTGIEIHPGAKIGKNLFIDHGMGVVIGETSEIGDNVTIYHMVTLGGISPSINSNNQRNIKRHPTLMDNVVVGSGAQILGPVVVGKNSKIGANAVVTKNVEENAVMIGIPAKNVGTATEEFKPYAVENDNSEKNNG

SEQ ID NO: 112971 - protein, 139 aa, Unknown
  Bacterial polypetide isolated from the Sargasso Sea
MINFLESIKSRDPAAKSIVSIILTYPGVKAVFLHKIANFFFIAGFDLIARIISQTSRFFTGIEIHPGAKIGKNLFIDHGMGVVIGETSEIGDNVTIYHAVTLGGISPSIDSERQRHEKRHPSIGNNVVNWFRSSNLKSS

SEQ ID NO: 112972 - protein, 245 aa, Unknown
  Bacterial polypetide isolated from the Sargasso Sea
MVLKTFKSDIEIIRERDPAARGILEIFLCYPGFQSIVIHRFTHKLWQLKIPLIPRLLSHLNRLATGIEIHPGAKIGKRVFIDHGMGVVIGETAEIGNNCLLYQGVTLGGTGKSHGKRHPTLMENVVVGAGAKVLGSITVGSNTRIGAGSVVVRNVEGNSTVVGVPGRVVHQSGVKVNPLAHSALPDAEANVIKNLMDRIDSLENEILKLQKTLQCIVSSESIDISKLGDSQNLKDKEIFEFLGDD

SEQ ID NO: 112973 - protein, 136 aa, Unknown
  Bacterial polypetide isolated from the Sargasso Sea
RRSLALYLQNQISVVFGVDVHPAARIGKGIMFDHATGIVVGETAVIEDDVSILQSVTLGGTGKESGDRHPKIREGVMIGAGAKVLGNIEVGMGAKIGAGSVVINPVPPHTTVAGVPAKIVGRPECDKPSLDMDQCL

SEQ ID NO: 112974 - protein, 258 aa, Unknown
  Bacterial polypetide isolated from the Sargasso Sea
EVWEELNSEAENVGREERLLHDYLSECILTHDSFESALSFILANKVSDDVMSADTLRALFLDILKTSPSIVDCAIEDIKAVYDRDPAVCSFLSVILYLKGYQAIQVHRLANFLWNDHRKELALFIQSRNTEVFSVDIHPACEIGRGIMFDHATGIVIGETTIIEDNVSILQQVTLGGTGNEQGDRHPKIRSGVLISAGAKVLGNIEIGEGAKIGAGSVVLNSVPPHTTVVGVPARVVGTPASDSPAETMQQNVLEDEE

SEQ ID NO: 112975 - protein, 249 aa, Unknown
  Bacterial polypetide isolated from the Sargasso Sea
MFRSIRSDFAIIKERDPAARGVWEIIFCYPGFQALSLHRISHKLWKYKLPLLPRLLSQITRFLTGVEIHPGARIGKGVFIDHGMGVVIGETSEIGDRCLLYQGVTLGGTGKESGKRHPTLEANVVVGAGAKVLGGICVGTNTRIGAGSVVVKNVEANSTVVGIPGRIVHQSGVKINPLAHSALPDTEANVLRNLMDRIDQLESQIIELQHLAKNNQTNMKAKTLLIGESQNLKDKEIIEFIGDDSIEID

SEQ ID NO: 112976 - protein, 192 aa, Unknown
  Bacterial polypetide isolated from the Sargasso Sea
PRLLSHLNRSITGIEIHPGAKIGKRVFIDHGMGVVIGETAEIGNNCLLYQGVTLGGTGKSHGKRHPTLKENVVVGAGAKVLGSITVGSNTRIGAGSVVVRNVEGDSTVVGVPGRVVHQSGVKVNPLAHSALPDAEANVIKNLMDRIDFLENEILKLQKILHCLANSESIDISKLGDAQNIKDKEILEFLGDD

SEQ ID NO: 112977 - protein, 232 aa, Unknown
  Bacterial polypetide isolated from the Sargasso Sea
MLRTFKSDIEIIRERDPAARGILEIFLCYPGFQSIVVHRFTHKLWQLKIPLIPRLLSHLNRLVTGIEIHPGAKIGKRVFIDHGMGVVIGETAEIGNNCLLYQGVTLGGTGKSHGKRHPTLMENVVVGAGAKVLGSITVGSNTRIGAGSVVVRNVEGNSTVVGVPGRVVHQSGVKVNPLAHSALPDAEANVIKNLMDRIDSLENEIRKLQKALQCINNSESVDTSKLGDAQNS

SEQ ID NO: 112978 - protein, 200 aa, Unknown
  Bacterial polypetide isolated from the Sargasso Sea
MLRTFKSDIEIIRERDPAARGIIEIFLCYPGFQSIVIHRFTHKLWKLKIPLIPRMLSHSNRLLTGIEIHPGAKIGKRVFIDHGMGVVIGETAEIGNNCLLYQGVTLGGTGKSHGKRHPTLKENVVVGAGAKILGSITVGSNTRIGAGSVVVRNVEGNSTVVGVPGRVVHQSGVKVNPLAHSALPDAEANVIKNLMDRIDS

SEQ ID NO: 112979 - protein, 125 aa, Unknown
  Bacterial polypetide isolated from the Sargasso Sea
MLRTFKSDIEIIKERDPAARGIIEIFLCYPGFQSIVIHRFTHKLWQLKIPLIPRLLSHLNRLATGIEIHPGAKIGKRVFIDHGMGVVIGETAEIGNNCLLYQGVTLGGTGKSHGKRHPTLMENVV

SEQ ID NO: 112980 - protein, 210 aa, Unknown
  Bacterial polypetide isolated from the Sargasso Sea
MFDHIHADLAIIRERDPAARGWLEIVCCYPGFQAISLHRFSNRLWTCRLPLKLAARFLSQIGRALTGIEIHPGARIGHGVFIDHGMGVVIGETAEIGNRCLLYQGVTLGGTGKEHGKRHPTLAENVVVGAGAKVLGAITIGANTRIGAGSVVVRNVESDCTVVGIPGRVIHQSGVRINPLAHSALPDAEASVIRNLMERIDELESTVGNL

SEQ ID NO: 112981 - protein, 179 aa, Unknown
  Bacterial polypetide isolated from the Sargasso Sea
IEIHPGAKIGKRVFIDHGMGVVIGETAEIGNNCLLYQGVTLGGTGKSHGKRHPTLMENVVIGAGAKVLGSITVGSNTRIGAGSVVVRNVEGNSTVVGVPGRVVHQSGVKVNPLAHSALPDAEANVIKNLMDRIDSLENEILKLQKTLQCIASSESIDISKLGDSQNLKDKEILEFLGDD

SEQ ID NO: 112982 - protein, 234 aa, Unknown
  Bacterial polypetide isolated from the Sargasso Sea
MLKTLKSDIEIIKERDPAARGILEIFLCYPGFQSIVIHRFTHKLWQLKLPLIPRMLSHLNRLFTGIEIHPGAKIGKKVFIDHGMGVVIGETAKIGDNCLLYQGVTLGGTGKSHGKRHPTLMENVVVGAGAKVLGSIIVGSNTRIGAGSVVVRDVEENSTVVGIPGRVVHQSGVKVNPLAHSALPDAEANVIKNLMDRIDQLENEILKLQKTLECLVNSESIEISNVGDAQKSKG

SEQ ID NO: 112983 - protein, 125 aa, Unknown
  Bacterial polypetide isolated from the Sargasso Sea
KIGRGIMLDHATGIVVGETAVIEDDVSILQSVTLGGTGKTSGDRHPKIREGVMIGAGAKILGNIEVGRGAKIGAGSVVLQPVPPHTTAAGVPARIVGKPESDKPAMDMDQHFNGIHHTFEYGDGI

SEQ ID NO: 112984 - protein, 75 aa, Unknown
  Bacterial polypetide isolated from the Sargasso Sea
GVMIGAGAKILGNIEVGRGAKIGAGSVVLQPVPPHTTAAGVPARIVGKPESDKPAMDMDQHFNGIHHTFEYGDGI

SEQ ID NO: 112985 - protein, 245 aa, Unknown
  Bacterial polypetide isolated from the Sargasso Sea
MILRTFKSDIDIIKERDPAARGILEIFLCYPGFQSIVIHRLTHKLWQLKIPLIPRLFSHLNRLFTGIEIHPGAKIGKRVFIDHGMGVVIGETAEIGNNCLLYQGVTLGGTGKSHGKRHPTLMENVVVGAGAKVLGSIIVGSNTRIGAGSVVVRNVEGNSTVVGVPGRVVHQSGVKINPLAHSALPDAEANVIKNLMDRIDLLENELLKLQKTLQCLVNSESIDISKLGDSQNLKDKEIIEFLGDD

SEQ ID NO: 112986 - protein, 239 aa, Unknown
  Bacterial polypetide isolated from the Sargasso Sea
MFDHIRADLAIIHERDPAARGPLEILLCYPGFQALTLHRLSHRLWRCRLPLKLPARLLSQLGRSLTGVEIHPGATIGRGVFIDHGMGVVIGETAEVGDRCLLYQGVTLGGTGKDHGKRHPTLANNVVIGAGAKVLGAIEVGANTRVGAGSVVVRDVEADCTVVGIPGRVIHQSGVRINPLAHSALPDAEANVIRNLMERIDQLESQVRNLQDNLRTMAEDNGSSLGAVRSGQAQNLKDR

SEQ ID NO: 112987 - protein, 167 aa, Unknown
  Bacterial polypetide isolated from the Sargasso Sea
VFIDHGMGVVIGETAEVGPRCLLYQGVTLGGTGKDHGKRHPTLAENVVVGAGAKVLGAINVGANTRIGAGSVVVRDVEADSTVVGIPGRVIHQSGVRINPLAHSALPDAEANVIRNLMERIDELESTVSNLQRCLQELAAGRNIREECSGESQSLKDREIMEFLGDQ

SEQ ID NO: 112988 - protein, 273 aa, Unknown
  Bacterial polypetide isolated from the Sargasso Sea
MGVIARLKEDIESIYHRDPAARSAFEILVNYPGMHAIWLHRISHKLWKRDWRLMARCLSTFSRWLTGVEIHPGATIGDRFFIDHGMGVVIGETAEIGDDCTLYHGVTLGGTTWQAGKRHPTLGNNVVVGAGAKILGPITMHDGARVGSNSVVVKDVPKDTTVVGIPGRVVATPSPQSKEKSERRSAMAKKYGFDAYAVSPDNPDPVANAIGQMLDHMHLMDSKVQELCQAIQRLGGDVCTERLPELNVGEFNDAEKAAADKRQSALDEFDPSI

SEQ ID NO: 112989 - protein, 248 aa, Unknown
  Bacterial polypetide isolated from the Sargasso Sea
MFDHIRADFAIIRERDPAARGWLEIICCYPGFQALSLHRLSHSLWRSPLPLKLAARCLSQISRTLTGIEIHPGARIGRSVFIDHGMGVVIGETAEVGHRCLLYQGVTLGGTGKDHGKRHPTLAENVVVGAGAKVLGAINIGANTRIGAGSVVVRDVDADCTVVGIPGRVIHQSGVRINPLAHSALPDAEANVIRNLMERIDELESTVSNLQRCLKEVAEGRQLRDVCRGESQSLKDREILEFLGENTG

SEQ ID NO: 112990 - protein, 244 aa, Unknown
  Bacterial polypetide isolated from the Sargasso Sea
MLKTFKSDIEIIKERDPAARGIIEIFLCYPGFQSIVIHRFTHKLWQLKMPLVPRLMSHLNRLVTGIEIHPGAKIGKRVFIDHGMGVVIGETAEIGNNCLLYQGVTLGGTGKSHGKRHPTLKENVVVGAGAKVLGSITVGSNTRIGAGSVVVRNVEGNSTVVGVPGRVVHQSGVKVNPLAHSALPDAEANVIKNLMDRIDSLENEILKLQKTLQCIANSESIDISKLGDSQNLKDKEIFEFLGDD

SEQ ID NO: 112991 - protein, 243 aa, Unknown
  Bacterial polypetide isolated from the Sargasso Sea
MKTFKSDIEIIRERDPAARGIVEIFLCYPGFQSIVIHRFTHKLWQLKIPLIPRLLSHLNRLATGIEIHPGAKIGKRVFIDHGMGVVIGETAEIGNNCLLYQGVTLGGTGKSHGKRHPTLMENVVVGAGAKVLGSITVGSNTRIGAGSVVVRNVEGNSTVVGIPGRVVHQSGVKVNPLAHSALPDAEANVIKNLMDRIDSLENEILKLQKTLQCIASSESIDISKLGDSQNLKDKEILEFLGDD

SEQ ID NO: 112992 - protein, 273 aa, Unknown; identical to SEQ ID NO: 112988
  Bacterial polypetide isolated from the Sargasso Sea

SEQ ID NO: 112993 - protein, 119 aa, Unknown
  Bacterial polypetide isolated from the Sargasso Sea
MLRTFKSDIEIIKERDPAARGIIEIFLCYPGFQSIVFHRFTHKLWKLKIPLIPRLLSHINRLVTGIEIHPGAKIGKKVFIDHGMGVVIGETAEIGNNCLLYQGVTLGGTGKATEKDIRP

SEQ ID NO: 112994 - protein, 119 aa, Unknown
  Bacterial polypetide isolated from the Sargasso Sea
MLRTFKSDIEIIRERDPAARGIVEIFLCYPGFQSIVIHRFTHKLWQLKIPLIPRLLSHLNRLATGIEIHPGAKIGKRVFIDHGMGVVIGETAEIGNNCLLYQGVTLGGTGKSHGKKDTP

SEQ ID NO: 112995 - protein, 273 aa, Unknown; identical to SEQ ID NO: 112988
  Bacterial polypetide isolated from the Sargasso Sea

SEQ ID NO: 112996 - protein, 179 aa, Unknown
  Bacterial polypetide isolated from the Sargasso Sea
MKYIPGAKIGKRVFIDHGMGVVIGETAEIGNNCLLYQGVTLGGTGKSHGKRHPTLMENVVVGAGAKVLGSITVGSNTRIGAGSVVVRNVEGNSTVVGVPGRVVHQSGVKVNPLAHSALPDAEANVIKNLMDRIDSLENEILKLQKTLECIASSESIDISKLGDSQNIKDKEIFEFLGDD

SEQ ID NO: 112997 - protein, 127 aa, Unknown
  Bacterial polypetide isolated from the Sargasso Sea
KAGIFAAAAKSSTQNIAMNEVARESIRKDKNFHNGNYLEHNVIPKNGIKTARMLGHITYLSEKHMDLRFGRKFQDDASKVDKKVDFEVENYLQYKGEKFSESFDANSYIIMTKAMDGYDAAGETESL

SEQ ID NO: 112998 - protein, 333 aa, Unknown
  Bacterial polypetide isolated from the Sargasso Sea
ATGTTVADADRVVFNDNGTMVQVAVTDLSAYFDDEITSMPNLATTAATTVGALNSGSITSGFGTIDNGSSAITTTGTVTYGTLNDGSTNLTTTVAELNKIDGGTSATGTTVADADRVVFNDNGTMVQVAVTDLSAYFDDEITAMPNLVTTGALNSGSITSGFGTINNGSSAITTTGTVTYGTLNDGSTNLTTTVAELNKIDGNTSATSTTVADADRVVLNDAGTVVQVAMTDIDTYISATSKTLTNKTLTSPTINTPTITGNTTFSDGSYNFNIASHDGTNGLSLAGTVVTATAAELNKIDGGTSATGTTVADADRVVLNDNGTMVQVAVTDL

SEQ ID NO: 112999 - protein, 195 aa, Unknown
  Bacterial polypetide isolated from the Sargasso Sea
MNTEKNIKTLIVNKPLKLDCGKTIKDFPIAYETYGSLNSKKDNAILVFHALTGDQFVTGINPVTNKEGWWSYAVGPDKAIDTNKYFVICSNVIGGCMGSYGPSHKDPDQKIFGTNFPVITINDMVNAQYNLLDHFGIDKLFSITGGSMGGMQVLQFISNFPDKSKTVIPIATTSSHSAQNIAFNELGRQAITADS

SEQ ID NO: 113000 - protein, 270 aa, Unknown
  Bacterial polypetide isolated from the Sargasso Sea
MSLPEVSVRRFVFAIMINLVIVLFGLISANRISIDRSPDIDFSLISVTTILPGANPDVVDSSVTNIIESAVNSIPGIDDVRSRSAPGVSNVFIQFLLEKDLDIAFNEVQSKVGQINSQLPDDAETPIISKIETGEIPIIWLALRGNRTLQDLSVYAKNTVKRKLETINGVGSVVIGGEQERNIRVNLDFDRMSAFGITVQDIVMAFKNEHIKLPGGFLIDNSKEDLLKLDLESHNVEEIENIIVNYDQNRAIKLRDIAEVKDDVKDLRSM

SEQ ID NO: 113001 - protein, 191 aa, Unknown
  Bacterial polypetide isolated from the Sargasso Sea
MDKLKKVKTIIIKKPQKLDCGKEISNFPISYETYGALNEKKDNGILVFHALTGDQFASGKNPITNKDGWWSYALGSGKAIDTEKFFVICANVIGGCMGSYGPSTIDEETGKPIGTNFPVITINDMVNAQYNLLKHFEIEKLFAVIGGSMGGMQVLQFVSNFPDKAHIAIPIACTSSHSAQNIAFNELGRQA

SEQ ID NO: 113002 - protein, 136 aa, Unknown
  Bacterial polypetide isolated from the Sargasso Sea
QRDQISYGFDADFEVESYLRHQGSSFVERFDANSYLYITRAMDYFDLAAEHEGVLANAFRNTKVRYFIVSFSSDWLYPTIESRAVVHALNAVAANVSFLEVQTDKGHDAFLLDEPVLHETLSGFLEGAIRHSGLGL

SEQ ID NO: 113003 - protein, 240 aa, Unknown
  Bacterial polypetide isolated from the Sargasso Sea
KKLLLCYWEDQWGGMQTLQFCATFPDRTFSAVPIACSTNHSAQNIALNELARQAIMADPVWDKGKYQKKNIQPKNGLAVARMVGHISYLSEKGMQEKFGRKLQEKADYEFSFDADFQVESYLRHQGFAFVERFDANSILYITRAMDYFDLAKQFKGGLVEAFKNQKTKFLVISFSSDWLYTTKQNKDTVIALNAAGADVSFAEIKTDKGHDSFLVNEPEFLKTLKGFIDSMYLKFKTDNK

SEQ ID NO: 113004 - protein, 335 aa, Unknown
  Bacterial polypetide isolated from the Sargasso Sea
MSLPEVSVRRFVFAIMINLVIVLFGLISANRISIDRSPDIDFSLISVTTILPGANPDVVDSSVTNIIESAVNSIPGIDDVRSRSAPGVSNVFIQFLLEKDLDIAFNEVQSKVGQINSQLPDDAETPIISKIETGEIPIIWLALRGNRTLQDLSVYAKNTVKRKLETINGVGSVVIGGEQERNIRVNLDFDRMSAFGITVQDIVMAFKNEHIKLPGGFLIDNSKEDLLKLDLESHNVEEIENIIVTYDQNRAIKLKDIAEVKDDVKDLRSMGRFNGDPSIGIGVTKIRGENTVEIIEKVKTKIRSDIEPTLPAGMTLDIGTDDSSYIYELISGLGQ

SEQ ID NO: 113005 - protein, 133 aa, Unknown
  Bacterial polypetide isolated from the Sargasso Sea
LKFGFDADFQIESYLRYQGSVFVDRFDANSYLYITRAMDYFDLTKQFGGNLSKAFKNTKTKFFIISFTSDWLYPTSENKDIVIALNAIGADVGFVEIKTDKGHDSFLLDVPDFLSTIKNYLNTTYSNINERRI

SEQ ID NO: 113006 - protein, 313 aa, Unknown
  Bacterial polypetide isolated from the Sargasso Sea
MDIVGRNAIKTDLNFKKGDYYQSNEKPEDGLAIARMLAHITYVSNDSLKRKFDNSRYDPKDISTEFENRFSVGSYLAYQGSKFVNRFDANSYITLSTAVDYFDIGQNVKEISKTLEKSKCKWLVISFSSDWLYPPFQSEEIVNALINLDKPVSYSCIKSNAGHDAFLLERGYGKLSSSFLENISGISTLKKSQNLSRSTTNIFFDERIDLKFITDLINDNERVLDLGCEDGTLLEELKKKNCKKLVGVEIDNKKVIEGVSKGIEVINLDINTGLKRFNDNQFDVVILSQTLQSIKNVDETIEEILRISNRSII

SEQ ID NO: 113007 - protein, 183 aa, Unknown
  Bacterial polypetide isolated from the Sargasso Sea
MNDKINIVEEATLDCMVAYFSDTNFVLESGFKLSEFKIAFKTFGNLNKEKSNVILVCHALTGDQYVTGYNPITKKDGWWSRMVGPNKPIDTNKFFVICSNVLGGCAGSLGPKEIKDNKKFPSITIKDIVIAQNYLLDSLKIKKLHAVIGGSMGAMQALQWSISFPEKINNIIHIAGALKHSAQ

SEQ ID NO: 113008 - protein, 77 aa, Unknown
  Bacterial polypetide isolated from the Sargasso Sea
MSESVGKVTEQIFKLPNELLLECGQTLKNIELTYEAYGELNSDASNAILICHALSGSHHAAGYYKDKNERLGWWDAL

SEQ ID NO: 113009 - protein, 97 aa, Unknown
  Bacterial polypetide isolated from the Sargasso Sea
MNSELKSVKKLIVNQSLELDCGKTIKDFPLAYETYGTLNKNKNNAILAFHALTGDQFCADTNPITKREGWWTTAVGPGKAIDTNKYFIICANVLGGC

SEQ ID NO: 113010 - protein, 212 aa, Unknown
  Bacterial polypetide isolated from the Sargasso Sea
MNVKFENIKRLNVSEPLKLDCGKTISNFPLAYETYGTLNDNKDNAILVFHALTGDQFVTDTNPITNKEGWWVTAVGPGKAIDTNKYFVICANVIGGCMGSLGPRNINPDTNKPYGLEFPVITIKDMVRAQQSLLNHLGIKKLLCATGGSMGGMQLLQFCATFPNKTFSAIPIACSSSHSAQNIALNELARQAIMADPVWDNGKYALKNVSQK

SEQ ID NO: 113011 - protein, 123 aa, Unknown
  Bacterial polypetide isolated from the Sargasso Sea
QIESYLRYQGKSFVDRFDANSYLYLTRAMDYFDVVKDFSRSIEFPTTTNDHINYLIISFTSDWLFPTNENEEISKKLNFFNRNVSFIEIETDKGHDSFLLDEPELDLTISGFLKSNFNRLIEK

SEQ ID NO: 113012 - protein, 207 aa, Unknown
  Bacterial polypetide isolated from the Sargasso Sea
MIVETKKILINSRLECASGETLENFELMTDFYGELNEKKDNAVLVCHAFSGSHHAAGKRDNNIGWWDEFIGPDKTIDTNRFFVISVNNLGSCFGSSGPLSKDKNGERFNNNFPQLEVIDWVESQKMLADKLGIKKWHLVIGGSLGGMQSLQWAVSYPKMVKKVGILAAAAKTSSQNIALNEVEREVIKKDADFHGGKYLEFNKSPVK

SEQ ID NO: 113013 - protein, 209 aa, Unknown
  Bacterial polypetide isolated from the Sargasso Sea
VPIACSTNHSAQNIALNELARQAIMADPVWEKGKYYKKNIQPKNGLAVARMVGHISYLSEKGMQEKFGRKLQEKADYEFSFDADFQVESYLRHQGFAFVERFDANSILYITRAMDYFDLSKQFKGGLVEAFKNQKTKFLVISFSSDWLYTTKENKDTVIALNSAGADVSFAEIKTDKGHDSFLVNEPEFLKTLKGFIDSMHIKFKNEKK

SEQ ID NO: 113014 - protein, 129 aa, Unknown
  Bacterial polypetide isolated from the Sargasso Sea
LKFSFDADFQIESYLRYQGSVFVDRFDANSYLYITRAMDYFDLTKKFGGNLSKAFEKSHTKFFIISFTSDWLYPTSENRDIVIALNAIGKNVGFVEISSDKGHDSFLLDVPDFLNTVKNFLNTSYENIK

SEQ ID NO: 113015 - protein, 64 aa, Unknown
  Bacterial polypetide isolated from the Sargasso Sea
MQERDDLKFGFDAEFSNRKLFKNIKSSVFVDRFDANSYLFITRAMDYFDLIKQFNGNLSKAFEK

SEQ ID NO: 113016 - protein, 238 aa, Unknown
  Bacterial polypetide isolated from the Sargasso Sea
MNKTEKVKNLIIDKPLKLDCGKTIVNFPLAYETYGQLNEKRDNAILAFHALTGDQFAAEINPITKKEGWWSNALGPGKAIDTNKYFVICANVIGGCMGSYGPSNINPENSKPFGTNFPVITINDMVNAQYHLLEFFKIDKLFSVVGGSMGGMQVLQFVSNFPNKSRTAIPIACTASHSAQNIALNELGRQSIMADHNWSNGFYEENKKLPDKGLAVARMAAHITYLSKKGLQEKFGRK

SEQ ID NO: 113017 - protein, 89 aa, Unknown
  Bacterial polypetide isolated from the Sargasso Sea
MSYSIGLVEPKKVTLDKGLRLESGKELKKIELIYESYGNLNEDHSNAILICHALSGNHHAAGMYEDEKRAGWWDALNWSWKSYRYKQNF

SEQ ID NO: 113018 - protein, 115 aa, Unknown
  Bacterial polypetide isolated from the Sargasso Sea
LRYQGSVFVDRFDANSYLYITRAMDYFDLTKKFGGNLSKAFEKSDTKFFIISFTSDWLYPTSENRDIVIALNAIGKNVGFVEISSDKGHDSFLLDVPDFLNTVKYFLNTSYKQIK

SEQ ID NO: 113019 - protein, 219 aa, Unknown
  Bacterial polypetide isolated from the Sargasso Sea
TFPDKTFSAVPIACSSSHSAQNIALNELARQAIMADPVWDNGKYVLKNVQPKNGLAVARMVGHISYLSEKGMQEKFGRKLQEKADYEFSFNADFQVESYLRHQGYAFTERFDANSILYITRAMDYFDLSKQFKGGLIEAFKNQKTKFLIISFSSDWLYTSKENKDIVIALNASGADVSYSEIITDKGHDSFLLEEPEFLKTLKSFIDSMYEKFKYEKRI

SEQ ID NO: 113020 - protein, 214 aa, Unknown
  Bacterial polypetide isolated from the Sargasso Sea
MNIKENIKTLIIKKPLNLDCGKTINNYPLAYETYGSLNKNKDNAILVFHALTGDQFVTGINPITKKDGWWSYAVGPNKSIDTNKYFVICANVIGGCMGSYGPSHKNPDTNKIYGTDFPVITINDMVNAQVNLLDHFKIKKLFSVVGGSMGGMQVLQFISNYPDKASTVVPIACTSNHSAQNIAFNELGRQAIASDHNWSDGKYLSNNTLPDKGL

SEQ ID NO: 113021 - protein, 221 aa, Unknown
  Bacterial polypetide isolated from the Sargasso Sea
CSTFPNRSFSAIPIACSSSHSAQNIALNELARQAIMADPVWDKGKYFLKNVQPKNGLAVARMVGHISYLSEKGMQEKFGRKLQEKADYEFSFNADFQVESYLRHQGYAFVERFDANSVLYITRAMDYFDLSKQFKGGLVEAFKGQKTKFLIISFSSDWLYTTKENKDIVIALNTSGADVSYSEIVTDKGHDSFLLQVPDFLKTLKSFIDSMYEKFKNEKRI

SEQ ID NO: 113022 - protein, 180 aa, Unknown
  Bacterial polypetide isolated from the Sargasso Sea
MSKFDNIKKLIVKDKLKLDCGQTISDFPIAYETYGKLNSKKDNAILVFHALTGDQFVSDINPITKKDGWWKHAVGSGKALDTNKFFIICANVLGGCMGSFGPSSLNTKTGKSYGNDFPVITINDMVNAQYFLLKHFKIEKLFCVTGGSMGGMQVLQFVSNYPYAAQTAVPIACTSNHSAQ

SEQ ID NO: 113023 - protein, 146 aa, Unknown
  Bacterial polypetide isolated from the Sargasso Sea
MKYRSILELKNKIIELKKYDNVIVFTNGCFDILHKGHITYLSEAKELGDYLIVGLNSDRSVTQIKGPERPINNQCFRSEKLLELNSVDDVIIFDEDTPQNLINELQPNILVKGGDYKKNEIVGAREVEKKGGEVVILPLVPGYSTT

SEQ ID NO: 113024 - protein, 206 aa, Unknown
  Bacterial polypetide isolated from the Sargasso Sea
MNIKDKIKKIIIKKPLKLDCGETIVEYPLAYETYGKLNEKKDNAILVFHALTGDQFASGTNPITKKQGWWSYVIGPSKALDTNKFFVICSNVIGGCMGSFGPGNINPKTNKEFGTDFPVITINDMVNAQYNLLDFFKIDKLHSVIGGSMGGMQVLQFVANFPNKTKTAIPIACTASHSAQNIAFNELGRQSIMADVNWKNGNYSLF

SEQ ID NO: 113025 - protein, 250 aa, Unknown
  Bacterial polypetide isolated from the Sargasso Sea
MAKKTLVFNEVARKGLEAGVNKLADVVKVTLGPKGRNVVLEKKWGAPTITNDGVTIAKEVDLEDPYENMGAQLAKEVASKTNDVAGDGTTTATVLAQAMVNEGMKAVATGVNPMEVKRGMLEASKAVTDFIAGFSKSIGGKDEIAQVASISAADTEIGETIAEAMDKVGKDGVITVEEGQTFGMELEFTDGMQFDKGFISPYFVTDADRQEAVLENPYILIVNSKITAVNDLLPLLEKVMNSGKPLLILA

SEQ ID NO: 113026 - protein, 221 aa, Unknown
  Bacterial polypetide isolated from the Sargasso Sea
MKLDCGQTISNFPLAYETYGKLNDKKDNAILAFHALTGDQFASGLNPITKKEGWWNYLIGPGKAIDTKKYFVICANVIGGCMGSYGPSNINPKTNKNFGTDFPVITINDMVNAQYHLLEFFKIKKLFSVLGGSMGGMQVLQFVSNFPDKSETAIPIACTHSHSAQNIALNELGRQSIMADHNWENGFYVDNNKSPNKGLAVARMAAHITYLSKKGLQEKFG

SEQ ID NO: 113027 - protein, 150 aa, Unknown
  Bacterial polypetide isolated from the Sargasso Sea
MHKDIKTLIIKKPLRLDCGQTIDNFPLAYETYGVLNEKKDNAILIFHALTGDQFVTNLNPVTKKDGWWSYAVGPDKSIDTNKYFIICANVIGGCMGSFGPSHINPKTKKIFGTGFPIITINDMVNAQINLLDHFGIKKLFAVVGGSMGGM

SEQ ID NO: 113028 - protein, 145 aa, Unknown
  Bacterial polypetide isolated from the Sargasso Sea
QVFKKSLGRKLQERDDLKFSFDADFQIESYLRYQGSVFVDRFDANSYLYITRAMDYFDLTKKFGGNLSKAFEKSDTKFFIISFTSDWLYPTSENREIVIALNAIGKNVGFVEITSDKGHDSFLLDVPDFLNTVKNFLNKSYEKIS

SEQ ID NO: 113029 - protein, 283 aa, Unknown
  Bacterial polypetide isolated from the Sargasso Sea
GNSTPTSSYTTIAGDLRVDGGDIGVSGDTDLITLASGRATIDGELVVTSLDIGGTDITSTPAEINTIDGNTSATGTTVADADRVLLNDNGTMVQAAVTDLAAYFDDELTAMPNLVTTAATTVGALNSGSITSGFGAIDNGSSNITTTGTVTYGTLNDGSTNLTTTVAELNIVDGNTSATNTTVADADRVVMNDGATMVQVAVTDLAAYFDDELTAMPNLVTTAATTVGALNSGSITSGFGAIDNGSSNITTTGTVTYGTLNDGSTNLTTTVAELNIVDGNTSA

SEQ ID NO: 113030 - protein, 211 aa, Unknown
  Bacterial polypetide isolated from the Sargasso Sea
MNIEKNIKTLIVNKPLKLDCGKTIKDFPIAYETYGSLNSKKDNAILVFHALTGDQFVTGINPVTNKDGWWSYAVGPDKAIDTNKYFVICSNVIGGCMGSYGPSHKDPDQKIFGTNFPVITINDMVNAQYNLLEHFGIDKLFSITGGSMGGMQVLQFISNFPNKSKTVIPIATTSSHSAQNIAFNELGRQAITADSNWRDGNYSSNETNPGK

SEQ ID NO: 113031 - protein, 113 aa, Unknown
  Bacterial polypetide isolated from the Sargasso Sea
VFVDRFDANSYLYITRAMDYFDLTKKFNGNLSKAFKKTKTKFFIISFTSDWLYPTSENKDIVIALNAVGADVGFVEIKTDKGHDSFLLDVPDFLNTIKNYLSSTYFKLNEKRI

SEQ ID NO: 113032 - protein, 172 aa, Unknown
  Bacterial polypetide isolated from the Sargasso Sea
NVQPKNGLAVARMVGHISYLSEKGMQEKFGRKLQEKADYEFSFDADFQVESYLRHQGYTFVERFDANSVLYITRAMDYFDLSRQFKGGLVEAFKNQKTKFLVISFSSDWLYTTKENKDTVIALNASGADVSFAEIKTDKGHDSFLVNEPEFLKTLKGFIDSMYIKFKNEKRI

SEQ ID NO: 113033 - protein, 178 aa, Unknown
  Bacterial polypetide isolated from the Sargasso Sea
MNDKIKNIKRLSISKPLLLDCKQTVRDFPLAYETYGTLNKTKDNAVLIFHALTGDQFVSGVNPITKKDGWWVTAVGPGKAIDTNKYFVICANVIGGCMGSWGPKEIDKKTNEPYGLNFPVITIRDMVKAQETLLDHLGIEKLLCATGGSMGGMQLLQFCATFPNRTFSAVPIACSTSH

SEQ ID NO: 113034 - protein, 121 aa, Unknown
  Bacterial polypetide isolated from the Sargasso Sea
FQIESYLRYQGSVFVDRFDANSYLYITRAMDYFDLTKQFNGNLSDAFKESKTKFFVVSFTSDWLYPTTENREIVIALNAIGADVGFIEITSDKGHDSFLLDVPDFLNAVKNFLNNSYKKYL

SEQ ID NO: 113035 - protein, 177 aa, Unknown
  Bacterial polypetide isolated from the Sargasso Sea
MIIEKPLKLDCGQIINNFPLAYETYGSLNNEKDNAILVFHALTGDQFVTGINPVTKKDGWWSYAVGSGKSIDTDKYFVICANVIGGCMGSFGPSHENPKTKKIYGTNFPVITINDMVNAQINLLDFFGIKKLFSVVGGSMGGMQVLQFISNYPDKAKTAIPIACTSSHSAQNIAFNE

SEQ ID NO: 113036 - protein, 183 aa, Unknown
  Bacterial polypetide isolated from the Sargasso Sea
MNDPNWHKGNYTEEKTIPERGLSVARMIAHITYLSEDAMHRKFGRKLQSRDIISFGFDADFQIESYLRYQGRSFVERFDANSYLYLTRAMDYFDHSESYRKTLEFVNNANKHINYLVISFTSDWLFPTRENKEIVEILNNLSKNVSFLEIETDKGHDSFLLDEQNLDSVIKGFLVSNFRKKNE

SEQ ID NO: 113037 - protein, 223 aa, Unknown
  Bacterial polypetide isolated from the Sargasso Sea
QFCSTFPDKAFSAIPIACSSSHSAQNIALNELARQAIMADPVWDKGKYVLKNVQPKNGLAVARMVGHISYLSEKGMQEKFGRKLQEKADYEFSFNADFQVESYLRHQGYAFVERFDANSILYITRAMDYFDLSKQFNGGLVEAFKGQKTKFLVISFSSDWLYTTKENKDIVIALNASGADISYSEIVTDKGHDSFLLEVPDFLKTIKSFIDSMYEKFKNEKRI

SEQ ID NO: 113038 - protein, 253 aa, Unknown
  Bacterial polypetide isolated from the Sargasso Sea
MNKSEKVKNLIVDKPLKLDCGKTIVNFPLAYETYGQLNEKRDNAILAFHALTGDQFATGINPITKKEGWWSYALGPGKAIDTNKYFVICANVIGGCMGSYGPSNINPENSKPFGTNFPVITINDMVNAQYNLLEFFKIDKLFSVVGGSMGGMQVLQFVSNFPNKSRTAIPIACTASHSAQNIALNELGRQSIMADHNWANGFYEENKKLPDKGLAVARMAAHITYLSKKGLQEKFGRKLQERDDLNFSFDADS

SEQ ID NO: 113039 - protein, 127 aa, Unknown
  Bacterial polypetide isolated from the Sargasso Sea
ADFQIESYLRYQGSVFVDRFDANSYLYITRAMDYFDLTKQYGGNLSRAFKDSKTKFFIISFTSDWLYPTSENKDIVIALNAIGSDVGFVEIKTDKGHDSFLLDVPDFLSTIKNYLNTTYLNIDERRI

SEQ ID NO: 113040 - protein, 214 aa, Unknown
  Bacterial polypetide isolated from the Sargasso Sea
MSLPEVSVRRFVFAVMINLVIVLFGLISVNRISIDRSPDIDFSLISVTTVLPGANPDVVDSSVTNIIEGAVNSIPGIDDVRSRSAPGVSNVFIQFLLEKDLDIAFNEVQSKVGQINSQLPDEAETPIISKIETGEIPIIWLALRGNRTLQDLSIYAKNVLKRKLETIDGVGSIVIGGEQERNIRVNLDFDRMSAFGITVQDIVMAFRNEHIKLP

SEQ ID NO: 113041 - protein, 114 aa, Unknown
  Bacterial polypetide isolated from the Sargasso Sea
MNYSVKIEKNHKLDCDIANFSKANFVIDSGYKFDNFKIAYKTFGKINSDKSNVILVCHALTGDQFVSGKNPITNKDGWWSRMVGPNKPIDTNKYFVICSNVLGGCIGSTGPKEI

SEQ ID NO: 113042 - protein, 119 aa, Unknown
  Bacterial polypetide isolated from the Sargasso Sea
ESYLRYQGSVFVDRFDANSYLYITRAMDYFDLAKQFNGNLSEAFKKTNAKFFIISFTSDWLYPTQENKDIVIALNSIGADVGFVEIESDKGHDSFLLDVPDFLSALKNFLDKSYEENYL

SEQ ID NO: 113043 - protein, 542 aa, Unknown
  Bacterial polypetide isolated from the Sargasso Sea
MAKKTLVFNEVARKGLEAGVNKLADVVKVTLGPKGRNVVLEKKWGAPTITNDGVTIAKEVDLEDPYENMGAQLAKEVASKTNDVAGDGTTTATVLAQAMVNEGMKAVATGVNPMEVKRGMLEASKAVTDFIAGFSKSIGGKDEIAQVASISAADSEIGETIAEAMDKVGKDGVITVEEGQTFGMELEFTDGMQFDKGFISPYFVTDADRQEAVLENPYILIVNSKITAVNDLLPLLEKVMNSGKPLLILAEDVEGEALATLVVNKLRGTFTSVAVKAPGFGERRKAMLQDIAILTGGEVISEELGLKTENTTVDMLGEAARVVVKKDATTIVDGKGKKADVDGRVKQIQAEIDESDSDWDKEKLQERLAKLSGGVAVVKVGAATEVELKEKKMRIEDALAATRAAVEEGIVAGGGVTLIRAQESIDKISGGTEGEIVGRNIVQKALESPLRQIAVNAGYEGGVMVEKVKSEKGNVGLNAATGETTDLVKEGVIDPAKVTRSTVQNATSIASLVLTTEALVAEEPEDEPPMPPGGMGGMGGMM

SEQ ID NO: 113044 - protein, 172 aa, Unknown
  Bacterial polypetide isolated from the Sargasso Sea
MNSEIKNIKKIIVDQTLELDCGKTIKNFPIAYETYGTLSKNKDNAILACHALTGDQFCTNINPITKREGWWTFAVGPGKAIDTNKYFVICANVLGGCMGSYGPKEINPETNKLFGTTFPVITIRDMIRAQKHLLDYLGIKKLLSVIGGSMGGMQVLQFAALYPELSHSAIPI

SEQ ID NO: 113045 - protein, 1012 aa, Unknown
  Bacterial polypetide isolated from the Sargasso Sea
MINLVIVLFGLISVNRISIDRSPDIDFSLISVTTVLPGANPDVVDSSVTNIIEGAVNSIPGIDDVRSRSAPGVSNVFIQFLLEKDLDIAFNEVQSKVGQINSQLPDEAETPIISKIETGEIPIIWLALRGNRTLQDLSVYAKNVLKRKLETIDGVGSIVIGGEQERNIRVNLDFDRMSAFGITVQDIIMAFRNEHIKLPGGFLIDNSKEDLLKLDLESHNVEEIEDIIVTYDRNRAIKIKDIAEVKDDVRDLRSMGRFNGDPSIGIGVTKIRGENTVEIIEKVKAKIKSDIEPTLPAGMTLDIGTDDSSYIYELISGLGQNIFVGFIIASLIVLLFLRSYSSMAIVSITIPVSLFGAIFIMYAFGLTLNTMTMLALLLLIGIVVDDAIVVLENAQRNLNEDTPEERIRASITGANEVFLPIVSSTLVLVALFTVVFFMEGIAARFFRSFGVVVSTGVLVSTFVALTLTPTLASKFLKTKKESNRVFDGFNRRFTIIENRYREMIEWSLNEKKKVLSYAGLFVLLSFVGFTQLSGGFFPEEDEGQFTITVKTPVGTGIDYTNDRLSVVENLLEEYEDIESYFTIMGSGIESQAVNIGVVYVRLTPSNVRGYKQYEIIPILRERLNKIPGIKAFPAPMSFASGTRGEAMQFTVSGPDLNILNESINAFLSKLAETPELGDVDSSIELNLPQVNLEIKRELASEMGLSTRLIAEAANIFAGGIDVARFNDAVGDGERYKVRLKGQYDMSIDDLDKIYLRTPSKELVRLDTVATFKETVGPSEITRLDRMYSAYFYSDPTTSLSNAIQLIEDAAAETLPVGYEVGFFARAKEFKRTSNQMLFAFLTGLILVYMVLASQFNSFRQPLIVMISQPLAVIGGTFGIWIVGSDLNIFSMTGLVLLTGLVAKNSILLIDRTNQERQKGLEIDEALLNACPRRLRPILMTSLTLILAMMMPALGIGSGVELSQPLAIAIVGGMISSTFLTLVIVPIIYSSAEKRKLRKRLYNLERSASNSNT

SEQ ID NO: 113046 - protein, 189 aa, Unknown
  Bacterial polypetide isolated from the Sargasso Sea
SQNIALNEVEREVIRKDSDFHDGKYLEFNKSPVKGLKAARMLGHITYLSAKNMDQRFGRKLQDTDSKIAEDIDFEIENYLQYKGGKFAKSFDANSYILLTKVMDKFDIAHGYGDSLETALGNISAEVLVVSFASDWMFPTSNGKEICLASIKANKKCSYVELEGEHGHDSFLYPNEDYQNAIKNFIESK

SEQ ID NO: 113047 - protein, 136 aa, Unknown
  Bacterial polypetide isolated from the Sargasso Sea
RKLQEREDLKFGFDADFQIESYLRYQGSVFVDRFDANSYLYITRAMDYFDLAKQFNGNLSEAFKNTNAKFFIISFTSDWLYPTQENKDIVIALNSIGADVGFVEIESDKGHDSFLLDVPDFLSALKNFLDKSYEEN

SEQ ID NO: 113048 - protein, 127 aa, Unknown
  Bacterial polypetide isolated from the Sargasso Sea
ADFQIESYLRYQGSVFVDRFDANSYLYITRAMDYFDLTKQHGGNLSKAFKESKTKFFIISFTSDWLYPTSENKDIVIALNAIGADVGFVEIKTDKGHDSFLLDVPDFLSTIKNYLNTTYLNINERRI

SEQ ID NO: 113049 - protein, 234 aa, Unknown
  Bacterial polypetide isolated from the Sargasso Sea
MNKIDNLKKYIVKDKLKLDCGKEISNFPIAYETFGKLNEGRNNGILIFHALTGDQFPHGINPITNKEGWWNYALGPNKAIDTNKFFVISANVIGGCMGSFGPSSIDPSTNIPYGSNFPVITINDMVNAQNFLLDHFKIKKLFAVIGGSMGGMQVLQFVSNFPNKADVAIPIACTASHSAQNIALNELGRQAIMADKEWDKGKYLENGKSPSKGLAVARMAAHITYLSKKRFAGK

SEQ ID NO: 113050 - protein, 100 aa, Unknown
  Bacterial polypetide isolated from the Sargasso Sea
MSENLGIIEPNFFDYKEDFHLESGKLLKGFKIIYETYGSLNENKSNAILICHALSGNHHAAGYSKEDQDKAGWWNELIGPDKAFDTNKYFVVSLNNLWWM

SEQ ID NO: 113051 - protein, 165 aa, Unknown
  Bacterial polypetide isolated from the Sargasso Sea
ERGLSVARMIAHITYLSEDAMHRKFCRKLQSRDIISFGFDADFQIESYLRYQGRSFVERFDANSYLYLTRAMDYFDHSESYRKTLEFVNNPKNHIKYLVISFTSDWLFPTKENKEIVEILNSLSKNVSFLEIDTDKGHDSFLLDEPELDYVIKGFIESNYGKINE

SEQ ID NO: 113052 - protein, 137 aa, Unknown
  Bacterial polypetide isolated from the Sargasso Sea
ERDDLKFGFDADFQIESYLRHQGSVFVDRFDANSYLYITRAMDYFDLSKQFDGNLSKAFEKTNTKFFIISFTSDWLYPTSENREIVIALNSIGKNVGFAEITSDKGHDSFLLEVPDFLNTIKNFLNTSYNKLNEKRI

SEQ ID NO: 113053 - protein, 207 aa, Unknown
  Bacterial polypetide isolated from the Sargasso Sea
SDKVKKVAIIAASSKISTQNIALNEVAREIIRKDENFHNGDYLSKDVSPKKGLKAARMLGHITYLSESNMRKRFGRRLQDPENKIDADVNYEVENYLQYKGEQFANTFDANSYILMTKAMDSFDPAKDFDNDLVKCLKTIQAKLLIISFDSDWLFPKEYGVEIQMSAIKAGINSSYIELEGDYGHDSFLFYSEQYSAALKNFLNSNG

SEQ ID NO: 113054 - protein, 175 aa, Unknown
  Bacterial polypetide isolated from the Sargasso Sea
MNNIEITDDNNLKCRFAIFKNTNLKLTSGEVLKNFKLAFKTFGSLNENKTNAILICHALTGDQYVTGNNPITGKDGWWARMVGPDKPIDTNKFFVICSNVLGGCAGSTGPKEKNTNDQDIYGADFPSVTIKDMVNAQSKLLDVLQIDQLFSVVGGSMGAMQALQWSIDFPDKIKS

SEQ ID NO: 113055 - protein, 542 aa, Unknown
  Bacterial polypetide isolated from the Sargasso Sea
MAKKTLVFNEVARKGLEAGVNKLADVVKVTLGPKGRNVVLEKKWGAPTITNDGVTIAKEVDLEDPYENMGAQLAKEVASKTNDVAGDGTTTATVLAQAMVNEGMKAVATGVNPMEVKRGMLEASKSVTDFIAGFSKSIGGKDEIAQVASISAADTEIGETIAGAMDKVGKDGVITVEEGQTFGMELEFTDGMQFDKGFISPYFVTDADRQEAVLENPYILIVNSKITAVNDLLPLLEKVMNSGKPLLILAEDVEGEALATLVVNNLRGTFKSVAVKAPGFGERRKAMLQDIAILTGGEVISEELGLKTENTTVDMLGEAARVVVKKDATTIVDGKGKKADVEGRVKQIQAEIDESDSDWDKEKLQERLAKLSGGVAVVKVGAATEVELKEKKMRIEDALAATRAAVEEGIVAGGGVTLIRAQDSIDKISGGSEGEVVGRNIVKKALEAPLRQIAINAGYEGGVMVEKVKSEKGNVGLNAATGDTTDLVKEGVIDPAKVTRSTVQNATSIASLVLTTEALVAEEPEDEPAMPAGGMGGMEGMM

SEQ ID NO: 113056 - protein, 159 aa, Unknown
  Bacterial polypetide isolated from the Sargasso Sea
VGHISYLSEKGMQEKFGRKLQEKADYEFSFNADFQVESYLRHQGYAFVERFDANSVLYITRAMDYFDLSKQFKGGLVEAFKNQKTKFLIISFSSDWLYTTKDNKDIVIALNASGADVSYSEIITDKGHDSFLLDEPEFLKTLKGFVDSMYEKFKNEKRI

SEQ ID NO: 113057 - protein, 177 aa, Unknown
  Bacterial polypetide isolated from the Sargasso Sea
EKYLKKIFHPKNGLAVARMVGHISYLSKKGMQEKFGRKLQEKADYEFSFDADFQVESYLRHQGFAFVERFDANSILYITRAMDYFDLSRQFKGGLVDAFKNQKTKFLIISFSSDWLYTTKENKDTVIALNSAGADVSFAEIKTDKGHDSFLVNEPEFLKTLKGFIDSMHIKFKNEKK

SEQ ID NO: 113058 - protein, 639 aa, Unknown
  Bacterial polypetide isolated from the Sargasso Sea
SLPEISVRRFVFAVMINLVIVLFGLISVNRISIDRSPDIDFSLISVTTVLPGANPDVVDSSVTNIIEGAVNSIPGIDDVRSRSAPGVSNVFIQFLLEKDLDIAFNEVQSKVGQINSQLPDDAETPIISKIETGEIPIIWLALRGNRTLQDLSVYAKNVLKRKLETIDGVGSIVIGGEQERNIRVNLDFNRMSAFGITVQDIVVAFRNEHIKLPGGFLIDNSKEDLLKLDLESHNVEEIENIIVTYDRNRAIKIKDIAEVKDDVRDLRSIGRFNGDPSIGIGVTKIRGENTVEIIEKVKAKIKSDIEPTLPAGITLDIGTDDSSYIYELISGLGQNIFVGFIIASLIVLLFLRSYSSMAIVSITIPVSLFGAIFIMYAFGLTLNTMTMLALLLLIGIVVDDAIVVLENAQRNLNKDTPEERIRASIIGANEVFLPIVSSTLVLVALFTVVFFMEGIAARFFRSFGVVVSTGVLVSTFVALTLTPTLASKFLKTKKESNRVFDGFNRRFTVIENRYREMIEWSLNEKKKVLSYAGLFVLLSFVGFTQLSGGFFPEEDEGQFTITVKTPVGTGIDYTNDRLSVVENLLEEYEDIESYFTIMGSGIESQAVNIGVVYVRLTPSNVRGYKQYEIIPILRERLNK

SEQ ID NO: 113059 - protein, 211 aa, Unknown
  Bacterial polypetide isolated from the Sargasso Sea
MNCERLKKTAKNSFFSHNSNISFDMNTNNNIKTLIVKKPLKLDCGKTINEFPIAYETYGSLNKKKDNAILVFHALTGDQFVTGLNPITKKDGWWSYAVGPDKAIDTKKYFVICANVMGGCMGSFGPSHEDPNTGTAFGTNFPVITINDMVNAQYNLLDHFGIDKLFSIAGGSMGGMQVLQFISNFPDKAKTVIPIACTSSHSAQNIAFNEL

SEQ ID NO: 113060 - protein, 226 aa, Unknown
  Bacterial polypetide isolated from the Sargasso Sea
SVIGGSMGGMQALEWAASYPERLKSAIPIATSSRHTAQNIAFHELGRQAIMADVNWNSGNYKDKNTNPSKGLSIARMTAHVTYLSEASLTKKFGRKLQDKTDLGFGFDADFQIESYLRHQGHTFVDRFDANSYLYITRAMDYFDLEKTHKKSLTEIYANTNLKFLIVSFTGDWLYPTSENLMIVRALSAGGVDVSFVEIDSDKGHDAFLLDEPEFDVCLDGFLKSL

SEQ ID NO: 113061 - protein, 244 aa, Unknown
  Bacterial polypetide isolated from the Sargasso Sea
MNTEKNIKTLIVKKPLKLDCGKTINNFPVAFETYGSLNENKDNAILVFHALTGDQFVTGLNPITKKDGWWSFAVGPDKAIDTNKYFVICSNVIGGCMGSYGPSHKDPETQKTFGTDFPVITINDMVNAQYNLLEHFEIHKLFAITGGSMGGMQVLQFITNFPDKAKTVIPIATTSSHSAQNIAFNELGRQAITADSNWKDGNYETNNTNPGKGLAVARMAAHITYLSKKGLQEKFGRKSKKEKI

SEQ ID NO: 113062 - protein, 236 aa, Unknown
  Bacterial polypetide isolated from the Sargasso Sea
MKSITKLINFTEGIALESGKRLDSFDLMVETYGELNESKTNAILLCHAFSGNHHAAGKNEDRGIGWWDQIVGPSKAIDTDEYYVVCCNNIGGCSGSSGPTSINPNTNKAYGSDFPIVSVSDWVNTQKMLMDKLDIPHWHFVAGGSLGGMQALQWSIAYPDKIKKAGIFAAAAKSSTQNIAMNEVARESIRKDKNFHNGNYIEQNVIPKNGIKTARMLGHITYLSEKHMDLRFGRKF

SEQ ID NO: 113063 - protein, 157 aa, Unknown
  Bacterial polypetide isolated from the Sargasso Sea
AAHITYLSKKGLQEKFGRNLQERDDLKFGFDADFQIESYLRYQGSVFVDRFDANSYLYITRAMDYFDLVKQFDGNLSNAFKKTKTKFFIMSFTSDWLYPTQENKDIVIALNAIGANVGFVEIDSDKGHDSFLLEVPDFLNALKNFLDKSYTESNNEN

SEQ ID NO: 113064 - protein, 289 aa, Unknown
  Bacterial polypetide isolated from the Sargasso Sea
KAIDTNNYYVVCCNNLGGCSGSSGPTSINPDTSEVFGKDFPQVSVKDWVKSQKMLSDHLGIDKWELVLGGSLGGMQALQWAISYPQSLKKAGIFAAAAKSSTQNIAMNEVARESIRKDQDFHNGDYIKHNTKPKNGLKAARMLGHITYLSEEHMNIRFGRKFQDVNSRVAGEVDYEVENYLQYKGEKFSDIFDANSYILMTKAMDDYDASSDADGKLEKALAAIEAKLLIIGFDSDWLYPPSRGKEIQMAAMKNNIASSYICLDGAQGHDSFLFATEKYTKIIKTFLES

SEQ ID NO: 113065 - protein, 154 aa, Unknown
  Bacterial polypetide isolated from the Sargasso Sea
MAAHITYLSKKGLQEKFGRKLQEREDLKFGFDADFQIESYLRYQGSVFVDRFDANSYLYITRAMDYFDLAKQFNGNLSEAFINTNAKFFIISFTSDWLYPTQENKDIVIALNSIGADVGFVEIESDKGHDSFLLDVPDFLSALKNFLDKSYEEN

SEQ ID NO: 113066 - protein, 225 aa, Unknown
  Bacterial polypetide isolated from the Sargasso Sea
MIVKTKKILIDSKLECASGEALESFELMTDFYGELNEKKDNAVLVCHAFSGSHHAAGKRGDSVGWWNEFIGPDKTIDTNRFFVVSINNLGSCFGSSGPLGEDKNGEKFNNDFPQLEIIDWVESQKMLADKLGIEKWHLVIGGSLGGMQSLQWAVSYPKMVKKVGILAAAAKTSSQNIALNEVEREIIRKDEDYHDGKYLDFNKSPVKGLKAARMLGHITYLSAKN

SEQ ID NO: 113067 - protein, 244 aa, Unknown
  Bacterial polypetide isolated from the Sargasso Sea
YLIDHLEIKKLFSVVGGSMGAMQALQWSIDYPDRIETMIHIAGALKHSAQNIAFHEVGRQAIMNDSNWQKGDYQSKNLVPERGLSVARMIAHITYLSDDAMHRKFGRKLQSRDIISFGFDADFQIESYLRYQGKSFVDRFDANSYLYLTRAMDYFDHAESYEKSIEFAQIPNSHIKHLIVSFTSDWLFPTIENKAIVETLNSFSKQVSFIEIETDKGHDSFLLNEPSLDFVIKGFLENNLNKLV

SEQ ID NO: 113068 - protein, 275 aa, Unknown
  Bacterial polypetide isolated from the Sargasso Sea
MNIKLENIKKLDVAKPLKLDCGKTIKDFPIAYETYGKLNDNKDNAILVFHALTGDQFVTGTNPITNKEGWWVTAVGPGRAIDTNKYFVICANVIGGCMGSFGPKDINPVTKKPYGLDFPVITIKDMVKAQESLLEHLGIKKLLCATGGSMGGMQLLQFCATFPDKAFSAVPIACSSSHSAQNIALNELARQAIMADPVWDNGRYVLKNSQPKNGLAVARMVGHISYLSEKGMQEKFGRKLQEKADYEFSFNADFQVESYLRHQGYAFVERFDANS

SEQ ID NO: 113069 - protein, 304 aa, Unknown
  Bacterial polypetide isolated from the Sargasso Sea
MTDFYGELNKKKDNAVLVCHAFSGSHHAAGKRDSNIGWWDEFIGPDKTIDTNRFFVISINNLGSCFGSSGPLSKDKNGERFNNNFPQLEVIDWVESQKMLADKLGIKKWHLVIGGSLGGMQSLQWAVSYPKMVKKVGILAAAAKTSSQNIALNEVEREVIKKDSDFHDGKYLEFNKSPIKGLKAARMLGHITYLSAKNMDQRFGRKLQSTGSKIAEDVNFEIENYLQYKGGKFAELFDANSYILLTKVMDKFDIAHGYEDSLEAALENVSAEMLVVSFTSDWMFPASNGKEIMLASIKRIKNVH

SEQ ID NO: 113070 - protein, 237 aa, Unknown
  Bacterial polypetide isolated from the Sargasso Sea
LFCVTGGSMGGMQVLQFVANYPNAAQTAVPIACTSNHSAQNIGLNELGRQAIMADANWQNGRYEETKSSPDKGLSVARMAAHITYLSKDALQEKFGRKLQERDDLKFSFDADFQIESYLRHQGSVFVDRFDANSYLYITRAMDYFDLNKKFGGNLSKAFEKSKTKFFIISFTSDWLYPSSENKEIVIALNSIGADVGYVEIDSDKGHDSFLLDVPDFLQALGNFLNKSYERLNEKGI

SEQ ID NO: 113071 - protein, 177 aa, Unknown
  Bacterial polypetide isolated from the Sargasso Sea
MADPNWKKENSSPDKGLAVARMAAHITYLSKKGLEEKFGRKLQDKGSLKFSFDADFQIESYLRYQGATFVDRFDANSYLYITRAMDYFDLEKQFKGNLSHAFKNNKSKFCIISFSSDWLYPTTENKDIVIALNACGANVRFVEVNSDKGHDSFLLDVPEFLNTLGQFISSTYNEIKK

SEQ ID NO: 113072 - protein, 293 aa, Unknown
  Bacterial polypetide isolated from the Sargasso Sea
NPITNKEGWWITAVGPGRAIDTNKYFVICANVIGGCMGSLGPKNINPITKKPYGLDFPVITIKDMVKAQESLLEHFGIKKLLCATGGSMGGMQLLQFCATFPDKAFSAVPIACSSSHSAQNIALNELARQAIMADPVWDNGNYVLKNVQPKNGLAVARMVGHISYLSEKGMQEKFGRKLQEKADYEFSFNADFQVESYLRHQGYAFVERFDANSVLYITRAMDYFDLSKQFKGGLVEAFKNQKTKFLIISFSSDWLYTTKDNKDIVIALNASGADVSYSEIIKEKGHDSFLLE

SEQ ID NO: 113073 - protein, 207 aa, Unknown
  Bacterial polypetide isolated from the Sargasso Sea
MDNFVKIEENEKLKCSVAHFNNANFTLDSGYKFNDFKIAFKTYGKINKDKSNVVLICHALTGDQHVASKNPITNKDGWWSKIVGPNKPIDTNSLFVICSNVLGGCLGSTGPKENNSETNNQYGTDFPSITIGDIVKAQKYLLDALKIDKIFAVIGGSMGAMQVLQWTIDFPEKVLNAIHIAGALKHSAQNIAFHEVGRQAIMNDPAG

SEQ ID NO: 113074 - protein, 323 aa, Unknown
  Bacterial polypetide isolated from the Sargasso Sea
INEKKDNAILAFHALSGDQFVTGTNPITNKSGWWSYLVGPNKAVDTNKFFVICANVIGGCMGSYGPSSIDIKTNKKIGTNFPIITINDMVNAQYNLLNFFKIDKLFSVMGGSMGGMQVLQFVANYPDKTRTAIPIACTASHSAQNIALNELGRQAIMADSNWQKGDYLNLKNSPDKGLSVARMAAHITYLSQKGLQEKFGRKLQERDDLKFSFDADFQIESYLRHQGSAFVDRFDANSYLYITRAMDYFDLTKQYKENLADAFKDTNVKFFVISFTSDWLYPTSENKEIVIALNAAGADVGFIEVTSDKGHDSFLLDVPDFFK

SEQ ID NO: 113075 - protein, 282 aa, Unknown
  Bacterial polypetide isolated from the Sargasso Sea
IKKLNISKPLLLDCKQTVKDFSLAYETYGKLNESKDNAILVFHALTGDQFVSGINPITKKEGWWVTAVGPDKAIDTNKYFVICANVIGGCMGSWGPKEIDKKTNEPYGLNFPVITIRDMVKAQEALLDHLGIKKLLCATGGSMGGMQLLQFCATFPNRTFSAVPIACSTSHSAQNIALNELARQAIMADPVWDKGKYLKKNTQPKNGLAVARMVGHISYLSEKGMQEKFGRKLQEKADYEFSFDADFQVESYLRHQGYTFVERFDANSILYITRAMDYFDLS

SEQ ID NO: 113076 - protein, 194 aa, Unknown
  Bacterial polypetide isolated from the Sargasso Sea
AQNIAFNELGRQAITADSNWRDGNYTSNDTNPGKGLAVARMAAHITYLSKKGLQEKFGRKLQEREDLKFGFDADFQIESYLRYQGSVFVDRFDANSYLYITRAMDYFDLAKQFNGNLSEAFINTNAKFFIISFTSDWLYPTQENKDIVIALNSIGADVGFVEIESDKGHDSFLLDVPDFLSALKNFLDKSYEEN

SEQ ID NO: 113077 - protein, 259 aa, Unknown
  Bacterial polypetide isolated from the Sargasso Sea
MFVKKPLKLDCGKTINDFPIAYETYGSLNEKKDNAILIFHALTGDQFVTGLNPITKKEGWWSYAVGPDKAIDTKKYFVICSNVIGGCMGSFGPSHTDPLTGNVFGTNFPILTINDMVNAQLNLLDHFGIDKLFSIAGGSMGGMQVLQFISNFPDKSKTVVPIACTSSHSAQNIAFNELGRQAIAADSNWKDGTYSSNNTNPNKGLAVARMAAHITYLSKKGLQEKFGRKLQEREDVKFGFDADFQIESYLRYQGSVLSI

SEQ ID NO: 113078 - protein, 203 aa, Unknown
  Bacterial polypetide isolated from the Sargasso Sea
MAKENYNSDLYRTGDTSKYLKNFLYGDKFHLKSGDILDELNISYETYGNLNKDKSNVVLICHAISGDSHVAKHDKEDIPGWWDIMVGPGKPIDTENYFVICSNVIGGCKGSTGPNSIDPSTGTHYGSNFPNITVEDMVSAQNLLIEHLGIKSILCVTGGSMGGFQSIQWARQYPDKIKSVIGLATSARLTNQALAFDIVGRNA

SEQ ID NO: 113079 - protein, 244 aa, Unknown
  Bacterial polypetide isolated from the Sargasso Sea
MVKAQVRLIDNLGIEKLVSVIGGSMGGMQALEWAASYPERLKSAIPIATSARHTAQNIAFHELGRQAIMADVNWNSGNYKDKNTNPSKGLSIARMTAHVTYLSEASLTKKFGRKLQDKKSLGFGFDADFQIESYLRHQGHTFVDRFDANSYLYITRAMDYFDLEKTHKKSLTEIYANTNLKFLIVSFTGDWLYPTSENLMIVRALSAGGVDVSFVEIDSDKGHDAFLLDEPEFDVCLDGFLKSL

SEQ ID NO: 113080 - protein, 185 aa, Unknown
  Bacterial polypetide isolated from the Sargasso Sea
GTNFPIITINDMVNAQYNLLEYFKIEKLFSVIGGSMGGMQVLQFVSNFPNKAFTAIPIACTASHSAQNIALNELGRQSIMADINWQDGFYEEQNKQPDKGLAVARMAAHITYLSKVGLQEKFGRKLQERDDLKFSFDADFQIESYLRYQGSVFVDRFDANSYLYITRAMDYFDLTKKFGGNLSKA

SEQ ID NO: 113081 - protein, 167 aa, Unknown
  Bacterial polypetide isolated from the Sargasso Sea
QNKQPDKGLAVARMAAHITYLSKAGLQEKFGRKLQERDDLKFSFDADFQIESYLRYQGSVFVDRFDANSYLYITRAMDYFDLTKKFGGNLSKAFEKSNTKFFIISFTSDWLYPTSENREIVIALNAIGKDVGFVEITSDKGHDSFLLDVPDFLNTVKNFLNKSYEKI

SEQ ID NO: 113082 - protein, 200 aa, Unknown
  Bacterial polypetide isolated from the Sargasso Sea
MNSRIIKDQKLECEIALFDNINFKLESGEIIKDLKIAFKSYGRLNSNKTNAILVCHALTGDQYVAGNNPTTGRDGWWARMVGPNKPIDTNRFFVICSNVIGGCSGSTGPKEINKETNIVYGGDFPSITIKDMVKAQSLLIEKLNIDKLFSVIGGSMGAMQALQWAIDFPEKISNIIHIAGALKHSAQNIAFHEVGRQAIM

SEQ ID NO: 113083 - protein, 221 aa, Unknown
  Bacterial polypetide isolated from the Sargasso Sea
MQVLQFISNFPDKSKTVIPIATTSSHSAQNIAFNELGRQAITADSNWKDGNYTSNDTNPGKGLAVARMAAHITYLSKKGLQEKFGRKLQEREDLKFGFDADFQIESYLRYQGSVFVDRFDANSYLYITRAMDYFDLAKQFNGNLSEAFKNTNAKFFIISFTSDWLYPTQENKDIVIALNSIGADVGFVEIESDKGHDSFLLDVPEFLSALKNFLDKSYEEN

SEQ ID NO: 113084 - protein, 221 aa, Unknown
  Bacterial polypetide isolated from the Sargasso Sea
CATFPEKTFSAIPIACSSSHSAQNIALNELARQAIMSDPVWDNGKYLLKNAQPKNGLAVARMVGHISYLSEKGMQEKFGRKLQEKADYEFSFNADFQVESYLRHQGYSFVDRFDANSILYITRAMDYFDLSKQFKGGLVEAFKNLKTKFLVMSFSSDWLYTTKENKDIVIALNSSGADVSYSEIITDKGHDSFLLNEPEFLKTLKSFVDSMYEKFKNEKRI

SEQ ID NO: 113085 - protein, 246 aa, Unknown
  Bacterial polypetide isolated from the Sargasso Sea
LLDYLKIKKLFSVIGGSMGGMQVLQFISNYPDKSHTAIPIACTASHSAQNIALNELGRQSIMADNNWQNGFYEEKNISPAKGLSVARMAAHITYLSKKGLQEKFGRKLQERDDLKFSFDADFQIESYLRYQGSVFVDRFDANSYLYITRAMDYFDLTKQFNGNLSKAFEKSNTKFFIISFTSDWLYPTAENREIVIALNSIGKNVGFVEIKSDKGHDSFLLDVPDFLSSVRNFLNTSYKKLYEKRI

SEQ ID NO: 113086 - protein, 235 aa, Unknown
  Bacterial polypetide isolated from the Sargasso Sea
KKLLAVIGGSMGGMQVLQFSSLYPNLAHSAVPIACSASHSAQNIALNELGRQAIMADPNWKKENSSPDKGLAVARMAAHITYLSKKGLQEKFGRKLQDKGSLKFSFDADFQIESYLRYQGSTFVDRFDANSYLYITRAMHYFDLEKQFNGNLTLAFKNTKSKFCVISFSSDWLYPSAENKEIVIALNACGANVGFVEINSDKGHDSFLLDVPDFLKTISEFLNSTYNEVNNEKRI

SEQ ID NO: 113087 - protein, 257 aa, Unknown
  Bacterial polypetide isolated from the Sargasso Sea
MKSILIKEPLKLDCGKEISNFPLAYETYGNLNEKKDNAILIFHALTGDQFASDINPVTNKEGWWNYAVGPGKAFDTEKFFVICANVIGGCMGSYGPGTIDPLTNKPIATNFPVITINDMVNAQYKLLDHFKIEKLFAVAGGSMGGMQVLQFVSNFPNKAKVALPIACTASHSAQNIAFNELGRQAIMSDINWKDGLYDGKTFNPDKGLAVARMAAHITYLSKKGLQEKFGRNLQERSDLKFGFDADFQIESYLRYQG

SEQ ID NO: 113088 - protein, 231 aa, Unknown
  Bacterial polypetide isolated from the Sargasso Sea
AIIGGSMGGMHVLQFASLYPDISHSAIPIACSASHSAQNIALNELGRQAIMADPNWKKENSSPDKGLAVARMAAHITYLSKKGLQEKFGRKLQEKGSLKFSFDADFQIESYLRYQGATFVDRFDANSYLYITRAMDYFDLEKQFKGNLSLAFKNTKSKFCVISFSSDWLYPTLENKEIVIALNACGANVGFVEINSDKGHDSFLLNVPNFLKTISEFLNSTYNEINNEKRI

SEQ ID NO: 113089 - protein, 234 aa, Unknown
  Bacterial polypetide isolated from the Sargasso Sea
QLLVVPWVGCKYYICIKFPNKAKVALPIACTASHSAQNIAFNELGRQAIMSDTNWKDGLYDGKTSNPDKGLAVARMAAHITYLSKKGLQEKFGRNLQERSDLKFGFDADFQIESYLRYQGSVFVDRFDANSYLYITRAMDYFDLTKQHGGNLSQAFKESKTKFFIISFTSDWLYPTSENKDIVIALNAIGADVGFVEIKTDKGHDSFLLDVPDFLSTIKNYLITTYLNINERRI

SEQ ID NO: 113090 - protein, 310 aa, Unknown
  Bacterial polypetide isolated from the Sargasso Sea
IGWWDQLVGSDKAIDTDKYFVVCCNNLGGCSGSSGPTSINPQTGKIYGKDFPQVSVLDWVNSQKMLSEKLGINKWYLVIGGSLGGMQALQWSITFPDSVNKAGILAAAAKSSTQNIALNEVAREAIRKDPNFMDGDYSINQVKPKDGIKTARMLGHITYLSEKHMDLRFGRRFQEEDSKVSKKVDFEVENYLQYKGEKFSENFDANSYILMTKAMDGYDIAQDKNTLETNLQNVKASLLIVGFYTDWLYPPERGKDIQIAAINQNVKSSYIVLSGEHGHDSFLFENEKYVKTLKELLNQNDHEKISHYKK

SEQ ID NO: 113091 - protein, 223 aa, Unknown
  Bacterial polypetide isolated from the Sargasso Sea
MSNIELINDKNLDCSFAIFKNANLTLESGSILKNFKLAYKTFGSLNKNKSNAILVCHALTGDQYLSGHNPITGKDGWWSRMVGPNKPIDTNKFFVICSNVLGGCAGSTGPKETKENEQNIYGRDFPSVTIKDMVSAQVKLLDALEIDQLFSVVGGSMGAMQALQWSIDFPNRVQSIIHIAGALKHSAQNIAFHEVGRQAIMNDPNWHKGNYTENNAIPEEDYL

SEQ ID NO: 113092 - protein, 219 aa, Unknown
  Bacterial polypetide isolated from the Sargasso Sea
ECKFSQFVANFPNKTKTAIPIACTASHSAQNIALNELGRQAIMADSNWKNGDYLNLENSPNKGLSVARMAAHITYLSQKGLQEKFGRKLQERDDLKFSFDADFQIESYLRHQGSAFVDRFDANSYLYITRAMDYFDLVKEYKGNVSDAFKKIKVKFFIISFTSDWLYPTAENKEIVIALNAAGADVGFIEIKSDKGHDSFLLNVPDFLITIKNFLQANY

SEQ ID NO: 113093 - protein, 306 aa, Unknown
  Bacterial polypetide isolated from the Sargasso Sea
TNKDGWWSYAVGPNKAIDTKKYFVICSNVIGGCMGSYGPSQKDPDTEEVFGTNFPVITINDMVNAQENLLNHFKIDKLFSVVGGSMGGMQVLQFVSNFPEKTKTAVPIACTSSHSAQNIALNELGRQAIAADSNWNEGNYESKNTNPNKGLAVARMAAHITYLSKKGLQEKFGRNLQEREDLKFSFDADFQIESYLRYQGSVFVDRFDANSYLYITRAMDYFDLARKFEGNLSNAFKKTKTKFFIISFTSDWLYPTQENKDIVIALNAIGADVGFVEIESDKGHDSFLLEVPDFLSALKNFLEKSY

SEQ ID NO: 113094 - protein, 199 aa, Unknown
  Bacterial polypetide isolated from the Sargasso Sea
TASHSAQNIALNELGRQSIMADRNWQDGFYEEQNKQPDKGLAVARMAAHITYLSKAGLQEKFGRKLQERDDLKFSFDADFQIESYLRYQGSVFVDRFDANSYLYITRAMDYFDLTKKFEGNLSKAFEKSNTKFFIISFTSDWLYPTSENREIVIALNAIGKDVGFVEIKSDKGHDSFLLDVPDFLNTVRNFLNKSYEKI

SEQ ID NO: 113095 - protein, 94 aa, Unknown
  Bacterial polypetide isolated from the Sargasso Sea
MSFIATPQSMHFDEPLPLQGGGSIRDYDLAYETYGQLNADRSNAVLVCHALNASHHVAGVYEGQPKSEGWWDNMIGPGKPVDTNRFFVIGVNNL

SEQ ID NO: 113096 - protein, 217 aa, Unknown
  Bacterial polypetide isolated from the Sargasso Sea
FPDKSETAIPIACTHSHSAQNIALNELGRQSIMADHNWANGFYEDNNKSPSKGLAVARMAAHITYLSKKGLQEKFGRKLQERDDLKFGFDADFQIESYLRHQGSVFVDRFDANSYLYITRAMDYFDLSKQFDGNLSKAFEKTNTKFFIISFTSDWLYPTSENREIVIALNSIGKDVGFAEITSDKGHDSFLLDVPDFLNTIKNFLNTSFNKKNEKRI

SEQ ID NO: 113097 - protein, 218 aa, Unknown
  Bacterial polypetide isolated from the Sargasso Sea
SNFPDKSRTVIPIATTSSHSAQNIAFNELGRQAIMADSNWKEGDYSSNNSNPGKGLAVARMAAHITYLSKKGLQEKFGRKLQEREDLKFGFDADFQIESYLRYQGSVFVDRFDANSYLYITRAMDYFDLAKQFNGNLSDAFKLTKAKFFIISFTSDWLYPTQENKDIVIALNSIGADVGFVEIESDKGHDSFLLDVPDFLNALKNFLDKSYEEIKYEK

SEQ ID NO: 113098 - protein, 288 aa, Unknown
  Bacterial polypetide isolated from the Sargasso Sea
INPVTNKSGWWSHLVGPNKAVDTNKFFIICANVIGGCMGSYGPSSTDPMTSKKLGTNFPVITINDMVNAQYNLLDFFKIDKLFSVMGGSMGGMQVLQFVANFPDKTRTAIPIACAASHSAQNIALNELGRQAIMADGNWQQGDYLNKNISPDKGLSVARMAAHITYLSQKGLQEKFGRKLQEKDDLNFSFDADFQIESYLRHQGSVFVDRFDANSYLYITRAMDYFDLIKEYEGNLSDAFKNSKVKFLIISFTSDWLYPTSENKEIVIALNSAGADVGFIEIKSDKGH

SEQ ID NO: 113099 - protein, 120 aa, Unknown
  Bacterial polypetide isolated from the Sargasso Sea
MSDSIGKVKAQKVTLEGKFELECGQSFNDIELVYETYGVLNADRTNAILICHALSGNHHAAGKYGNEEKPGWWDALIGPGKAVDTNKFFVVCPNNIGGCHGSLGPSSINHDTGDYYGPDF

SEQ ID NO: 113100 - protein, 265 aa, Unknown
  Bacterial polypetide isolated from the Sargasso Sea
DTNRFFVVSVNNLGSCFGSSGPLSKDKNGERFNNNFPQLEVIDWVESQKMLADKLGIKKWHLVIGGSLGGMQSLQWAVSYPKMVNKVGILAAAAKTSSQNIALNEVEREVIRKDSDFHDGKYLEFNKSPVKGLKAARMLGHITYLSAKNMDLRFGRKLQNTDSKIAENIDFEIENYLQYKGGKFAESFDANSYVLLTKVMDKFDIAHGYGDSLEAALENIDAEVLVVSFTSDWMFPTSNGKEICLASIKANKNCSYIELEGEHGH

SEQ ID NO: 113101 - protein, 317 aa, Unknown
  Bacterial polypetide isolated from the Sargasso Sea
MIVKTKKILIYSELECASGEALENFELMTDFYGELNKKKDNAVLVCHAFSGSHHAAGKRDGNIGWWDEFIGPDKTIDTNRFYVVSVNNLGSCFGSSGPLSKDKNGERFNNNFPQLEVIDWVESQKMLADKLGIKKWHLVIGGSLGGMQSLQWAVSYPKMVKKVGILAAAAKTSSQNIALNEVEREVIRKDSDFHDGKYLEFNKSPVKGLKAARMLGHITYLSAKNMDQRFGRKLQNTDSKIAEDIDFEIENYLQYKGGKFAESFDANSYILLTKVMDKFDIAHGYDDSLESALENIRAEVLVVSFTSDWMFPTSKEK

SEQ ID NO: 113102 - protein, 193 aa, Unknown
  Bacterial polypetide isolated from the Sargasso Sea
NELGRQAIMADNEWSNGKYLENGKSPSKGLSVARMAAHITYLSKKGLQEKFGRKLQERDTLNFSFDADFQIESYLRYQGSVFVDRFDANSYLYITRAMDYFDLTKQFNGNLSDAFKHSKTKFFIISFTSDWLYPTNENREIVIALNAIGADVGFIEITSDKGHDSFLLDVPDFLSAIKNFLNNSYKNINETRI

SEQ ID NO: 113103 - protein, 267 aa, Unknown
  Bacterial polypetide isolated from the Sargasso Sea
PYGLDFPVITIKDMVRAQETLLEYLGIKKLLCATGGSMGGMQLLQFCATFPDKTFSAIPIACSSSHSAQNIALNELARQAIMADPVWDKGKYFLKNVQPKNGLAVARMVGHISYLSEKGMQEKFGRKLQEKADYEFSFNADFQVESYLRHQGYAFVERFDANSVLYISRAMDYFDLSKQFKGGLVEAFKTQKTKFLIISFSSDWLYTTKENKDIVIALNSSGADVSFSEIITDKGHDSFLLNVPEFLKTLKSFIDSMHDKFKNEKRI

SEQ ID NO: 113104 - protein, 268 aa, Unknown
  Bacterial polypetide isolated from the Sargasso Sea
KPYGLDFPVITIKDMVRAQESLLDHLGIKKLLCATGGSMGGMQLLQFCATFPEKTFSAVPIACSSSHSAQNIALNELARQAIMADPVWDNGKYFLKNVQPKNGLAVARMVGHISYLSEKGMQEKFGRKLQEKADYEFSFDADFQVESYLRHQGYAFVERFDANSILYITRAMDYFDLSKQFKGGLVEAFKNQKTKFFIMSFSSDWLYTTRENKDIVIALNASGADVSYSEIITDKGHDSFLLNVPEFLKNLKNFIDTMYEKFKNEKRI

SEQ ID NO: 113105 - protein, 304 aa, Unknown
  Bacterial polypetide isolated from the Sargasso Sea
VGPDKAIDTNKYFVICAYVIGGCMGSWGPKEINKSTNEPYGLNFPVITIKDMVKAQETLLDHLGIKKLLCATGGSMGGMQLLQFCATFPNRTFSAVPIACSTNHSAQNIALNELARQAIMADPVWEKGKYYKKNIQPKNGLAVARMVGHISYLSEKGMQEKFGRKLQEKADYEFSFDADFQVESYLRHQGFAFVERFDANSILYITRAMDYFDLSKQFKGGLVEAFKNQKTKFLVISFSSDWLYTTKENKDTVIALNSAGADVSFAEIKTDKGHDSFLVNEPEFLKTLKGFIDSMHIKFKNQNK

SEQ ID NO: 113106 - protein, 203 aa, Unknown
  Bacterial polypetide isolated from the Sargasso Sea
VLQSLSANIAFNELARQAIMADPEWDSGNYISSGKVPRKGLAIARMAGHISYLSEQGLQNKFGRKLQEDQGLQFSFDADFQVESYLKYQGYSFVDRFDANSYLYITRAMDYFDLYKENNGNLSLAFKNSKIKYCIISFSTDWLYPTSESKKIVIALNSIGAEVSFVNIVTNNGHDSFLVNEPKFLETLKGFLDSSYEDFKNEN

SEQ ID NO: 113107 - protein, 294 aa, Unknown
  Bacterial polypetide isolated from the Sargasso Sea
ICANVIGGCMGSWGPKEIDKNTNQAYGLNFPVITIKDMVKSQETLLDHLGIDKLLCAAGGSMGGMQLLQFCATFPNKTFSAVPIACSTNHSAQNIALNELARQAIMADPVWDNGKYLKKNIQPKNGLAVARMVGHISYLSEKGMQEKFGRKLQEKADYEFSFDADFQVESYLRHQGFAFVERFDANSILYITRAMDYFDLSRQFKGGLVEAFKNQKTKFLIISFSSDWLYTTKENKDTVIALNSAGADVSFAEIKTDKGHDSFLVNEPEFLKTLKGFIDSMHIKFKNEKKEKRI

SEQ ID NO: 113108 - protein, 268 aa, Unknown
  Bacterial polypetide isolated from the Sargasso Sea
LEEIKKIIVTKPLKLDCGKTINNFPLAYETYGNLNKDKDNAILVFHALTGDQFVSDTNPITNKDGWWVTAVGPGKAIDTNKYFVICANVIGGCMGSLGPKDLNPETKEPYGLDFPVITIRDMVRAQESLLNHLGIKKLLCATGGSMGGMQLLQFCSTFPDKTFSAVPIACSSSHSAQNIALNELARQAIMADPVWDKGKYFQKNEQPKNGLAVARMVGHISYLSEKGMQEKFGRKLQEKADYEFSFNADFQVESYLRHQGYTFVERFD

SEQ ID NO: 113109 - protein, 303 aa, Unknown
  Bacterial polypetide isolated from the Sargasso Sea
PTKRVWDDIVGSGKAIDTDEFFVVCINVLGGCQGSTGPSSLNPANNRPYGSVFPNITIRDIVRAQAKVADYLGINKWHAIIGGSMGGMQVLEWGTMFPERAPRIAPVATSLAASAQQIAWSAVGRAAIALDPRWRDGNYYEADPGDGPHAGLATARAIAQIHYRSDASFQSRFGRDLVDKDSLFGLWDRFEVESYLDYHGEKLIRRFDANSYLVLNRAMDTHDLSRGRGSLENAARRIKAKVVTASISTDILYPPHQQNEIQKVIQSVGGSCSYEEIEDPNGHDGFLLATTEIGAIFKQFLED

SEQ ID NO: 113110 - protein, 244 aa, Unknown
  Bacterial polypetide isolated from the Sargasso Sea
MDFKFVSGTTLKNLKIAFKTFGKLNKEKTNAILICHALTGDQYVTGHNPITNRDGWWTRMVGPEKPIDTNKFFVICSNVLGGCAGSTGPKEIHDEEGKIFGTSFPSITIKDIVNAQALLVEALNIKKLYSVIGGSMGAMQALQWSIDFPDKIDTIVHIAGALKHSTQNIAFHEVGRQAIMNDPMWKNGQYSIEKTVPERGLSVARMIAHITYLSEDAMHRKFGRKLQSRDIISFGFDADFQIES

SEQ ID NO: 113111 - protein, 166 aa, Unknown
  Bacterial polypetide isolated from the Sargasso Sea
ISEKKHPGKGLAVARMTAHITYLSETSLQKKFGRNLQDKDFYSFHFKPDFQVESYLHYQGYSFIERFDANSYLYITKALDYFDLETDFNGNLVSAFAETSKYKPKFCVISFSDDWLFPPSEATKLVNSLILSNLDVSSVSIESSSGHDSFLIESDYLKNIIKGFIS

SEQ ID NO: 113112 - protein, 249 aa, Unknown
  Bacterial polypetide isolated from the Sargasso Sea
LKKYLIDALEIKKLFAVIGGSMGAMQVLQWTIDYPENLLNAIHIAGALKHSAQNIAFHEVGRQAIMNDASWSEGKYLNKNLKPERGLSVARMIAHITYLSDDAMHRKFGRKLQSRDIISFGFDADFQIESYLRYQGRSFVERFDANSYLYLTRAMDYFDNSEKFSKSLEFSLSQNNHINYLIISFTSDWLFPTKENKQIVDILNFNAKKVSFTEIHTDKGHDSFLLDEPELDQTISGFLNSNYNKITKI

SEQ ID NO: 113113 - protein, 213 aa, Unknown
  Bacterial polypetide isolated from the Sargasso Sea
NFPDKSKTVIPIATTSSHSAQNIAFNELGRQAITADSNWKDGNYTSNETNPGKGLAVARMAAHITYLSKKGLQEKFGRKLQEREDLKFGFDADFQIESYLRYQGSVFVDRFDANSYLYITRAMDYFDLAKQFNGNLSEAFINTKAKFFIISFTSDWLYPTQENKDIVIALNSIGADVGFVEIESDKGHDSFLLDVPDFLSALKNFLDKSYEEN

SEQ ID NO: 113114 - protein, 216 aa, Unknown
  Bacterial polypetide isolated from the Sargasso Sea
FISNFPDKSKTVIPIATTSSHSAQNIAFNELGRQAIMADSNWKEGDYGSNNSNPGKGLAVARMAAHITYLSKKGLQEKFGRKLQEREDLKFGFDADFQIESYLRYQGSVFVDRFDANSYLYITRAMDYFDLAKQFNGNLSDAFKLTKAKFFIISFTSDWLYPTQENKDIVIALNSIGADVGFVEIESDKGHDSFLLDVPDFLNALKNFLDRSYEEN

SEQ ID NO: 113115 - protein, 218 aa, Unknown
  Bacterial polypetide isolated from the Sargasso Sea
MIVEKPLKLDCGQTINNFPLAYETYGSLNNEKDNAILVFHALTGDQFVTGINPVTKKDGWWSYAVGSGKSIDTDKYFVICANVIGGCMGSFGPSHENPKTKKIYGTDFPVITINDMVNAQINLLDFFGIKKLFSVIGGSMGGMQVLQFISNYPDKAKTAVPIACTSSHSAQNIAFNELGRQAIAADHNWSNGDYDSKNIVPDKGLAVARMAAHITYLS

SEQ ID NO: 113116 - protein, 277 aa, Unknown
  Bacterial polypetide isolated from the Sargasso Sea
DFPLAYETYGKLNKLKDNAILVFHALTGDQFVAGVNPLTKKEGWWITAVGPGKAIDTDKYFVICANVIGGCMGSWGPKETDKKTNEPYGLNFPVITIRDMVKAQETLLDHLGIEKLLCATGGSMGGMQALQFCATFPNRTFSSIPIACSTSHSAQNIALNELARQAIMADPVWDKGKYLKKNTQPKNGLAVARMVGHISYLSENGMQEKFGRKLQEKADYEFSFDADFQVESYLRHQGYTFVERFDANSILYITRAMDYFDLSRQFKGGLVEAFKNQ

SEQ ID NO: 113117 - protein, 191 aa, Unknown
  Bacterial polypetide isolated from the Sargasso Sea
NIAFNELGRQAIAADHNWLDGKYSSKNIVPDKGLAVARMAAHITYLSKKGLQEKFGRNLQERDSLKFGFDADFQIESYLRYQGSVFVDRFDANSYLYITRAMDYFDLVKQFNGNLSNAFKNTRAKFFIISFTSDWLYPTQENKDIVIALNAIGADVGFVEIKSDKGHDSFLLDVPDFLKALKNFLDKSYDD

SEQ ID NO: 113118 - protein, 110 aa, Unknown
  Bacterial polypetide isolated from the Sargasso Sea
LKIEKLFAVAGGSMGGMQVLQFVSNFPNKAKVALPIACTASHSAQNIAFNELGRQAIMCDSNWKEGLYYEKSTNPDKGLAVARMAAHITYLSKQGLQEKFGRNLQERSDL

SEQ ID NO: 113119 - protein, 181 aa, Unknown
  Bacterial polypetide isolated from the Sargasso Sea
LGRQAIMADVNWNSGNYKDKNSNRSKGLSIARMTAHVIYLSEASLTKKFGRKLQDKTDLGFGFDADFQIESYLRHQGHTFVDRFDANSYLYITRAMDYFDLEKTHKKSLTEIYANTNLKFLIVSFTGDWLYPTSENLMIVRALSAGGVDVSFVEIDSDKGHDAFLLDEPEFDVCLDGFLKS

SEQ ID NO: 113120 - protein, 169 aa, Unknown
  Bacterial polypetide isolated from the Sargasso Sea
SPDKGLAIARMAAHITYLSKKGLQEKFGRKLQERDDLKFSFDADFQIESYLRYQGSVFVDRFDANSYLYITRAMDYFDLSKQFNGNLSAAFSKTTSKFFVISFTSDWLYPTAENREIVIALNAIGADVGFVEIESDKGHDSFLLNVPEFLDTLGNYLKTNYKTINEKRI

SEQ ID NO: 113121 - protein, 274 aa, Unknown
  Bacterial polypetide isolated from the Sargasso Sea
MSNFDKIKSITIKQPLKLDCGKEISNFPLAYETYGNLNEKKDNAILIFHALTGDQFASGVNPVTNKEGWWNYAVGPGKAFDTEKFFVICANVIGGCMGSYGPGSVDPKTNKPIGTNFPVITINDMVNAQYNLLDHFKIEKLFAVAGGSMGGMQVLQFVSNFPNKAMVALPIACTASHSAQNIAFNELGRQAIMSDINWKDGLYDGKISNPDKGLAVARMAAHITYLSKKGLQEKFGRNLQERSDLKFGFDADFQIESYLRYQGSVFVDRFDANS

SEQ ID NO: 113122 - protein, 227 aa, Unknown
  Bacterial polypetide isolated from the Sargasso Sea
EMVAGGSLGGMQALQWAISYPNRVKKAAIIAASSKISTQNIALNEVAREIIKKDEDFHNGDYLSKDVSPKKGLKAARMLGHITYLSESNMSKRFGRRLQDPKNKIDADVNYEVENYLQYKGEQFANTFDANSYILMTKAMDSFDPAKDFDNNLIKCLQTIQAKLLVISFDSDWLFPKEYGIEIQMSAIKAGIDSSYIELEGDYGHDSFLFYSEQYSVALSNFLKSDG

SEQ ID NO: 113123 - protein, 237 aa, Unknown
  Bacterial polypetide isolated from the Sargasso Sea
LCATGGSMGGMQLLQFCAAFPNKTFSAIPIACSSSHSAQNIALNELARQAIMSDPVWDNGKYVLKNVQPKNGLAVARMVGHISYLSEKGMQEKFGRKLQEKADYEFSFNADFQVESYLRHQGFAFVERFDANSVLYITRAMDYFDLSKQFKGGLIEAFSSQKTKFLVISFSSDWLYTTKDNKDIVIALNASGADVSYSEIVTDKGHDSFLLNETEFLKTLKGFIDSMHEKFKNEKRI

SEQ ID NO: 113124 - protein, 145 aa, Unknown
  Bacterial polypetide isolated from the Sargasso Sea
MHRKFGRKLQSRDIISFGFDADFQVESYLRYQGKSFVERFDANSYLYLTRAMDYFDHDETFRKNIEFSHNPNNHLKYLIVSFTSDWLFPTIESKMIVNQLNSLSREVSFLEIDTDKGHDSFLLEEPQLDDVIKGFLTNNFAKIDE

SEQ ID NO: 113125 - protein, 251 aa, Unknown
  Bacterial polypetide isolated from the Sargasso Sea
KAIDTNKYFVICANVIGGCMGSYGPKEINPETNKLFGTTFPVITIRDMVKAQKYLIDHLGIKKLLAVIGGSMGGMQVLQFASLYPDMSYSAIPIACSASHSAQNIALNELGRQAIMADPNWKKENASPDKGLAVARMAAHITYLSKKGLQEKFGRKLQDKGSLKFSFDADFQIESYLRYQGSTFVDRFDANSYLYITRAMDYFDLEKQFQGNLSLAFKNTKSKFCIISFSSDWLYPTIENKEIVIALNSCG

SEQ ID NO: 113126 - protein, 288 aa, Unknown
  Bacterial polypetide isolated from the Sargasso Sea
RLTSQSIAFDIIGRNAIRRDPNFHDGQYYDKKETPDTGLALARMLGHITYLSQESMSEKFDQDRYDPKDIDTNFEKQFSVGSYLAYQGDKFVERFDPNSYIVLSEAMDKFDLGENSTSISNKLKNKNLKWFLISFSSDWLFPTSLSQELTKALFMAKEQVSFIEVPSNCGHDAFLLDDDINYYGNYVSNFIEDIFADINKTNIKQANKTLSFNHELILDFVTESKSIIDMGCGDGSLLDYINHHNQAESLLGIDNDLDELLQASKKGIPVLSLDLNSDLTIIGDKQFD

SEQ ID NO: 113127 - protein, 273 aa, Unknown
  Bacterial polypetide isolated from the Sargasso Sea
IDPKTNNPIGTNFPVITINDMVNAQYNLLDHFKIERLFAVAGGSMGGMQVLQFVSNFPNKAKVALPIACTASHSAQNIAFNELGRQAIMSDTNWNDGLYDGKTNNPDKGLAVARMAAHITYLSKKGLQEKFGRNLQERSDLKFGFDADFQIESYLRYQGSVFVNRFDANSYLYITRAMDYFDLTKQHGGNLSKAFKESKTKFFIISFTSDWLYPTSENKDIVIALNAIGADVGFVEIKTDKGHDSFLLDVPDFLSTIKNYLNTTYLNINERRI

SEQ ID NO: 113128 - protein, 210 aa, Unknown
  Bacterial polypetide isolated from the Sargasso Sea
ALPIACTASHSAQNIAFNELGRQAIMSDINWKNGLYDGKTFNPDKGLAVARMAAHITYLSKKGLQEKFGRNLQERSDLKFGFDADFQIESYLRYQGSVFVDRFDANSYLYITRAMDYFDLTKQYGGNLSRAFKDSKTKFFIISFTSDWLYPTSENKDIVIALNAIGSDVGFVEIKTDKGHDSFLLDVPDFLSTIKNYLNTTYLNIDERRI

SEQ ID NO: 113129 - protein, 271 aa, Unknown
  Bacterial polypetide isolated from the Sargasso Sea
KKPFGLDFPVITIKDMVKAQESLLDHLKIDKLLCATGGSMGGMQALQFCAIYPEKTFSAIPIACSSSHSAQNIALNELARQAIMADPVWDDGKYVLKNTQPKNGLAVARMVGHISYLSEKGMQEKFGRKLQEKADYEFSFNADFQVESYLRHQGYTFVERFDANSILYITRAMDYFDLSKQFKGGLIEAFKNQKTKFLIISFSSDWLYTTKDNKDIVIALNASGADVSYSEIISDKGHDSFLLDEPEFLKTLKGFIDSMYEKFKNEKKNLK

SEQ ID NO: 113130 - protein, 226 aa, Unknown
  Bacterial polypetide isolated from the Sargasso Sea
SDNGKPLGTNFPVITINDMVNAQYNLLDFFKINKLFSVIGGSMGGMQVLQFVSNFPEKSHTAIPIACTASHSAQNIALNELGRQSIMADHNWMDGFYVENKKVPDKGLAVARMAAHITYLSKKGLQEKFGRKLQERDDLKFGFDADFQIESYLRYQGSVFVDRFDANSYLYITRAMDYFDLTKQFNGNLSKAFEKTNSKFFVISFTSDWLYPTSENRDIVIALKFI

SEQ ID NO: 113131 - protein, 251 aa, Unknown
  Bacterial polypetide isolated from the Sargasso Sea
MNTKFITDTKLESEIAYFDNISLKLESGDIIDSFKLAFKTFGKLNTDKSNAILVCHALTGDQYVSGNNPITGREGWWSRMVGPNKPIDTNKFFVICSNVLGGCAGSTGPKELQNGSDVAYGGNFPSVTIKDMVKAQSLLIESLNIDKLFSVIGGSMGAMQALQWSIDFPDKILNIIHIAGALKHSAQNIAFHEVGRQAIMSDPIWKNGKYFENNEVPERGLSVARMIAHITYLSEDAMHRKFGRKLQSRDI

SEQ ID NO: 113132 - protein, 167 aa, Unknown
  Bacterial polypetide isolated from the Sargasso Sea
QNKQPDKGLAVARMAAHITYLSKAGLQEKFGRKLQERDDLKFSFDADFQIESYLRYQGSVFVDRFDANSYLYITRAMDYFDLTKKFGGNLSKAFEKSDTKFFVISFTSDWLYPTSENREIVIALNAIGKDVGFVEITSDKGHDSFLLDVPDFLNTVRNFLNKSYEKI

SEQ ID NO: 113133 - protein, 288 aa, Unknown
  Bacterial polypetide isolated from the Sargasso Sea
LVQNKPIDTNKFFVICSNVLGGCAGTSGPKEIELKNEKPYGVKFPSITIKDIVKAQNYLIDALEIKKLFAVIGGSMGAMQALQWSLDFPDKIYNVIHIAGALKHSAQNIAFHEVGRQAIMNDANWNKGEYQQKKIIPERGLAVARMIAHITYLSDDAMHRKFGRKLQSRDIISFGFDADFQIESYLRYQGRSFVERFDANSYLYLTRAMDYFDITKKFSTNIEFPTISNTHLNYLVISFTSDWLFPTNENKDIVKILNYFNRNVSFTEIDKDKGHDSFLLDEPRFGYN

SEQ ID NO: 113134 - protein, 177 aa, Unknown
  Bacterial polypetide isolated from the Sargasso Sea
DENWKNGSYELENKSPAKGLSVARMAAHITYLSKKGLQEKFGRKLQERDKIKFGFDADFQIESYLRYQGSIFVDRFDANSYLYITRAMDYFDLSKNSNGDLSKVFKNTKTKFFIISFTSDWLYPTAENREIVIALNAINADVGFLEVKSDKGHDSFLLDVPDFVNALKNFVDNSYKK

SEQ ID NO: 113135 - protein, 292 aa, Unknown
  Bacterial polypetide isolated from the Sargasso Sea
FFWMNIKLENIKKLDITKPLKLDCGKTIKDFPLAYETYGKLNDNKDNAILVFHALTGDQFVTGTNPITNKEGWWVTAVGPGKAIDTNKYFVICANVIGGCMGSLGPRNINPDTKRPYGLDFPVITIKDMVRAQESLLEHLGIKKLLCATGGSMGGMQLLQFCATFPDKTFSAIPIACSSSHSAQNIALNELARQAIMADPVWENGKYVLKDVQPKNGLAVARMVGHISYLSEKGMQEKFGRKLQEKADYEFSFNADFQVESYLRHQGYAFVERFDANSSAVYYQSNGLFYLQ

SEQ ID NO: 113136 - protein, 242 aa, Unknown
  Bacterial polypetide isolated from the Sargasso Sea
FKIEKLFSVVGGSMGGMQVLQFVSNFPNKSHTAIPIACTASHSAQNIALNELGRQSIMADHNWLNGFYEENKKSPDKGLAVARMAAHITYLSKKGLQEKFGRKLQERDDLNFGFDADFQIESYLRYQGSVFVDRFDANSYLYITRAMDYFDLIKQFNGNLSKAFEKSNTKFFIISFTSDWLYPTSENRDIVIALNSIGKDVGFAEIKSDKGHDSFLLDVPDFLNTIKNFLNTSYNKLNEKRI

SEQ ID NO: 113137 - protein, 156 aa, Unknown
  Bacterial polypetide isolated from the Sargasso Sea
GLSIARMTAHVTYLSEASLTKKFGRKLQDKTDLGFGFDADFQIESYLRHQGHTFVDRFDANSYLYITRAMDYFDLEKTHKKSLTEIYANTNLKFLIVSFTGDWLYPTSENLMIVRALSAGGVDVSFVEIDSDKGHDAFLLDEPEFDVCLDGFLKSL

SEQ ID NO: 113138 - protein, 175 aa, Unknown
  Bacterial polypetide isolated from the Sargasso Sea
YEENKKSPDKGLAVARMAAHITYLSKKGLQEKFGRKLQERDDLKFGFDADFQIESYLRYQGSVFVDRFDANSYLFITRAMDYFDLTKQFNGNLSKAFENSETKFFVISFTSDWLYPTSENREIVIALNAIGKDVGFAEITSDKGHDSFLLDVPDFLSAVKNFLKASYKKINEKRI

SEQ ID NO: 113139 - protein, 195 aa, Unknown
  Bacterial polypetide isolated from the Sargasso Sea
SAQNIAFNELGRQAIAADHKWQDGEYSSKNTIPDKGLAVARMAAHITYLSKKGLQEKFGRKLQERDDLKFGFDADFQIESYLRYQGSVFVDRFDANSYLYITRAMDYFDLVKQNNGNLSNAFKNTKAKFFIISFTSDWLYPTQENKDIVIALNAIGANVGFVEIKSDKGHDSFLLDVPDFLKALKNFLDKSFLEK

SEQ ID NO: 113140 - protein, 226 aa, Unknown
  Bacterial polypetide isolated from the Sargasso Sea
MKSKTELINFSEGITLESGKKLDSFDLMVETYGELNESKTNAILLCHAFSGNHHAAGENKNKEIGWWDQLVGPNKAIDTNKNFVVCCNNIGGCAGSSGPTSINPATKKAYGSDFPIVSVSDWVNSQKMLMDRLNIPYWHFVAGGSLGGMQALEWSIAYPDKIKKAGIFAAAAKSSTQNIAMNEVARESIRKDKNFHNGNYIEHNVVPKNGIKTARMLGHITYLSEK

SEQ ID NO: 113141 - protein, 270 aa, Unknown
  Bacterial polypetide isolated from the Sargasso Sea
DMNIKENIKTLIINKPLKLDCGQTINNFPLAYETYGTLNKKKDNAILVFHALTGDQFVTGINPITKKDGWWSYAVGPNKSIDTNKYFVICANVIGGCMGSFGPSHENPKTKKIYGTDFPVITINDMVNAQINLLDFFGIKKLFSVAGGSMGGMQVLQFISNFPDKAKTVIPIACTSSHSAQNIAFNELGRQAIAADHNWQNGKYTSQNTIPDKGLAVARMAAHITYLSKKGLQEKFGRKLQERDDLKFGFDADFQIESYLRYQGSVFVDR

SEQ ID NO: 113142 - protein, 189 aa, Unknown
  Bacterial polypetide isolated from the Sargasso Sea
MNELGRQAITADSNWKDGNYSSSNTSPGKGLAVARMAAHITYLSKKGLQEKFGRKLQEREDLKFGFDADFQIESYLRYQGSVFVDRFDANSYLYITRAMDYFDLTKQFKGNLSDAFKNTKAKFFIISFTSDWLYPTQENKDIVIALNSIGADVGFVEIKSDKGHDSFLLDVPDFLNALKNFLDKSYIEN

SEQ ID NO: 113143 - protein, 259 aa, Unknown
  Bacterial polypetide isolated from the Sargasso Sea
GDQFASGINPITKKDGWWKYALGPGKAFDTEKFFVISANVIGGCMGSYGPSTINEITSKPLGTDFPVITINDMVNAQYNLLDFFKIETLFAVAGGSMGGMQVLQFVSNFPNKAKVAVPIACTASHSAQNIALNELGRQSIMADTNWQNGSYGEREKSPDKGLAVARMAAHITYLSKKGLQEKFGRKLQERDDLKFSFDADFQIESYLRHQGAAFVDRFDANSYLYITRAMDYFDLTKKFDGNLSKAFANSKTKFFVISF

SEQ ID NO: 113144 - protein, 298 aa, Unknown
  Bacterial polypetide isolated from the Sargasso Sea
PGKAIDTDKYFVICANVIGGCMGSFGPSHINNENNKPYGTNFPVITINDMVNAQVNLLDFFGIKKLFSVIGGSMGGMQVLQFVSNFPDKSFTALPIACTSSHSAQNIALNELGRQSIMADVNWNKGSYYENKFSPDKGLAVARMAAHITYLSKKGLQEKFGRKLQERDYLNFSFDADFQIESYLRYQGSVFVDRFDANSYLYITRAMDYFDLSKKFNGNLSLAFKHTDTKFFIISFSSDWLYPTAENHEIVIALNAISKDVGFIEIKSDKGHDSFLLDIPDFHKAVRNFLNNSYEKIK

SEQ ID NO: 113145 - protein, 271 aa, Unknown
  Bacterial polypetide isolated from the Sargasso Sea
AILTFHALSGDQFVTGTNPITNKNGWWSYLVGPNKAVDTNKFFVICANVIGGCMGSYGPSSVDLKTNKRLGTNFPVITINDMVNAQYNLLDFFKIEKLFSVMGGSMGGMQVLQFVANYPKKTKTAIPIACTASHSAQNIALNELGRQAIMADSNWKKGDYLNLENSPDKGLSVARMAAHITYLSQKGLQEKFGRKLQERDDLKFSFDADFQIESYLRHQGSAFVDRFDANSYLYITRAMDYFDLIKQYKGNLSHAFKDSKVKFFIISFTSD

SEQ ID NO: 113146 - protein, 295 aa, Unknown
  Bacterial polypetide isolated from the Sargasso Sea
PLKLDCGKTINNFPLAYETYGKLSKDKDNAILVFHALTGDQFISETNPITNKEGWWTTAVGPGKAIDTDKYFVICANVIGGCMGSLGPKDINPETKQPYGLDFPVITIRDMVRAQESLLDHLGIKKLLCATGGSMGGMQLLQFCSTFPDKAFSAIPIACSSSHSAQNIALNELARQAIMADPVWDKGKYFLKNVQPKNGLAVARMVGHISYLSEKGMQEKFGRKLQEKADYEFSFNADFQVESYLRHQGYAFVERFDANSVLYITRAMDYFDLSKQFKGGLVEAFKGQKTKFLII

SEQ ID NO: 113147 - protein, 206 aa, Unknown
  Bacterial polypetide isolated from the Sargasso Sea
KTKTAIPIACTASHSAQNIAFNELGRQSIMADANWKNGNYSYLNSTPDKGLAVARMAAHITYLSKKGLQEKFGRKLQEKDDLNFSFDADFQIESYLRYQGSIFVDRFDANSYLYITRAMDYFDLVKQYNGNLSKAFENSKTKFFIISFTSDWLYPTAENKEIVIALNAAGVEVGFIEIISDKGHDSFLLDVPEFLKTVKNFLEANY

SEQ ID NO: 113148 - protein, 237 aa, Unknown
  Bacterial polypetide isolated from the Sargasso Sea
MNNEKSIKTLIVKKPLKLDCGKTIKDFPIAYETYGSLNSKKDNAILVFHALTGDQFVTGVNPVTNKEGWWSYAVGPDKAIDTNKYFVICSNVIGGCMGSFGPSHKDLDQKIFGTNFPVITINDMVNAQYNLLDHFGIDKLFSITGGSMGGMQVLQFISNFPNKSKTVIPIATTSSHSAQNIAFNELGRQAITADSNWKDGNYTSNETNPGKGLAVARMAAHITYLSKKGLQEKFGRK

SEQ ID NO: 113149 - protein, 231 aa, Unknown
  Bacterial polypetide isolated from the Sargasso Sea
MNILKQAKNIIITKPQKLDCGKEISNFPISYETYGTLNEKKDNAILVFHALTGDQFASGKNPITNKDGWWSYALGSGKAIDTEKFFVICANVIGGCMGSYGPSTIDEETGKPIGTNFPVITINDMVNAQYNLLERFKIDKLFAVIGGSMGGMQVLQFVSNFPDKAHIAIPIACTSSHSAQNIAFNELGRQAILADANWKNGLYEQNKTSPDKGLAVARMAAHITYLSKKGL

SEQ ID NO: 113150 - protein, 269 aa, Unknown
  Bacterial polypetide isolated from the Sargasso Sea
MDEKLKNIKKLNVSKPLLLDCKQTVKDFSLAYETYGKLNESKDNAILVFHALTGDQFVSGVNPITKREGWWVTAVGPGKAIDTNKYFVICANVIGGCMGSWGPKEIDKKTNEPYGLNFPVITIRDIVKAQETLLDYLGIKKLLCATGGSMGGMQLLQFCATFPNRTFSAVPIACSTSHSAQNIALNELARQAIMADPVWDKGRYLKKNVQPKNGLAVARMVGHISYLSEKGMQEKFGRKLQEKADYEFSFDADFQVESYLRHQRFHICE

SEQ ID NO: 113151 - protein, 221 aa, Unknown
  Bacterial polypetide isolated from the Sargasso Sea
SFITNFPDKAKTVIPIATTSSHSAQNIAFNELGRQAITADSNWKDGNYEANNTNPGKGLAVARMAAHITYLSKKGLQEKFGRKLQEREDLKFGFDADFQIESYLRYQGSVFVDRFDANSYLYITRAMDYFDLVKQFNGNLSDAFKNTKAKFFVISFTSDWLYPTQENKDIVIALNSIGADVGFVEIVSDKGHDSFLLDVPDFLNALKNFLDKSYTELKNEK

SEQ ID NO: 113152 - protein, 267 aa, Unknown
  Bacterial polypetide isolated from the Sargasso Sea
MDKFNNIKKLIIKDQLKLDCGQTISDFPIAYETYGKLNSKKNNAILVFHALTGDQFATGINPITKKDGWWKYTLGPGKAIDTEKYFVICANVLGGCMGSFGPSSVNPKTGKIYEIDFPVITINDMVNAQYFLIKHFEIEKLFCVTGGSMGGMQVLQFVANYPNLSQIAVPIACTSNHSAQNIALNELGRQAIMADANWQNGKYEGTNESPNKGLSVARMAAHITYLSKDALQEKFGRKLQERDELKFSFDADFQIESYLRHQGSVFV

SEQ ID NO: 113153 - protein, 296 aa, Unknown
  Bacterial polypetide isolated from the Sargasso Sea
NSNKDNAILVFHALTGDQFVTGTNPITNKEGWWVTAVGPERAIDTNKYFVICANVIGGCMGSLGPKDINPVTKKPYGLDFPVITIKDMVKAQESLLEHLGIKKLLCATGGSMGGMQLLQFCATFPDKAFSAVPIACSSSHSAQNIALNELARQAIMADPVWDNGKYVLKNVQPKNGLAVARMVGHISYLSEKGMQEKFGRKLQEKADYEFSFNADFQVESYLRHQGYAFVERFDANSVLYITRAMDYFDLSKQFKGGLVEAFKNQKTKFLIISFSSDWLYTTKDNKDIVIALNASG

SEQ ID NO: 113154 - protein, 281 aa, Unknown
  Bacterial polypetide isolated from the Sargasso Sea
MGPNQINSVTNKYWGADFPEISISDMVLVQSKLIEHLGIKKLVSVVGGSLGAYQAIQWGIQFPEKTQSVVSLAGGSRLTSQSIAFDIIGRNAIRRDPYFYGGQYYDKEESPDTGLALARMLGHITYLSQQSMSDKFDDDRYEPKDVDTNFEKQFSVGSYLAYQGDKFVERFDPNSYIVLSQAMDKFDLGENSISISNKLKNKNLKWFLISFSSDWLFPTSLSQELTKALFMAKEQVSFVEVPSNCGHDAFLLEDDIDYYGKYVSNFIEHIFIEDENTNSKQ

SEQ ID NO: 113155 - protein, 179 aa, Unknown
  Bacterial polypetide isolated from the Sargasso Sea
ADEMAGRIYQEQNKQPDKGLAVARMAAHITYLSKVGLQEKFGRKLQERDDLKFSFDADFQIESYLRYQGSVFVDRFDANSYLYITRAMDYFDLTKKFGGNLSKAFEKSHTKFFIISFTSDWLYPTSENRDIVIALNAIGKNVGFVEISSDKGHDSFLLDVPDFLNTVKNFLNTSYENIK

SEQ ID NO: 113156 - protein, 282 aa, Unknown
  Bacterial polypetide isolated from the Sargasso Sea
VIGGCMGSFGPSDINPNTKKPYGTNFPVITINDMVNAQYNLLEYFKIEKLFSVIGGSMGGMQVLQFVSNFPNKAITAIPIACTASHSAQNIALNELGRQSIMADRNWQDGFYEEKNKQPDKGLAVARMAAHITYLSKVGLQEKFGRKLQERDDLKFSFDADFQIESYLRYQGSVFVDRFDANSYLYITRAMDYFDLTKKFGGNLSRAFEKSDTKFFIISFTSDWLYPTSENRDIVIALNAIGKNVGFVEISSDKGHDSFLLDVPDFLNTVKNFLNTSYKRTK

SEQ ID NO: 113157 - protein, 213 aa, Unknown
  Bacterial polypetide isolated from the Sargasso Sea
KTKTVIPIATTSSHSAQNIAFNELGRQAITADSNWKDGNYETNNTNPGKGLAVARMAAHITYLSKKGLQEKFGRKLQEREDLKFGFDADFQIESYLRYQGSVFVDRFDANSYLYITRAMDYFDLVKQFNGNLSDAFKNTKAKFFVISFTSDWLYPTQENKDIVIALNSIGADVGFVEIVSDKGHDSFLLDVPDFLNALKNFLDKSYTELKNEK

SEQ ID NO: 113158 - protein, 216 aa, Unknown
  Bacterial polypetide isolated from the Sargasso Sea
PDKAKLAIPIACTSSHSAQNIAFNELGRQAIMADSKWENGFYSNYKLNPDKGLAVARMAAHITYLSEKGLQEKFGRKLQDRDSLRYGFEADFQIESYLRYQGSVFVDRFDANSYLYITRAMDYFDLSKQYKGNLSDAFKKTKTKFFVISFTSDWLYPTSENREIVIALNSIGADVGFVEIESDKGHDSFLLDVPSFLKTLGDYINSTYKIINERRI

SEQ ID NO: 113159 - protein, 289 aa, Unknown
  Bacterial polypetide isolated from the Sargasso Sea
MNDLSKVKKIIIKKPLKLDCGKEISNFPLAYETYGKLNENKDNAILVFHALTGDQFASGINPITNKDGWWSHALGPGKAFDTEKFFVISANVIGGCMGSYGPSTINENTKKPLGTDFPVITINDMVNAQFNLLDFFKIETLFAVAGGSMGGMQVLQFVSNFPNKAKVAVPIACTASHSAQNIALNELGRQSIMADINWQNGSYGEKEKNPDKGLAVARMAAHITYLSKKGLQEKFGRKLQERDDLKFSFDADFQIESYLRHQGAAFVDRFDANSYLYITRAMDYFDLTK

SEQ ID NO: 113160 - protein, 205 aa, Unknown
  Bacterial polypetide isolated from the Sargasso Sea
MRGALKHSAQNIAFHEVGRQAIMNDVNWHKGNYVTNNSIPERGLAVARMIAHITYLSEDAMHRKFGRKLQSRDIISFGFDADFQIESYLRYQGRSFVERFDANSYLYLTRAMDYFDHSESFKKTLEFINNPNDHLKYLVISFTSDWLFPTRENKEIVEILNSLSKDVSFLEIETDKGHDSFLLDEPDLDFAITGFLESNYGNEYE

SEQ ID NO: 113161 - protein, 282 aa, Unknown
  Bacterial polypetide isolated from the Sargasso Sea
LAYETYGNLNESKDNAILIFHPLTGDQFVSGVNPVTKKEGWWVTAVGPGKAIDTNKYFVICANVIGGCMGSWGPKEIDNKTNEPYGLNFPVITIRDMVKAQETLLDHLGVEKLLCATGGSMGGMQLLQFCTTFPNRTFSAVPIACSTSHSAQNIALNELARQAIMADPVWDKGKYLKKSVQPKNGLAVARMVGHISYLSEKGMQEKFGRKLQEKADYEFSFNADFQVESYLRHQGYAFVERFDANSILYITRAMDYFDLSRQFKGGLVKGFKNQKTKFLVIS

SEQ ID NO: 113162 - protein, 297 aa, Unknown
  Bacterial polypetide isolated from the Sargasso Sea
WWNYLIGPGKAIDTQKYFVICANVIGGCMGSYGPSNINPKTNKNFGTEFPVITINDMVNAQYHLLEFFKIKKLFSVLGGSMGGMQVLQFVSNFPNKSETAIPIACTASHSAQNIALNELGRQSIMADQNWLNGFYEENKKSPDKGLAVARMAAHITYLSKKGLEEKFGRKLQERDDLKFSFDADFQIESYLRYQGSVFVDRFDANSYLYITRAMDYFDLTKQFNGNLSKAFEKSNTKFFIISFTSDWLYPTSENREIVIALNSIGKNVGFAEITSDKGHDSFLLDVPDFLNTIKNFK

SEQ ID NO: 113163 - protein, 244 aa, Unknown
  Bacterial polypetide isolated from the Sargasso Sea
MNSEENIKTLIIKKPLKLDCGKTIRDFPIAYETYGSLNSKKDNAILVFHALTGDQFVTGINPVTKKEGWWNYAVGPNKAIDTNKYFVICSNVIGGCMGSYGPSHKDPDQNIFGTNFPVITINDMVNAQYNLLDHFGIDKLFSITGGSMGGMQVLQFISNFPDKSKTVIPIATTSSHSAQNIAFNELGRQAITADSDWKDGNYTSNKTNPGKGLAVARMAAHITYLSKKGLQGKFWKKITRKRRI

SEQ ID NO: 113164 - protein, 273 aa, Unknown
  Bacterial polypetide isolated from the Sargasso Sea
MNKFKDIKKIIIKKPLKLDCGQTINNFPLAYETYGKLNSEKNNAILIFHALTGDQFASGTNPITKKDGWWSYALGPGKAIDTEKYFVIAANVIGGCMGSFGPSDINPNTKKPYGTNFPVITINDMVNAQYNLLEYFKIEKLFSVIGGSMGGMQVLQFVSNFPNKALTAIPIACTASHSAQNIALNELGRQSIMADGNWQEGFYQEQNKQPDKGLAVARMAAHITYLSKVGLQEKFGRKLQERDDLKFSFDADFQIESYLRYQGSVFVDRFDAN

SEQ ID NO: 113165 - protein, 217 aa, Unknown
  Bacterial polypetide isolated from the Sargasso Sea
NQNKKMKKKKIIKKIHFFERLTLDSGKILSEYEIAYETYGKLNKKKSNAIFICHALTGDQFCSFKNPVNNKNGWWNSLVGPGKVIDTNFFFVICSNVLGGCMGTTGPESIHPKTKKPYGLKFPVITINDMVKVQNRLVDALNIKKLFAVIGGSMGGMQALEWAVSFSHKVHSVIPIATSYRHSAQNIAFHEIGRQAIMADPNWKKGAYYDKKKYPKR

SEQ ID NO: 113166 - protein, 234 aa, Unknown
  Bacterial polypetide isolated from the Sargasso Sea
MNIKENIKTITIEKPLKLDCGKTINNFPLAYETYGSLNKSKDNAILVFHALTGDQFVTGINPITNKDGWWSYAVGPGKSIDTEKYFVICANVIGGCMGSFGPSHQNPKTKKIYGTDFPVITINDMVNAQVNLLDHFGISKLFSVVGGSMGGMQVLQFVSNYPEKTKTAVPIACTSSHSAQNIAFNELGRQAIAADHNWQDGQYSSKNTIPDKGLAVARMAAHITYLSKKGLQEK

SEQ ID NO: 113167 - protein, 228 aa, Unknown
  Bacterial polypetide isolated from the Sargasso Sea
GGMQVLQFVSNFPDKSETAIPIACTHSHSAQNIALNELGRQSIMADPNWANGFYDENIKSPDKGLAVARMAAHITYLSKKGLQEKFGRKLQERDDLKFGFDADFQIESYLRHQGSVFVDRFDANSYLYITRAMDYFDLSKQFDGNLSRAFEKTNTKFFIISFTSDWLYPTSENREVVIALNSIGKDVGFAEITSDKGHDSFLLNVPDFLNTIKNFLNTSYNKLNEKRI

SEQ ID NO: 113168 - protein, 221 aa, Unknown
  Bacterial polypetide isolated from the Sargasso Sea
MQVLQFISNFPYKSKTVIPIATTSSHSAQNIAFNELGRQAITADSDWKDGNYSSNNTNPGKGLAVARMAAHITYLSKKGLQEKFGRKLQEREDLKFGFDADFQIESYLRYQGSVFVDRFDANSYLYITRAMDYFDLAKQFKGNLSDAFINTKAKFFIISFTSDWLYPTQENKDIVIALNSIGADVGFVEIKSDKGHDSFLLDVPDFLSALKNFLDKSYNEN

SEQ ID NO: 113169 - protein, 174 aa, Unknown
  Bacterial polypetide isolated from the Sargasso Sea
KENSTPDKGLAVARMAAHITYLSKKGLQEKFGRKLQDKGSLKFSFDADFQIESYLRYQGATFVDRFDANSYLYITRAMDYFDLEKQFNGNLSLAFKSTKSKFCVISFSSDWLYPTIENKEIVIALNACGANVGFVEINSDKGHDSFLLEVPEFLKTLSQFLNANYNEINNEKRI

SEQ ID NO: 113170 - protein, 261 aa, Unknown
  Bacterial polypetide isolated from the Sargasso Sea
SITIRDIVKAQSYLIDSLSIKKIFAAVGASMGAMQVLQWTIDFPDKIINAIHIAGALKHSAQNIAFHEVGRQAIMNDNSWSKGNYYADNIKPERGLSVARMIAHITYLSDDAMHRKFGRKLQSRDIISFGFDADFQIESYLRYQGKSFVERFDANSYLYLTRAMDYFDLVEKFRQTIEFPTISNNHINYLIVSFTSDWLFPTRENKQISDILNFNSRKVSFTEIETDKGHDSFLLDEPEFDDTISGFLANNYNKKESENYE

SEQ ID NO: 113171 - protein, 247 aa, Unknown
  Bacterial polypetide isolated from the Sargasso Sea
MVNAQYNLLEYFNIKKLFSVIGGSMGGMQVLQFISNFPDKSHTVIPIACTASHSAQNIALNELGRQSIMADNNWMEGFYAENKKNPDKGLAVARMAAHITYLSKKGLQEKFGRKLQERDDLKFGFDADFQIESYLRYQGSVFVDRFDANSYLYITRAMDYFDLTKQFNGNLSKAFEKTSSKFFIISFTSDWLYPTPENREIVIALNAIGKNVGFVEINSDKGHDSFLLDIPDFLNAVKNYLETSYKK

SEQ ID NO: 113172 - protein, 105 aa, Unknown
  Bacterial polypetide isolated from the Sargasso Sea
MKSGKMLKEYELAYETYGVLNKSRDNAVLICHALSGNQHAAGKYKDDEKPGWWDNMIGSGKPINTDHLFVVSLNNLGGCHGSTGPKSINPETNKIYGSNFSIVTV

SEQ ID NO: 113173 - protein, 73 aa, Unknown
  Bacterial polypetide isolated from the Sargasso Sea
KTINPDKGLAVARMAAHITYLSKKGLQEKFGRNLQERSDLKFSFDADFQIESYLRYQGSFFVDRFDANSYLYI

SEQ ID NO: 113174 - protein, 291 aa, Unknown
  Bacterial polypetide isolated from the Sargasso Sea
KTLKLDCGKEISNFPLAYETYGKLNKNKDNAILVFHALTGDQFASGINPVTNKEGWWSHALGPGKALDTEKFFVICANVIGGCLGSYGPSTIDTKTNKPLGTNFPVITINDMVNAQYNILDYLNIEKLFAVAGGSMGGMQVLQFVSNFPNKAQVAVPIACTASHSAQNIALNELGRQAIMADTNWQNGLYGEKEKSPDKGLAVARMAAHITYLSEKGLQEKFGRKLQERDNLKFGFDADFQIESYLRYQGSVFVDRFDANSYLYITRAMDYFDLTKKFNGNLSKALKKVKQ

SEQ ID NO: 113175 - protein, 282 aa, Unknown
  Bacterial polypetide isolated from the Sargasso Sea
MGSWGPKEVDKKTNEPYGLSFPVITIRDIVRAQETLLDYLGVEKLLCATGGSMGGMQTLQFCATFPNRTYSAMPIACSTSHSAQNIALNELARQAVMADPVWDKGKYIKKNVQPKNGLAVARMVGHISYLSEKGMQEKFGRKLQERGDYDFSFNADFQVESYLRHQGFAFVERFDANSILYITRAMDYFDLSRQYKGGLTEAFKNQQTKFLVISFSSDWLYTTKENKDTVIALNAAGTDVSFAEIKTDKGHDSFLVDEPEFLKTIKGFIDSMHIKFKNEKRI

SEQ ID NO: 113176 - protein, 124 aa, Unknown
  Bacterial polypetide isolated from the Sargasso Sea
MSDSIGKVKAQKVTLEGKFELECGQSLNDIELVYETYGALNADATNAILVCHALSGNHHAAGKYENEEKPGWWDSLIGPGKAVDTNKFFIVCPNNIGGCHGSLGQIQLTMILEIIMDLTFQLLL

SEQ ID NO: 113177 - protein, 262 aa, Unknown
  Bacterial polypetide isolated from the Sargasso Sea
MKTVSEKISFGDSLTLKSGQILSGFELMTETYGELNSEKTNAVLVCHAFSGNHHAAGAQDGEVKAGWWDEMIGDGKTIDTTKFFVVSLNNIGGCNGTSGPTTIEPQSGKPYGANFPEVSVSDWVETQKLLADHFGINCWEMVAGGSLGGMQALQWAISYPDKIKRAAIIAASSKISTQNIALNEVAREIIKKDEHFYNGNYLAKGESPIKGLKAARMLGHITYLSESNMSKRFGRKLQDPEKKMDADVNYEVENYLQYKGEQ

SEQ ID NO: 113178 - protein, 244 aa, Unknown
  Bacterial polypetide isolated from the Sargasso Sea
MVDYAIKIETNLKLDCEIAYFSKANFVIDSGYKFDDFKIAYKTFGKINNDKTNVIFICHALTGDQFVSGKNPLTNKDGWWDRMVGPNKPIDTNKYYVICSNVLGGCIGSTGPKEKNFITGKPFGTEFPSITIRDIVKAQKYLIDALKIDKIFAVIGGSMGAMQVLQWTIDYPEKLLNAIHIAGALKHSAQNIAFHEVGRQAIMNDQSWNKGNYYFENTKPERGLSVARMIAHITYLSDDAMHRK

SEQ ID NO: 113179 - protein, 244 aa, Unknown
  Bacterial polypetide isolated from the Sargasso Sea
MIVEKPLKLDCGQTINNFPLAYETYGSLNNEKDNAILVFHALTGDQFVTGINPITKKDGWWSYAVGSGKSIDTDKYFVICANVIGGCMGSFGPSHKNPKTKKIYGTDFPVITINDMVNAQINLLDFFGIKKLFSVVGGSMGGMQVLQFISNFPDKAKTVIPIACTSSHSAQNIAFNELGRQAIAADHNWSDGNYNSKSIVPDKGLAVARMAAHITYLSKKGLQEKFGRKLQERDDFKFGFDADF

SEQ ID NO: 113180 - protein, 237 aa, Unknown
  Bacterial polypetide isolated from the Sargasso Sea
NRFSVGSYLAYQGSKFVDRFDANSYITLSTVVDYFDIGQNIEQITKTLEKSTCKWLVISFSSDWLYPPYQSEEIVNALINLDRSVSYSCIKSKAGHDAFLLERDYGKLSSSFLENISGSTSSKKTKNISKSSTNIFFDKRIDLKFITNLVNKNDRVLDLGCEDGTLLYELKKKGCSKLVGVEIDNKKVFEAINKGIEVINLDINNGLKRFNDNQFDIVILSQTLQSIKNVEETIEKI

SEQ ID NO: 113181 - protein, 303 aa, Unknown
  Bacterial polypetide isolated from the Sargasso Sea
MGKAIDTNKYFVICANVIGGCMGSLGPKDTNPETKKPYGLDFPVITIKDMVKAQESLLEHLGIKKLLCATGGSMGGMQLLQFCATFPDKAFSAVPIACSSSHSAQNIALNELARQAIMADPVWDNGKYVLKNVQPKNGLAVARMVGHISYLSEKGMQEKFGRKLQEKADYEFSFNADFQVESYLRHQGYAFVERFDANSVLYITRAMDYFDLSKQFKGGLVEAFKNQKTKFLIISFSSDWLYTTKDNKDIVIALNASGADVSYSEIITEKGHDSFLLEEPEFLKTLKGFIDSMYEKFKNEKRI

SEQ ID NO: 113182 - protein, 206 aa, Unknown
  Bacterial polypetide isolated from the Sargasso Sea
ACTASHSAQNIALNELGRQSIMADHNWLNGFYEENKKLPDKGLAVARMAAHITYLSKKGLQEKFGRKLQESDDLKFSFDADFQIESYLRYQGSVFVDRFDANSYLYITRAMDYFDLIKQFNGNLSKAFEKSETKFFVISFTSDWLYPTSENREIVIALNAIGKDVGFTEITSDKGHDSFLLDVPDFLNAVKNFLNSSYNKINEKRI

SEQ ID NO: 113183 - protein, 183 aa, Unknown
  Bacterial polypetide isolated from the Sargasso Sea
MEIEDLGIVKPKIFRHEADLALESGKSLDTFELIYETYGELNENRSNAILVCHALSGNHHSAGFHEGDAKPGWWDNLIGPGKAIDTNKYYVVSPNNLGGCHGSTGPSSINPETGKVYGPDFPVLTVEDWVNSQALLAQHLGIEVWHAVIGGSLGGKQALQWAISYPNKKKKSCVIAAAYKLSA

SEQ ID NO: 113184 - protein, 250 aa, Unknown
  Bacterial polypetide isolated from the Sargasso Sea
MDCKVVNFSNISFKIESGYVFEEFKIAFKTFGKLNEDKSNAILVCHALTGDQFVAGKNPITNRDGWWERMVGPNKPIDTNKYFVICTNVLGGCVGSTGPKEINHKTNSIYGQDFPTITIKDIVKAQKYLLDALEIKKLFSLIGGSMGAMQVLQWTIDYPENLLSAIHIAGALKHSAQNIAFHEVGRQAIMNDPDWNDGNYINLNTKPERGLAVARMIAHITYLSDDAMHRKFGRKLQSRDIISFGFDADF

SEQ ID NO: 113185 - protein, 371 aa, Unknown
  Bacterial polypetide isolated from the Sargasso Sea
MSENKIVELAKEQALVLDCGKSLKSIKTAYTTYGKLNATKDNAILICHALTGDQYVASKHPITKKEGWWSYIVGPEKPIDTNKFFVVCPNVIGGCMGSTGPKEVNSETGKEYGTDFPVITIADMVRAQKLLIDYLGIEKIFCVTGGSMGGMLVLEWLSKFPKMVHSAIPIATATNHSAQNIALNELARQSIMADPNWNSGNYYNSDNKPLKGLSVARMAAHISYLSKDALHSKFGRNLQDKNSLDYSFDADFQIESYLRHQGFTFVDRFDANSYLYITRAMDYFDVSSSNNGSLIESFKNTSSKVLCISFTSDWLYPTSENKKIVKVFNTLGINVSFIEIETDGGHDSFLLEEPKLFEAMQGFIKSTYENL

SEQ ID NO: 113186 - protein, 339 aa, Unknown
  Bacterial polypetide isolated from the Sargasso Sea
MNKFKNIKKLVVEKPLKLDCGQTINNFPLAYETYGKLNNEKNNAILIFHALTGDQFASGINPITKKDGWWNYALGPGKAIDTDKYFVIAANVIGGCMGSFGPSDINPDTKKPFGTTFPVITINDMVNAQYNLLEHFKIDKLFSVIGGSMGGMQVLQFVSNFPNKSFTAIPIACTASHSAQNIALNELGRQSIMADRNWQDGFYEEQNKQPDKGLAVARMAAHITYLSKAGLQEKFGRKLQERDDLKFSFDADFQIESYLRYQGSVFVDRFDANSYLYITRAMDYFDLTKKFGGNLSKAFEKSDTKFFIISFTSDWLYPTSENRNIVIALNAIGKNVGFV

SEQ ID NO: 113187 - protein, 222 aa, Unknown
  Bacterial polypetide isolated from the Sargasso Sea
MLPSIELVYETYGEINADKTNAVLVCHAFSGSHEAAGLTSDGNKTGWWDEIIGPGKAIDTEKYFVVSVNNLGSCYGSSGPKSISMETNEPYGSKFPDVCVLDWVNSQKLLMDELEIGCWEMVAGGSLGGMQALQWAVSYPEKIKRAAIIAATAQTSPQNIALNEVARQIIRKDSSFNNGEYITHNTTPKEGLKTARMLGHITYLSETNIQRRFGRKKQAPGT

SEQ ID NO: 113188 - protein, 366 aa, Unknown
  Bacterial polypetide isolated from the Sargasso Sea
MKVNTEKVSFVEPLALESGEVLHSFDLMTETYGELNYAKDNAVLVCHAFSGNHHAAGKRDGEKKPGWWDELIGDGKTIDTRNYFVVAVNNIGGCHGSTGPATPNNESNQFSGASFPEVSVSDWVKTQKLLADHFGIDCWEMVAGGSLGGMQALQWAISYPNRVKKAAIIAASSKISTQNIALNEVAREIIKKDEDFHDGDYLSKDVYPKKGLKAARMLGHITYLSESNMSKRFGRRLQDPKNKIDADVNYEVENYLQYKGEQFANTFDANSYILMTKAMDSFDPAKDFDNDLIKCLQTIQAKLLVISFNSDWLFPKEYGIEIQMSAIKAGIDSSYIELEGDYGHDSFLFYSEQYSVALTNFLKSDG

SEQ ID NO: 113189 - protein, 257 aa, Unknown
  Bacterial polypetide isolated from the Sargasso Sea
ITIRDMVRAQETLLENLGIKKLLCATGGSMGGMQLLQFCSTFPDKTFSAIPIACSASHSAQNIALNELARQSIMADPVWDNGKYFLKNVQPKNGLAVARMVGHISYLSEKGMQEKFGRKLQEKADYEFSFNADFQVESYLRHQGYAFVERFDANSILYITRAMDYFDLSKQFKGGLVEAFKNQRTKFLVISFSSDWLYTTKDNKDIVIALNASGADVSYSEIVTDKGHDSFLLDEPDFLKTLKGFIDSMYEKFKNEK

SEQ ID NO: 113190 - protein, 377 aa, Unknown
  Bacterial polypetide isolated from the Sargasso Sea
MNNIEKVKRLIIDKPLKLDCGKTISNFPLAYETYGKLNDKKDNAILAFHALSGDQFASGINPITNKEGWWNYLIGPGKAIDTEKYFVICANVIGGCMGSYGPSNINPKTNKNFGTEFPVITINDMVNAQFHLLEFFKIEKLFSVLGGSMGGMQVLQFVSNFPDKSQTAIPIACTASHSAQNIALNELGRQSIMADHNWSNGFYDENKKSPDKGLAVARMAAHITYLSKKGLEEKFGRKLQERDDLKFSFDADFQIESYLRYQGSVFVDRFDANSYLYITRAMDYFDLTKQFNGNLSKAFEKTDTKFFIISFTSDWLYPTSENREIVIALNSIGKNVGFAEITSDKGHDSFLLDVPDFLNTIKNFLNTSYKKLNEKRI

SEQ ID NO: 113191 - protein, 157 aa, Unknown
  Bacterial polypetide isolated from the Sargasso Sea
AAHITYLSKKGLQEKFGRNLQERDDLKFGFDADFQIESYLRYQGSVFVDRFDANSYLYITRAMDYFDLVKQFDGNLSDAFKKTKTKFFIMSFTSDWLYPTQENKDIVIALNAIGANVGFVEIDSDKGHDSFLLEVPDFLNALKNFLDKSYIEGNSES

SEQ ID NO: 113192 - protein, 372 aa, Unknown
  Bacterial polypetide isolated from the Sargasso Sea
MEENKIVELSSKERPLLLDCGKSLGPVKIAYTTYGNLNEQKSNAILICHALTGDQYVASQHPITKKEGWWSNVVGPNKSIDTNKFFVICPNIIGGCMGSTGPKEIDPLTQKEFGLNFPVITISDMVKAQKLLIDYLSIEKLFCVTGGSMGGMLVLEWLSKFPEYVHSAIPIATSVNHSAQNIALNELARQSIMADPNWQSGNYYETDNQPTKGLSVARMAAHISYLSKESLHQKFGRNLQDKNELDYSFKADFQIESYLRHQGISFVDRFDANSYLYITRAMDYFDITANSNGSLIEAFKDTKSKVLCISFTSDWLYPTSENKKIVKTLNALGIDVSFLEIETENGHDSFLLHEPEFFDALNGFISSTWREL

SEQ ID NO: 113193 - protein, 238 aa, Unknown
  Bacterial polypetide isolated from the Sargasso Sea
FKIDRLFSVVGGSMGGMQVLQFVSNFPNKSKTAIPIACTASHSAQNIALNELGRQSIMADHNWSNGFYEENKKLPDKGLAVARMAAHITYLSKKGLQEKFGRKLQERDSLKFSFDADFQIESYLRYQGSVFVDRFDANSYLYITRAMDYFDLTKQFNGNLSKAFEKTDTKFFIISFTSDWLYPTPENRDIVIALNSIGKDVGFAEITSDKGHDSFLLDIPDFLNTVKNFLNTSYYKKI

SEQ ID NO: 113194 - protein, 156 aa, Unknown
  Bacterial polypetide isolated from the Sargasso Sea
MAVARMAAHITYLSQKGLQEKFGRKLQETDNINFGFDADFQIESYLRYQGSVFVDRFDANSYLYITRAMDYFDLTKQYNGKLSDAFKNCSTKFLVISFTSDWLYPTHENKDIVIALNACGADVGFIEIISDKGHDSFLLDVPEFLTTIKKFVDANY

SEQ ID NO: 113195 - protein, 303 aa, Unknown
  Bacterial polypetide isolated from the Sargasso Sea
MNTETKIIKFEEGITLESGNHLESFELIVETYGQLNKSKSNGVLLCHAFSGNHHAAGKSEDGSIGWWDQLVGSGKAIDTDKYFVVCCNNLGGCSGSSGPTSINPKTEKIYGKDFPQVSVLDWVNSQKMLSEKLGINKWHLVIGGSLGGMQALQWSITFPDSVNKAGILAAAAKSSTQNIALNEVAREAIRKDPNFMDGDYSINQVKPKDGIKTARMLGHITYLSEKHMDLRFGRRFQEEDSKVSKKVDFEVENYLQYKGEKFSENFDANSYILMTKAMDGYDIAQDKNTLETNLQNVKAITTY

SEQ ID NO: 113196 - protein, 262 aa, Unknown
  Bacterial polypetide isolated from the Sargasso Sea
MDCGQEISNFPLAYETYGKLNENKDNAILVFHALTGDQFASDINPITKKDGWWRHALGPGKAFDTEKFFVICANVIGGCMGSYGPSTIDENTNKPLGTNFPVITINDMVNAQYSLLDFFKIETLFAVAGGSMGGMQVLQFVSNFPNKAKVAVPIACTASHSAQNIALNELGRQSIMADINWQNGSYGEKEKNPDKGLAVARMAAHITYLSKKGLQEKFGRKLQERDDLKFSFDADFQIESYLRHQGAAFVDRFDANSYLYIT

SEQ ID NO: 113197 - protein, 362 aa, Unknown
  Bacterial polypetide isolated from the Sargasso Sea
MIVETKKIFIDSKLECASGVALENFELMTDFYGELNEKKDNAVLVCHAFSGSHHAAGKRDSNIGWWDEFIGPDKTIDTNCFFVVSVNNLGSCFGSSGPLSKGKNGERFNNNFPQLEVIDWVESQKMLADKLGIKKWHLVIGGSLGGMQSLQWAVSYPKMVKKVGILAAAAKTSSQNIALNEVEREVIRKDSDFHDGKYLEFNKSPIEGLKAARMLGHITYLSAKNMDQRFGRKLQSTDSKIAEDVDFEIENYLQYKGGKFAESFDANSYILLTKVMDKFDIAHGYEDSLETALENIAAEVLVVSFTTDWMFPTSNGKEICLASIKANNKCSYIELEGEHGHDSFLYPNDDYQNAIKNFIESK

SEQ ID NO: 113198 - protein, 362 aa, Unknown
  Bacterial polypetide isolated from the Sargasso Sea
MIVETKKILIDSKLECASGEVLESFELMTDFYGELNEKKDNAVLVCHAFSGSHHAAGKRDDNIGWWDEFIGPDKTIDTNRFFVVSVNNLGSCFGSSGPLSKDKNRERFNNNFPQLEVIDWVKSQKMLANKLGIKKWHLVIGGSLGGMQSLQWAVSYPKMVKKVGILAAAAKTSSQNIALNEVEREVIRKDSDFHDGKYLEFNKSPVKGLKAARMLGHITYLSAKNMDLRFGRKLQNTDSKIAEDVDFEIENYLQYKGGKFAESFDANSYILLTKVMDKFDIAHGYDDSLEAALENIAAEVLVVSFTSDWMFPISNGKEICLASIKANKKCSYIELEGEHGHDSFLYPNEDYQNAIKNFIESK

SEQ ID NO: 113199 - protein, 379 aa, Unknown
  Bacterial polypetide isolated from the Sargasso Sea
MDEKLKNIKKLNVSKPLLLDCKQTVKDFSLAYETYGKLNESKDNAILVFHALTGDQFVSGVNPITKREGWWVTAVGPGKAIDTNKYFVICANVIGGCMGSWGPKEIDKKTNEPYGLNFPVITIRDIVKAQETLLDYLGIKKLLCATGGSMGGMQLLQFCATFPNRTFSAVPIACSTSHSAQNIALNELARQAIMADPVWDKGRYLKKNVQPKNGLAVARMVGHISYLSEKGMQEKFGRKLQEKADYEFSFDADFQVESYLRHQGFTFVERFDANSVLYITRAMDYFDLARQFKGGLVEAFKDQKTKFLVISFSSDWLYTTKENKDTVIALNASGADVSFAEIKTDKGHDSFLVNEPEFLKTLKGFIDSMYLKFKNEKRI

SEQ ID NO: 113200 - protein, 362 aa, Unknown
  Bacterial polypetide isolated from the Sargasso Sea
MIVETKKILIDSKLECASGEALEGFELMTDFYGQLNDKKDNAVLVCHAFSGSHHAAGKRDNNIGWWDEFIGPDKTIDTNRFFVISVNNLGSCFGSSGPLSKDKNGERFNNNFPQLEVIDWVESQKMLADKLGIKKWHLVVGGSLGGMQSLQWAVSYPKMVKKVGILAAAAKTSSQNIALNEVEREVIRKDSDFHDGKYLEFNKSPAKGLKAARMLGHITYLSAKNMDQRFGRKLQNTDSKIAEDVDFEIENYLQYKGGKFAESFDANSYILLTKVMDKFDIAHRYDDSLESALENITAEVLVVSFTSDWMFPTSNGKEICLASIKANKKCSYIELEGEHGHDSFLYPNEDYQNAIKNFIESK

SEQ ID NO: 113201 - protein, 303 aa, Unknown
  Bacterial polypetide isolated from the Sargasso Sea
MEKISNSDDYRTNKFSKYLRKFQVPHTLELERGETLEEVVIAYETYGEINSDKSNCILVCHAITGDSHVAKHDEDDLPGWWDIMVGPNKPIDTNKYFVICSNVLGSCRGTTGPNSVNPKTSQYYANDFPVVTIKDMVKVQKILVESLGIKQLLGVVGGSLGGFQCLEWATEYPEMIKACLPIASSPRLTTQGLAFDVVARNAIISDPNFNSGNYYDYEKKPDVGLALARMLGHITYLSKESMNEKFEIDRNNPRDISTSFEKKFSVGSYLAYQGERFVERFDANSYITLSTALDLFDLGDEKR

SEQ ID NO: 113202 - protein, 314 aa, Unknown
  Bacterial polypetide isolated from the Sargasso Sea
MIVETKKILIDSKLECASGETLENFELMTDFYGELNEKKDNAVLVCHAFSGSHHAAGKRDNNIGWWDEFIGPDKTIDTNRFFVISINNLGSCFGSSGPLSKDKNGERFNNNFPQLEVIDWVESQKMLADKLGIKKWHLVIGGSLGGMQSLQWAVSYPKMVKKVGILAAAAKTSSQNIALNEVEREVIRKDGDFHDGNYLEFKKSPVKGLKAARMLGHITYLSAKNMDQRFGRKLQNTDSKIAEDVDFEIENYLQYKGGKFAELFDANSYILLTKVMDKFDIAHGYDDSLETALENITAEVLVISFTSDWMFPSK

SEQ ID NO: 113203 - protein, 241 aa, Unknown
  Bacterial polypetide isolated from the Sargasso Sea
MKSITKLINFNKGIALESGKRLDSFDLMVETYGELNQSKTNAILLCHAFSGDHHAAGKNEDQGIGWWDQIVGPSKAIDTDEYYVVCCNNIGGCSGSSGPTSINPNTKKAYGSDFPIVSVSDWVNTQKMLMDKLNIPYWHFVAGGSLGGMQALQWSIAYPDKIKKAGIFAAAAKSSTQNIAMNEVARESIRKDKNFHNGNYIEQNVIPKNGIKTARMLGHITYLSEKHMDLRFGRKFQDDAQ

SEQ ID NO: 113204 - protein, 312 aa, Unknown
  Bacterial polypetide isolated from the Sargasso Sea
FRNHHAAGEDKELGIGWWDQIVGPKKAIDTEKYYVVCCNNLGGCAGSSGPTTINTATNKVFGKDFPLVTVDDWVNSQKMLMDKLDIPYWHLVAGGSLGGMQALQWSIAYPDKIKKAGIFAAAAKSSTQNIAMNEVARESIRKDKNFHNGDYYDHNVTPKNGIKTARMLGHITYLSEELMDSRFGRKFQDEASKVDQDVDFEVENYLQYKGEKFSEFFDANSYILMTKAMDGYDAGKGIDLEEAMENIKAELLIVGFYSDWLYPAERGKEIQIAGMNNNIKSSFVVFDGEHGHDSFLFHSKEYSNVIKKFIES

SEQ ID NO: 113205 - protein, 190 aa, Unknown
  Bacterial polypetide isolated from the Sargasso Sea
YCFYELGRQAITADHNWSKGEYSLNNTIPDKGLAVARMAAHITYLSKKGLQEKFGRKLQERDDLKFGFDADFQIESYLRYQGSVFVDRFDANSYLYITRAMDYFDLAKQFKGNLSNAFIKTNTKFFVISFTSDWLYPTQENKDIVIALNAIGANVGFVEIESDKGHDSFLLDVPDFLGALKNFLDQSYKE

SEQ ID NO: 113206 - protein, 377 aa, Unknown
  Bacterial polypetide isolated from the Sargasso Sea
MNDIEKVKKLIIDKPLKLDCGQTISNFPLAYETYGKLNDKKDNAILAFHALTGDQFASGTNPITKKEGWWNYLIGPGKAIDTQKYFVICANVIGGCMGSYGPSNINPKNNKNFGTEFPVITINDMVNAQYHLLEFFKIKKLFSVLGGSMGGMQVLQFVSNFPNKSETAIPIACTHSHSAQNIALNELGRQSIMADHNWANGFYEGNNKSPDKGLAVARMAAHITYLSKKGLQEKFGRKLQERDDLKFGFDADFQIESYLRHQGSVFVDRFDANSYLYITRAMDYFDLSKQFDGNLSKAFEKTNTKFFIISFTSDWLYPTLENREIVIALNSIGKNVGFAEITSDKGHDSFLLNIPDFLNTIKNFLNTSYNKSNEKRI

SEQ ID NO: 113207 - protein, 363 aa, Unknown
  Bacterial polypetide isolated from the Sargasso Sea
MNTETKLIKFEEGITLESGNHLESFELIVETYGELNKSKSNGVLLCHAFSGNHHAVGKSEDGSIGWWDQLVGSDKAIDTDKYFVVCCNNLGGCSGSSGPTSINPQTGKIYGKDFPQVSVLDWVNSQKMLSEKLGINKWHLVIGGSLGGMQALQWSITFPDSVNKAGILAAAAKSSTQNIALNEVAREAIRKDPNFMDGDYSINQVKPKDGIKTARMLGHITYLSEKHMDLRFGRRFQEEDSKVSKKVDFEVENYLQYKGEKFSENFDANSYILMTKAMDGYDIAQDKNTLETNLQNVKASLLIVGFYTDWLYPPERGKDIQIAAINQNVKSSYIVLSGEHGHDSFLFENEKYVKTLKEFIESK

SEQ ID NO: 113208 - protein, 184 aa, Unknown
  Bacterial polypetide isolated from the Sargasso Sea
RQAIAADSNWKDGDYSSKNTIPNKGLAVARMAAHITYLSKKGLQEKFGRKLQEREDLKFGFDADFQIESYLRYQGSVFVDRFDANSYLYITRAMDYFDLAKQFKGNLSDAFRATRAKFFIISFTSDWLYPTQENKDIVIALNSIGADVGFVEIESDKGHDSFLLDVPDFLNALKNFLDKSYIEN

SEQ ID NO: 113209 - protein, 375 aa, Unknown
  Bacterial polypetide isolated from the Sargasso Sea
MNRKLENIKKHIVSKPLKLDCGKTINNFPLAYETYGKLNENKDNAVLVFHALTGDQFVAGTNPMTNKEGWWVTAVGPGKAIDTNKYFVICANVIGGCMGSLGPRETNPESNQPYGLNFPVITIKDMVRAQESLLEFLGIKKLLCATGGSMGGMQLLQFCATFPNKTFSAIPIACSSSHSAQNIALNELARQAIMADPVWDNGKYVLKNVQPKNGLAVARMVGHISYLSEKGMQEKFGRKLQEKADYEFSFDADFQVESYLRHQGFAFVERFDANSVLYITRAMDYFDLSKQFKGGLVEAFKNQKTKFLVISFSSDWLYTTKENKDIVIALNASGADVSYSEIISDKGHDSFLLEEPEFLKTLKSFLDSMYDKFKK

SEQ ID NO: 113210 - protein, 312 aa, Unknown
  Bacterial polypetide isolated from the Sargasso Sea
NAAKTNVILICYPLTGSSNAMEWWPKIVGPGLAIDTNQYFVICTNALGGCSGTTGPASINPKTNTPYLLDFPVVTIADMVRVQRELIGHLGINKIKMIIGGSMGGMQALEWVAQAPELIESCVPIASTTKVSPLAVAFDSVGRKSIMEQLKSGHGEAGLAVARQLGHITYLSEEAMEQKFSRNLQHSDAYQYHLEPEFQIESYLNYQGEKFLGRFNLYAYLVLTKAVSYFDLERSYGSIEKAIGHSSAKFLVMAITSDWLYTANQSKALAYQLMKLNKHVSYVEIDSDYAHDTFLIDSDETKQVIKCFLDSL

SEQ ID NO: 113211 - protein, 252 aa, Unknown
  Bacterial polypetide isolated from the Sargasso Sea
MVNAQYHLLEFFKIEKLFSVVGGSMGGMQVLQFVSNFPDKSFTAIPIACTASHSAQNIALNELGRQSIMADHNWSNGFYQENKSPNKGLAVARMAAHITYLSKKGLQEKFGRKLQERDDLKFGFDADFQIESYLRYQGSVFVDRFDANSYLYITRAMDYFDLTKQFNGNLSKAFEKSNTKFFIISFTSDWLYPTSENREIVIALNSLGKDVGFAEITSDKGHDSFLLDVPDFLNTVKNFLNTSYKKINEKRI

SEQ ID NO: 113212 - protein, 209 aa, Unknown
  Bacterial polypetide isolated from the Sargasso Sea
IPIACTSSHSAQNIAFNELGRQAIMADSKWENGFYSNYKLNPDKGLAVARMAAHITYLSEKGLQEKFGRKLQDRDSLRYGFEADFQIESYLRYQGSVFVDRFDANSYLYITRAMDYFDLSKQYKGNLSDAFKETKTKFFVISFTSDWLYPTSENREIVIALNSIGADVGFVEIESDKGHDSFLLDVPSFLKTLGDYINSTYKVINERRI

SEQ ID NO: 113213 - protein, 375 aa, Unknown
  Bacterial polypetide isolated from the Sargasso Sea
MENVKKLNISKSLLLDCKQTVKDFPLAYETYGKLNENKDNAILVFHALTGDQFVTGINPITKKEGWWGTAVGPGKAIDTNKYFVICANVIGGCMGSWGPKEVDKKTNEPYGLSFPVITIRDIVRAQETLLDYLGVEKLLCATGGSMGGMQTLQFCATFPNRTYSAMPIACSTSHSAQNIALNELARQAVMADPVWDKGKYIKKNVQPKNGLAVARMVGHISYLSEKGMQEKFGRKLQERGDYDFSFNADFQVESYLRHQGFAFVERFDANSILYITRAMDYFDLSRQYKGGLTEAFKNQQTKFLVISFSSDWLYTTKENKDTVIALNAAGTDVSFAEIKTDKGHDSFLVDEPEFLKTIKGFIDSMHIKFKNEKRI

SEQ ID NO: 113214 - protein, 211 aa, Unknown
  Bacterial polypetide isolated from the Sargasso Sea
LQWSIAYPDKIKKAGIFAAAAKSSTQNIAMNEVARESIRKDQNFHNGNYINHGVIPKNGIKTARMLGHITYLSEEHMDSRFGRKFQDNDTKVNQGVDFEVENYLQYKGKKFSEIFDANTYILMTKAMDGYDAAEGLSSLNDALNSVTAQLLIIGFYSDWLYPPERGKEIQIAAMNNNIKSSYVVLEGEHGHDSFLFHNERYAKIISKFLES

SEQ ID NO: 113215 - protein, 362 aa, Unknown
  Bacterial polypetide isolated from the Sargasso Sea
MIVETKKILIDSKLECASGEALESFELMTDFYGELNEKKNNAVLVCHAFSGSHHAAGKRDNNIGWWDEFIGPDKTIDTNRFFVISINNLGSCFGSSGPLSKDKNGERFNNNFPQLEVIDWVESQKMLADKLGIKKWHLVIGGSLGGMQSLQWAVSYPKMVKKVGILAAAAKTSSQNIALNEVEREVIRKDSDFHDGKYLEFNKSPAKGLKAARMLGHITYLSAKNMDQRFGRKLQNTDSKIAEDVDFEIENYLQYKGGKFAESFDANSYILLTKVMDKFDIAQGYHDSLEAALGNIAAEVLVVSFTSDWMFPTNNGKEICLASIKANKKCSYIELEGEHGHDSFLYPNEDYQNAIKNFIESK

SEQ ID NO: 113216 - protein, 361 aa, Unknown
  Bacterial polypetide isolated from the Sargasso Sea
MKTETKLIHFSEGIELESGEKLNSFDLMVETYGELNEGKSNAILLCHAFSGNHHAAGSSEDFGIGWWDQLVGPSKTIDTNKYFVVCCNNLGGCAGSSGPSSIDPSSQKIFGKSFPQVSVLDWVNSQKMLMDKLNIECWHFVAGGSLGGMQALQWSISYPDKVKKAGIFAAASKSSSQNIAMNEVARESIRKDENFHNGNYYEHNVIPKNGIKTARMLGHITYLSEEHMDSRFGRKFQDEGSKVEESVSFEVENYLQYKGEQFSELFDANSYILMTKVMDSYDAGKDKPLVEALKEVKAEFLIVGFYSDWLYPPERGKEIQIAAMNNNIRSSFVVLQGDHGHDSFLFSSKTYSNLITNFIES

SEQ ID NO: 113217 - protein, 179 aa, Unknown
  Bacterial polypetide isolated from the Sargasso Sea
QAIMADVNWNSGNYKDKNTNPSKGLSIARMTAHVTYLSEASLTKKFGRKLQDKKDLGFGFDADFQIESYLRHQGHTFVDRFDANSYLYITRAMDYFDLEKTHKKSLTEIYANTNLKFLIVSFTGDWLYPTSENLMIVRALSAGGVDVSFVEIDSDKGHDAFLLDEPEFDVCLDGFLKSL

SEQ ID NO: 113218 - protein, 163 aa, Unknown
  Bacterial polypetide isolated from the Sargasso Sea
KGNFHPKRGLGLARMLGHITYLSEEMMKEKFGRDLKKEKYEYGFDVEFEVESYLRYQADAFSEKFNAHTYLLMTKALDYFDPSRDYENDLTKTLEKTNSDFLVLSFSSDWRFAPERSKEIVNALIASKKSVSYAEIKSSQGHDGFLFPDERYVKSIQTFLENE

SEQ ID NO: 113219 - protein, 272 aa, Unknown
  Bacterial polypetide isolated from the Sargasso Sea
QKQKNPYGLDFPVITIKDMVKAQESLLEYLGNKKLLCATGGSMGGMQLLQFCATFPDKAFSAVPIACSSSHSAQNIALNELARQAIMADPVWDNGKYVLKNVQPKNGLAVARMVGHISYLSEKGMQEKFGRKLQEKADYEFSFNADFQVESYLRHQGYAFVERFDANSVLYITRAMDYFDLSKQFKGGLVEAFKNQKTKFLIISFSSDWLYTTKDNKDIVIALNASGADVSYSEIITDKGHDSFLLDEPEFLKTLKGFLDSMYEKFKNEKRI

SEQ ID NO: 113220 - protein, 168 aa, Unknown
  Bacterial polypetide isolated from the Sargasso Sea
SNNTLPDKGLSVARMAAHITYLSKKGLQEKFGRKLQERDALKFGFDADFQIESYLRYQGSVFVDRFDANSYLYITRAMDYFDLVKQFDGNLSNAFKKTKAKFFIISFTSDWLYPTQENKDIVIALNAIGADVGFVEIKSDKGHDSFLLDVPDFLKTLKNFLDKSYSER

SEQ ID NO: 113221 - protein, 217 aa, Unknown
  Bacterial polypetide isolated from the Sargasso Sea
FPNKTKVALPIACTASHSAQNIAFNELGRQAIMSDSNWKDGLYEEKNNNPDKGLAVARMAAHITYLSKKGLQEKFGRKLQERSDLKFGFDADFQIESYLRYQGSVFVDRFDANSYLYITRAMDYFDLTKKFNGNLSKAFEKTKTKFFVISFTSDWLYPTSENRDIVIALNAIGAEVSFVEIKSDKGHDSFLLDVPDFLNTIKNYLNATFLELNETRI

SEQ ID NO: 113222 - protein, 371 aa, Unknown
  Bacterial polypetide isolated from the Sargasso Sea
MSENKIVTLAEDEPLNLDGGGSLSKFKTAYTTYGKLNDKKNNSILVCHALTGDQYVASDHPITKKNGWWSMVVGPDKPIDTNKFFVICPNVIGGCMGSTGPKEINPENGKEFATDFPVITIADMVRAQKLLIDYLGIEKIFCVTGGSMGGMLVLEWLSKFPEMVHSAVPIATATNHSAQNIALNELARQSIMADPNWQSGNYYHSDKKPMKGLSVARMAAHISYLSKEALQSKFGRNLQDKNSLDYSFDADFQIESYLRHQGFTFVDRFDANSYLYITRAMDYFDVSSANNGSLIEAFKNTQSKILCVSFTSDWLYPTSENKKIVKVFNSLGLNVSFIEIETENGHDSFLLDEPKFFEAIKGFINSTFENL

SEQ ID NO: 113223 - protein, 361 aa, Unknown
  Bacterial polypetide isolated from the Sargasso Sea
MKKNSQLISFPDGITLESGHILNSFDLMIESYGELNESKSNAILVCHAFSGNHHVAGEDKELGKGWWDQIVGPDKALDTNKYYVVCCNNLGGCAGSSGPNTINPDTDKIYGGAFPQVSVEDWVRSQKMLMDKLNIPYWEMVAGGSLGGMQALQWTIAYPDKVKKAGIFAAAPKSSTQNIAMNEVARESIRKDKNFYDGNYHDHDVIPKNGLKTARMLGHITYLSEEHMDNRFGRRFQDSESKMNKGIDFEIENYLQYKGNQFSESFDANSYILMTKAMDNYDAGKSKGLIESLKNIKAKLLIVGFYSDWLYPPERGKEIQLAAMQNNINSSYVILAGDHGHDSFLFHTDKYSKIIRNFIAS

SEQ ID NO: 113224 - protein, 276 aa, Unknown
  Bacterial polypetide isolated from the Sargasso Sea
MKLDCGQTISNFPLAYETYGKLNDKKDNAILAFHALTGDQFASGVNPITNKEGWWNYLIGPGKAIDTQKYFVICANVIGGCMGSYGPSNINPKTNKNFGTEFPVITINDMVNAQYHLLDFFKIKKLFSVLGGSMGGMQVLQFVSNFPDKSETAIPIACTHSHSAQNIALNELGRQSIMADHNWVNGFYESNNKSPDKGLAVARMAAHITYLSKKGLQEKFGRKLQERDDLKFGFDADFQIESYLRHQGSVFVDRFDANSYLYITRAMDYFDLSKQF

SEQ ID NO: 113225 - protein, 291 aa, Unknown
  Bacterial polypetide isolated from the Sargasso Sea
FFVICSNVLGGCAGSTGPKEKENDEQNIYGGNFPSVTIKDIVSAQLKLLDALAIDQLFSVVGGSMGAMQALQWSIDFPERVQSIIHIAGALKHSAQNIAFHEVGRQAIMNDPNWHKGNYFENNSIPERGLSVARMIAHITYLSEDAMHRKFGRKLQSRDIISFGFDADFQIESYLRYQGRSFVERFDANSYLYLTRAMDYFDHSESYRKTLEFVNKQNNHIKYLVISFSSDWLFPTKENKEIVEILNSLSKNVSFLEIETDKGHDSFLLDEPDLDYVIKGFFESNFGKVNE

SEQ ID NO: 113226 - protein, 267 aa, Unknown
  Bacterial polypetide isolated from the Sargasso Sea
GSSGPTSINPATKKVYGKTFPKVSVDDWVNSQKMLMDKLNIDFWHLVAGGSLGGMQALQWSISYPEKVKKAGIFAAAVKSSTQNIAMNEVARESIRKDKHFYDGNYYEHNASPKNGIKAARMLGHITYLSEELMDTRFGRKFQDEASKVDESVNFEVENYLQYKGEKFSEIFDANSYILMTKAMDDYDAGKNKTLEEKLRDVKAEFLIIGFYSDWLYPPERGKEIQIAAMNNNIKSSFIVLDGQHGHDSFLFDSQPYTTLIKNFIES

SEQ ID NO: 113227 - protein, 280 aa, Unknown
  Bacterial polypetide isolated from the Sargasso Sea
GSYGPSDINPENKKIFGTDFPVITINDMVNAQYELLAHLKIEKLFSVIGGSMGGMQVLQFISNFPDKSHTAIPIACTASHSAQNIALNELGRQSIMADSDWQNGFYEEKNKSPAKGLSVARMAAHITYLSKKGLQEKFGRKLQERDDLKFSFDADFQIESYLRYQGSVFVDRFDANSYLYITRAMDYFDLTKQFGGNLSKAFQKSNTKFFIISFTSDWLYPTAENREIVIALNSLGKDVGFVEIKSDKGHDSFLLDVPDFLSAVKNFLNTSYRKINEKRI

SEQ ID NO: 113228 - protein, 342 aa, Unknown
  Bacterial polypetide isolated from the Sargasso Sea
MPSLAGLFFWMNIKLENIKKLDVTKPLKLDCGKTIKDFPLAYETYGKLNNNKDNAILVFHALTGDQFVTGTNPITNKEGWWVTAVGPGRAIDTNKYFVICANVIGGCMGSLGPKDINPVTKKPYGLDFPVITIKDMVKAQESLLEHLGIKKLLCATGGSMGGMQLLQFCATFPDKTFSAVPIACSSSHSAQNIALNELARQAIMADPVWDNGKYVLKNVQPKNGLAVARMVGHISYLSEKGMQEKFGRKLQEKADYEFSFNADFQVESYLRHQGYAFVERFDANSVLYITRAMDYFDLSKQFKGGLVEAFKNQKTKFLIISFSSDWLYTTKDNKDIVIALNA

SEQ ID NO: 113229 - protein, 252 aa, Unknown
  Bacterial polypetide isolated from the Sargasso Sea
MNIKEKIKTIVIDKPLKLDCGQTINKFPLAYETYGSLNENKDNAILVFHALTGDQFVTGLNPITNKDGWWSFAVGPNKSIDTNKYFVICSNVLGGCMGSFGPSHENPETKKTYGTDFPVITINDMVNAQINLLDHFGIKKLFSVVGGSMGGMQVLQFVSNFPDKTKTAVPIACTSSHSAQNIALNELGRQAIAADHNWMNGNYTSKNTVPDKGLAVARMAAHITYLSKKGLQEKFGRKLQERDDLKFGFDAD

SEQ ID NO: 113230 - protein, 389 aa, Unknown
  Bacterial polypetide isolated from the Sargasso Sea
MPSLAGLFFWMNRKIENINKITITKPLKLDCGKTIKNFPLAYETYGKLNENKDNAILVFHALTGDQFVTGTNPVTNKEGWWITAVGPGKAIDTDRYFVICANVIGGCMGSLGPKDTNPENNQPYGLDFPVITIKDMVKAQESLLEHLGIKKLLCATGGSMGGMQLLQFCATFPDKSFSAIPIACSSSHSAQNIALNELARQAIMADPVWDNGKYVSKKVQPKNGLAVARMVGHISYLSEKGMQEKFGRKLQEKADYEFSFNADFQVESYLRHQGYAFVERFDANSILYITRAMDYFDLSKQFKGGLVEAFKNQKTKFLVISFSSDWLYTTKENKDIVIALNASGADVSYSEIITDKGHDSFLLNEPEFLKTLKGFVDTMYEKFKNEKRI

SEQ ID NO: 113231 - protein, 313 aa, Unknown
  Bacterial polypetide isolated from the Sargasso Sea
MPSLAGLFFWMNIKLENIKKLDVKKPLKLDCGKTISNFPLAYETYGKLNKNKDNAILVFHALTGDQYVTGTNPITNKEGWWITAVGPGKAIDTNKYFVICANVIGGCMGSLGPRNINPKTNQPYGLDFPVITIKDMVRAQESLLDHLGIKKLLCATGGSMGGMQLLQFCVTFPDKTFSAIPIACSSSHSAQNIALNELARQAIMADPVWENGKYVLKNVQPKNGLAVARMVGHISYLSEKGMQEKFGRKLQEKADYEFSFNADFQVESYLRHQGYAFVERFDANSVLYITRAMDYFDLSKQFKGGLIEAFKNQ

SEQ ID NO: 113232 - protein, 296 aa, Unknown
  Bacterial polypetide isolated from the Sargasso Sea
FYNDPESLLLESGQIINGHDIAYKTYGSLNSKKDNAILICHALSGDQYVASQHPITKKEGWWERMVGKDKPIDTNRFFVICINVLGGCMGSTGPASINPETSKVFAVNFPIITIADMVKAQVRLIDNLEIEKLVSVIGGSMGGMQALEWAASYPERLKSAIPIATSSRHTAQNIAFHELGRQAIMADVNWNSGNYKDKNTNPSKGLSIARMTAHVTYLSEASLTKKFGRKLQDKKDLGFGFDADFQIESYLRHQGHTFVDRFDANSYLYITRAMDYFDLEKTHKKSLTEIYANTNL

SEQ ID NO: 113233 - protein, 321 aa, Unknown
  Bacterial polypetide isolated from the Sargasso Sea
NKMKSILIEKTLKLDCGKEISNFPLAYETYGNLNEKKDNAILIFHALTGDQYASGINPITKKEGWWNYAVGPGKSFDTDKFFVICANVIGGCMGSYGPGTIDPLTNKPIGTNFPVITINDMVNAQYNLLDYFKIEKLFAVAGGSMGGMQVLQFVSNFPNKARVALPIACTASHSAQNIAFNELGRQAIMSDSNWKEGLYDEKSTNPDKGLAVARMAAHITYLSKQGLQEKFGRNLQERSDLKFGFDADFQIESYLRYQGSVFVDRFDANSYLYITRAMDYFDLTKQFGGNLSKAFKNTKTKFFIISFTSDWLYPTSENKDI

SEQ ID NO: 113234 - protein, 294 aa, Unknown
  Bacterial polypetide isolated from the Sargasso Sea
WDDMVGPNKAFDTNKYFIVGCNNLGGCHGSTGPNSINPENNIAYGSSFPMVTVEDWVKSQDLLRTHLGLPYWYAVVGGSLGGMQALQWSIDYPDLVKKIVVIAAAAKLSAQNIAFNEIARQAILADPNYNSEDKLPKTGLGLARMLGHITYLSDDAMREKFGRDMKKGEVNFSYDVEFEVESYLRYQGESFSNRFDAHTYLLMTKVLDYFDPAESHEGDLAKTLNSVTAKTLLIAFSSDWRFSPERSRELADAFIEAEKDVSFLEIDSPHGHDAFLMPSETYDSAIETFLEKNE

SEQ ID NO: 113235 - protein, 275 aa, Unknown
  Bacterial polypetide isolated from the Sargasso Sea
VCHALSGNHHVAGLHKGDEKPGWWDNMIGSGKPINTDKLFVVCMNNLGGCHGSTGPTSINEETNNPYGFEFPIVTVQDWVNSQKVLMDEFGIDKWQFIIGGSLGGMQALQWSLDYPDNVNNAIIIAASPKLTAQNIAFNEVARQAITSDPDWCGGNYIKENKIPKRGLALARMLGHITYLSDESMAKKFGRDLKQDKINFNFDVEFQIESYLRYQGEKFVTSFDANTYLLMTKALDYFDPFNETDFIERMSKSRSRFLGISFTSDWRFPPRESEE

SEQ ID NO: 113236 - protein, 209 aa, Unknown
  Bacterial polypetide isolated from the Sargasso Sea
NIIHIAGALKHSAQNIAFHEVGRQAIMSDPIWKNGKYFENNEVPERGLSVARMIAHITYLSENAMHRKFGRKLQSRDIISFGFDADFQVESYLRYQGKSFVERFDANSYLYLTRAMDYFDHDETFRKNIEFSHNPNNHLKYLIVSFTSDWLFPTIESKMIVNQLNSLSREVSFLEIDTDKGHDSFLLEEPQLDDVIKGFLTNNFAKIDE

SEQ ID NO: 113237 - protein, 303 aa, Unknown
  Bacterial polypetide isolated from the Sargasso Sea
MVVPQVAHFSEPLALACGRSLPAYDLIYETYGQLNATASNAVLICHALSGHHHAAGFHSVDDRKPGWWDSCIGPGKPIDTNKFFVVSLNNLGGCNGSTGPSSLNPETGKPFGADFPVLTVEDWVHSQARLADLLGISQWAAVIGGSLGGMQALQWTITYPDRVRHCLAIASAPKLSAQNIAFNEVARQAILTDPEFHGGSFQEAGVIPKRGLMLARMVGHITYLSDDSMGEKFGRGLKSEKLNYDFHSVEFQVESYLRYQGEEFSGRFDANTYLLMTKALDYFDPAANHDDDLAKTFEHATAK

SEQ ID NO: 113238 - protein, 283 aa, Unknown
  Bacterial polypetide isolated from the Sargasso Sea
MGDQFVTGINPVTKKDGWWSFAVGPNKAIDTNKYFVICANVIGGCMGSFGPSDENPETKKIYGTDFPVITINDMVNAQVNLLDHFGIKKLFSVVGGSMGGMQVLQFVSNYPDKTKTAIPIACTSSHSAQNIAFNELGRQAIAADHNWLDGKYSSKNIVPDKGLAVARMAAHITYLSKKGLQEKFGRKLQERDDLKFGFDADFQIESYLRYQGSVFVDRFDANSYLYITRAMDYFDLAKQFKGNLSDAFINTKAKFFIISFTSDWLYPTQENKDIVIALNSIGA

SEQ ID NO: 113239 - protein, 214 aa, Unknown
  Bacterial polypetide isolated from the Sargasso Sea
MKNKFDENSVGIVAPRTVEIKQKLDLDCGKILENFSLIYETYGKLNKDKTNAILICHALSGDHHAAGFHEVDDKKPGWWDSCIGPGKPFDTNRFFIVSLNNLGGCMGSTGPNSINIKTGSEYGPDFPIVTVNDWVKSQKLLADFLEIESWACVIGGSLGGMQALQWTITYPEKIKNSIIIAAAAKLSAQNIAFNEVARQAIITDPEFHDGRYNN

SEQ ID NO: 113240 - protein, 195 aa, Unknown
  Bacterial polypetide isolated from the Sargasso Sea
MNEEHKKNDCLFYNDPESLLLESGQIINGHDIAYKTYGTLNSKKDNAILICHALSGDQYVASPHPITKKEGWWERMVGKDKPIDTSRFFVICINVLGGCMGSTGPASINPETNKVFAVNFPIITIADMVKAQVRLIDNLRIEKLVSVIGGSMGGMQALEWAASYPERLKSAIPIATSARHTAQNIAFHELGRQAI

SEQ ID NO: 113241 - protein, 272 aa, Unknown
  Bacterial polypetide isolated from the Sargasso Sea
RTYGKLDQNKTNAILVFHALSGDQFVTGINKVTGKDGWWNLVVGANKPIDTNKYFVICANVIGGCMGSTGPKEICKETGKPYGLNFPVITIKDMVKAQAYLLDHLGIKKTLSVLGGSMGGMQALQFCSIFPDRTFTAVPIACAASHSAQNIAFNELARQAIMADPEWDSGNYISSGKVPRKGLAIARMAGHISYLSEQGLQNKFGRKLQEDKGLQFSFDADFQVESYLKYQGYSFVDRFDANSYLYITRAMDYFDLYKENNGNLSLAFKNSK

SEQ ID NO: 113242 - protein, 293 aa, Unknown
  Bacterial polypetide isolated from the Sargasso Sea
FIICANVIGGCMGSSGPNEINPSTNKPYGLDFPVITIKDMVSAQAHLLDFLGVKKTLSVLGGSMGGMQALQFCSLFPDRTFSAVPIACAASHSAQNIAFNELARQAIMADPNWDSGNYFLSGKIPRNGLAVARMAGHISYLSEQGLQNKFGRKLQEGEGLNFSFDADFQVESYLKYQGYAFVDRFDANSYLYITRAMDYFDLYRLNNGDLSKAFKDTKVKFCIISFSTDWLYPTQESKKIVIALNSIGAQVSFVNIITNNGHDSFLVEEPEFFQTLKGFLDSTYEDFKNENSR

SEQ ID NO: 113243 - protein, 158 aa, Unknown
  Bacterial polypetide isolated from the Sargasso Sea
MSELPADSVGLVTPQRHTFTEPLPLACGRALPSYELVYETYGELNASASNAVLICHALSGHHHAAGYHSMDERKPGWWDNCIGPGKAIDTNRFFVVSLNNLGGCHGSTGPSSINPETGNSYGASFPVLTVEDWVHSQARLADVLGITQWAAVVGGSLG

SEQ ID NO: 113244 - protein, 301 aa, Unknown
  Bacterial polypetide isolated from the Sargasso Sea
WNYAVGPGKSFDTDKFFVICANVIGGCMGSYGPGTIDPLTNKPIGTNFPVITINDMVNAQYNLLDYFKIEKLFAVAGGSMGGMQVLQFVSNFPNKARVALPIACTASHSAQNIAFNELGRQAIMSDTNWKEGLYDEKSTNPDKGLAVARMAAHITYLSKQGLQEKFGRNLQERSDLKFGFDADFQIESYLRYQGSVFVDRFDANSYLYITRAMDYFDLTKQFGGNLSKAFKDTKTKFFIISFTSDWLYPTSENKDIVIALNAIGADVGFVEIKTDKGHDSFLLDVPDFLSTIKNYLNTTYS

SEQ ID NO: 113245 - protein, 314 aa, Unknown
  Bacterial polypetide isolated from the Sargasso Sea
ASGINPVTNKEGWWNHAVGAGKPFDTDKFFVICTNVIGGCMGSYGPNTIDSNTKISIGTNFPVITINDMVNAQYNILDFFKIEKLFAVTGGSMGGMQVLQFVSNFPDKAQVAIPIACTASHSAQNIAFNELGRQAIMADENWKNGLYEKNNNNPDKGLAVARMAAHITYLSKKGLQEKFGRKLQESEDVKFGFDADFQIESYLRYQGSMFVDRFDANSYLYITRAMDYFDLTKQFGGNLSKAFEKSKTKFFIISFTSDWLYPTSENRDIVIALNAIGADVGFVEIKSDKGHDSFLLNVPDFLDTLKKLLKKQLT

SEQ ID NO: 113246 - protein, 259 aa, Unknown
  Bacterial polypetide isolated from the Sargasso Sea
GTDFPVITINDMVNAQINLLDFFGIKKLFSVVGGSMGGMQVLQFISNFPDKSKTVIPIACTSSHSAQNIAFNELGRQAITADHNWKDGKYILQNTVPDKGLAVARMAAHITYLSKKGLQEKFGRKLQERDDLKFGFDADFQIESYLRYQGSVFVDRFDANSYLYITRAMDYFDLVKQHNGNLSNAFKNTQAKFFVISFTSDWLYPTQENKDIVIALNAIGANVGFVEIKSDKGHDSFLLDVPDFLKALKNFLDKSYLEE

SEQ ID NO: 113247 - protein, 273 aa, Unknown
  Bacterial polypetide isolated from the Sargasso Sea
FPLAYETYGSLFENKDNAILVFHALTGDQFVTGINPITKKDGWWSYAVGPNKSIDTNKYFVICANVLGGCMGSFGPSHENPKTKMIYGTDFPVITINDMVNAQVNLLDFFGIKKLFSVVGGSMGGMQVLQFVSNFPNKAKTAIPIACTSSHSAQNIAFNELGRQAIAADHNWLDGKYTSKNTVPDKGLAVARMAAHITYLSKKGLQEKFGRKLQERDDLKFGFDADFQIESYLRYQGSVFVDRFDANSYLYITRAMDYFDLIKQFNGNLSNAF

SEQ ID NO: 113248 - protein, 163 aa, Unknown
  Bacterial polypetide isolated from the Sargasso Sea
RHGLSVARMIAHITYLSEGAFQKKFGRDMQSKVLSWGFDADFQVESYLRHQGTSFVDRFDANSYLYITRAMDYFDLTESYNGNLSQAFKKTKCKFLIISFTSDWLFPSSESQHIVKALNKTAADVSYIEIESDKGHDSFLLEVNDFYDILTGFISGAARKLNI

SEQ ID NO: 113249 - protein, 273 aa, Unknown
  Bacterial polypetide isolated from the Sargasso Sea
NSKKDNAILVFHALTGDQFVTGINPATNKEGWWSYAVGPDKAIDTNKYFVICSNVIGGCMGSYGPSHKDPDQKIFGTNFPVITINDMVNAQYNLLDHFGIDKLFSITGGSMGGMQVLQFISNFPDKSKTVIPIATTSSHSAQNIAFNELGRQAITADSNWKDGNYTSNETNPGKGLAVARMAAHITYLSKKGLQEKFGRKLQEREDLKFGFDADFQIESYLRYQGSVFVDRFDANSYLYITRAMDYFDLAKQFNGNLSEAFKNTNAKFFIISF

SEQ ID NO: 113250 - protein, 116 aa, Unknown
  Bacterial polypetide isolated from the Sargasso Sea
GRQAIKSDPIWKNGKYFENNEVPERGLSVARMIAHITYLSENAMHRKFGRKLQSRDIISFGFDADFQVESYLRYQGKSFVERFDANSYLYLTRAMDYFDHDETFRKNIEFSHNPNN

SEQ ID NO: 113251 - protein, 201 aa, Unknown
  Bacterial polypetide isolated from the Sargasso Sea
LHEVARQSILTDPNFHGGRYYLHDTYPRQGLILARMVGHITYLSEDAMRMKFGRDLRAGRFHFGFDVEFQVESYLRHQGEVFSRNFDANTYLLMTKALDYFDPAREFDNSLETALAKPECKFLVMSFTSDWRFAPERSREIVNGLVHAGRDVSYAEIDTPKGHDAFLLDIPEYTKLFGAYMHRVANEVENGVNNVEAGNHA

SEQ ID NO: 113252 - protein, 287 aa, Unknown
  Bacterial polypetide isolated from the Sargasso Sea
ALTGDQFVTGINPVTNKEGWWSYAVGPDKAIDTNKYFVICSNVIGGCMGSYGPSHKDPDQKIFGTNFPVITINDMVNAQYNLLDHFGIDKLFSITGGSMGGMQVLQFISNFPDKSKTVIPIATTSSHSAQNIAFNELGRQAITADSNWKDGNYTSNDTNPGKGLAVARMAAHITYLSKKGLQEKFGRKLQEREDLKFGFDADFQIESYLRYQGSVFVDRFDANSYLYITRAMDYFDLAKQFNGNLSEAFINTNAKFFIISFTSDWLYPTQENKDVVIALNSIGADVG

SEQ ID NO: 113253 - protein, 240 aa, Unknown
  Bacterial polypetide isolated from the Sargasso Sea
SRFFVICINVLGGCMGSTGPASINPETNKVFAVNFPIITIADMVKAQVRLIDSLEIEKLVSVIGGSMGGMQALEWAASYPERLKSAIPIATSSRHTAQNIAFHELGRQAIMADVNWNSGNYRDKNTNPSKGLSIARMTAHVTYLSEASLTKKFGRKLQDKTDLGFGFDADFQIESYLRHQGHTFVDRFDANSYLYITRAMDYFDLEKTHKKSLTEIYANTNLKFLIVSFTGDWLYPTSEN

SEQ ID NO: 113254 - protein, 119 aa, Unknown
  Bacterial polypetide isolated from the Sargasso Sea
MNKLDNSVGLVIEKSFKEPNPFLLKSGLTLPEFEIIYETYGELNQKKSNAILICHALSGHHHAAGYHSPKDQKPGWWDSCIGPGKPIDTNKFFVVSLNNLGGCHGSTGPSSINPETGEI

SEQ ID NO: 113255 - protein, 233 aa, Unknown
  Bacterial polypetide isolated from the Sargasso Sea
FAVIGGSMGAMQVLQWTVDFPENLNNAIHIAGALKHSAQNIAFHEVGRQAIMNDPTWKSGNYNVNEKPEMGLAVARMIAHITYLSDDAMHRKFGRKLQSRDIISFGFDADFQVESYLRYQGRSFVDRFDANSYLYLTRAMDYFDLTDKFNQSIEFSLKPNNHINYLIISFTSDWLFPTRENKRIVDKLNYNTRKVSFTEIETDKGHDSFLLDEIELDKTISGFLNSNFEKMTK

SEQ ID NO: 113256 - protein, 257 aa, Unknown
  Bacterial polypetide isolated from the Sargasso Sea
MDIIKEHKLSIDIPLKLKSGKTLNSYDLVYETYGQLNDNKDNAVLICHALSGNHHVAGYHEGDNKPGWWDNMIGSGKPINTNKLFVVCVNNIGGCHGSTGPASINTETGTNYGFDFPVVTVQDWVNSQKVLMDNLDINKWQFVVGGSLGGMQAFQWALDFPDYIDNAIIIAAAPKLTAQNIAFNEVARQAIMNDPDWCGGNYLKEDKIPKRGLALARMLGHITYLSDKSMAEKFGRDLKQEKIGFNFDVEFQIKSYL

SEQ ID NO: 113257 - protein, 291 aa, Unknown
  Bacterial polypetide isolated from the Sargasso Sea
MKREDLGIVKPKIFRHEADLALESGKSLSAFELIYETYGELNENRSNAILVCHALSGNHHSAGFHEGDAKPGWWDNLIGPDKAIDTNKFYVVSPNNLGGCHGSTGPSSINPETNKVYGPDFPVLTVEDWVNSQALLAQQLGIEVWHAVIGGSLGGMQALQWAISYPNKIKKSCVIAAASKLSAQNIAFNEVARQAITSDPDFQNGNYLANDTSPRRGLRLARMVGHITYLSDESMKEKFDRDLKEEELGYGFDVDFQVESYLRHQGDSFSRSFDANTYLLMTKILDYFDPA

SEQ ID NO: 113258 - protein, 237 aa, Unknown
  Bacterial polypetide isolated from the Sargasso Sea
MGSYGPSHKDPDQKIFGTNFPVITINDMVNAQYNLLDHFGIDKLFSITGGSMGGMQVLQFISNFPDKSKTVIPIATTSSHSAQNIAFNELGRQAITADSNWKDGNYTSNDTNPGKGLAVARMAAHITYLSKKGLQEKFGRKLQEREDLKFGFDADFQIESYLRYQGSVFVDRFDANSYLYITRAMDYFDLAKQFNGNLSEAFINTNAKFFIISFTSDWLYPTQENKDIVIALNSIGA

SEQ ID NO: 113259 - protein, 296 aa, Unknown
  Bacterial polypetide isolated from the Sargasso Sea
KEISNFPLAYETYGNLNEKKDNAILVFHALTGDQFASGQNPVTNKEGWWNYAVGPGKAFDTKKFFVICANVIGGCMGSYGPGTIDPTTNKPIGTNFPVITINDMVNAQHNLLDHFKIERLFAVAGGSMGGMQVLQFVSNFPNKAKVALPIACTASHSAQNIAFNELGRQAIMSDINWKDGLYDGKKSNPDKGLAVARMAAHITYLSKKGLQEKFGRNLQERSDLKFGFDADFQIESYLRYQGSVFVDRFDANSYLYITRAMDYFDLTKQHGGNLSKAFKESKTKFFIISFTSDWLY

SEQ ID NO: 113260 - protein, 243 aa, Unknown
  Bacterial polypetide isolated from the Sargasso Sea
YNLLDHFGIDKLFSITGGSMGGMQVLQFISNFPDKSKTVIPIATTSSHSAQNIAFNELGRQAITADSNWKDGNYTSNDTNPGKGLAVARMAAHITYLSKKGLQEKFGRKLQEREDLKFGFDADFQIESYLRYQGSVFVDRFDANSYLYITRAMDYFDLAKQFNGNLSEAFKNTNAKFFIISFTSDWLYPTQENKDIVIALNSIGADVGFVEIESDKGHDSFLLDVPEFLSALKNFLDKSYEEN

SEQ ID NO: 113261 - protein, 288 aa, Unknown
  Bacterial polypetide isolated from the Sargasso Sea
KYFVICSNVIGGCMGSYGPSHKDPDQKIFGTNFPVITINDMVNAQYNLLDHFNIDKLFSITGGSMGGMQVLQFISNFPSKSKTVIPIATTSSHSAQNIAFNELGRQAITADSNWKDGNYTSNETNPGKGLAVARMAAHITYLSKKGLQEKFGRKLQEREDLKFGFDADFQIESYLRYQGSVFVDRFDANSYLYITRAMDYFDLAKQFKGNLSEAFINTKAKFFIISFTSDWLYPTQENKDIVIALNSIGADVGFVEIESDKGHDSFLLDVPDFLSALKNFLDKSYEEN

SEQ ID NO: 113262 - protein, 295 aa, Unknown
  Bacterial polypetide isolated from the Sargasso Sea
ELLLECGQTLKNIELTYETYGELNSDASNAILICHALSGNHHAAGYYKDKNERLGWWDALIGPNKAIDTNKYFVVCPNNIGGCHGSTGPSSINPVTQRYYGPEFPVLTVKDWVNSQAELADYLNIKCWHAAIGGSLGGMQALEWSRLFPDRISKAAVIAAAPKLSAQNIAFNEVARQAIITDPDFQEGNYLDSEKSPKRGLRLARMVGHITYLSDEAMRDKFGRELKEGKLNFGFDVEFEVESYLRHQGDVFSESFDANTYLLMTKLLDYYDPAEKYEGDLVRAFETINSKIMVI

SEQ ID NO: 113263 - protein, 266 aa, Unknown
  Bacterial polypetide isolated from the Sargasso Sea
EVAYKTFGKLNRDKSNAILVCHALSGDQFCSGINPLTKKRGWWSILIGPGKVIDTNIFYVICSNVLGGCMGSSGPSSKNPKTKKEYGLNFPVITISDMVKVQEKLISKLGIKRLFAVIGGSMGGMQTLEWATKFNSKINAAIPIATSYRHSAQNIAFHEIGRQAIMADPGWNRGNYYKKKIGPRRGLSVARMIAHITYLSEHALQRKFGRNLQNSDFFSFNFDTDFQIESYLKHQGSSFVERFDANSYLYITKAMDYFDLSMKKGG

SEQ ID NO: 113264 - protein, 279 aa, Unknown
  Bacterial polypetide isolated from the Sargasso Sea
MIIEKPLKLDCGQTISNFPLAYETFGTLNENKDNAILVCHALTGDQFVTGINPITKKDGWWTYAVGPNKSIDTNKYFVICANVLGGCMGSFGPSHENPKTKKIYGTDFPVITINDIVNAQVNLLDFFGIDKLFSVVGGSMGGMQVLQFVSNFPNKARTAIPIACTSNHSAQNIAFNELGRQAITADHNWLDGNYNLKNTVPDKGLAVARMAAHITYLSKKGLQEKFGRKLQERDDLKFGFDADFQIESYLRYQGSVFVDRFDANSYLYITRAMDYFDLV

SEQ ID NO: 113265 - protein, 239 aa, Unknown
  Bacterial polypetide isolated from the Sargasso Sea
SQSLLSDSLGIEKWHAVVGGSLGGMQALEWSRLFPDKIKKAGIIAAAPKLSAQNIAFNEVARQAILNDPDFVAGRYLDTGKSPKQGLKLARMVGHITYLSEEAMKSKFGRDLKEEKLNFVYDAEFEIESYLRYQGDVFSENFDANTYLLMTKILDYFDPADDHHGDLAKAFEPIEAQLLVVSFTTDWRFAPERSREIVNALIAAKKRVSYLEIDSPHGHDSFLFAEEDYTNGLSSFLEN

SEQ ID NO: 113266 - protein, 252 aa, Unknown
  Bacterial polypetide isolated from the Sargasso Sea
INDMVNAQYNLLDHFGIDKLFSVTGGSMGGMQVLQFISNFPDKSKTVIPIATTSSHSAQNIAFNELGRQAITADSNWKDGDYTSKETNPGKGLAVARMAAHITYLSKKGLQEKFGRKLQEREDLKFGFDADFQIESYLRYQGSVFVDRFDANSYLYITRAMDYFDLAKQFKGNLSEAFINAKAKFFIISFTSDWLYPTQENKDIVIALNSIGADVGFVEIESDKGHDSFLLDVPDFLSALKNFLDKSYEENK

SEQ ID NO: 113267 - protein, 310 aa, Unknown
  Bacterial polypetide isolated from the Sargasso Sea
MQSSLPKNSVGLVKPSKVHFEEKLLLASGSSLNGFDLVYETYGELNAECSNAILICHALSGDHHVAGYHTPEDKKPGWWDNAIGPNKVIDTNKFFVVCPNNIGGCGGSTGPLASNPDTGELYGPNFPLVTVKDWVKTQVMLADHLGIETWAVIIGGSLGGMQCMEWSITYPNRLKHTFVIAAAPKLSTQNIAFNEVARQVIRSDRDFNDGYYYKNDNKPTHGLMQARMLGHITYLSDDALDEKFGRQLRDGEIKFGYDVEFQIESYLRYQGRSFVDRFDANSYLLITKVLDYFDPAAETDGNLAEAMSPC

SEQ ID NO: 113268 - protein, 254 aa, Unknown
  Bacterial polypetide isolated from the Sargasso Sea
NKFFVVCPNNIGGCHGSLGPNSINHDTGDYYGPDFPIITVRDWVNSQAKLSDLLGIEKWHAVMGGSLGGMQALEWSYLYPKRIKKAGIIAAAPKLSAQNIAFNEVARQAILNDPDFEGGRYLDKSKYPKQGLKLARMVGHITYLSEEAMRSKFGRELKKEKLNFGYDAEFEIESYLRYQGDVFSESFDANTYLLMTKILDYFDPASNFEGKLVSAFESIEAQLLVVSFSTDWRFAPERSKEIVNALIEAKKNVS

SEQ ID NO: 113269 - protein, 256 aa, Unknown
  Bacterial polypetide isolated from the Sargasso Sea
KDGWWSFAVGPNKSIDTNKYFVICANVIGGCMGSFGPNHENPKTKKNYGTDFPVITINDMVNAQVNLLDHFGIKKLFSVAGGSMGGMQVLQFVSNFPDKAKTAIPIACTSSHSAQNIAFNELGRQAIAADHNWLDGKYTSKNTVPDKGLAVARMAAHITYLSKKGLQEKFGRKLQERDDLKFGFDADFQIESYLRHQGSVFVDRFDANSYLYITRAMDYFDLVKQFDGNLSNAFKNTKTKFFIISFTSDWLYPTQE

SEQ ID NO: 113270 - protein, 172 aa, Unknown
  Bacterial polypetide isolated from the Sargasso Sea
MKLKIESEVLKFKKLVRLDSGKRINSCEIAFKTYGNLNKNKTNAILVCHALSGDQYCAGMNPHTNKKGWWNVLIGPGKVIDTNIFFVICSNVLGGCMGSTGPSSLKPKTKTRYGLQFPVITISDMVRLQEKLITYLGIKKLFAVIGGSMGGMQVLEWAAKFNNKINAAIPIA

SEQ ID NO: 113271 - protein, 304 aa, Unknown
  Bacterial polypetide isolated from the Sargasso Sea
CWRNKPIDTNKFFVICANVIGGCMGSYGPSTINESTGKQIGTDFPIITINDMVNAQFELIKYLEIEKLFAVVGGSMGGMQVLQFVANFPDKAKLAIPIACTSSHSAQNIAFNELGRQAIMADSKWENGFYSNYKLNPDKGLAVARMAAHITYLSEKGLQEKFGRKLQDRDSLRYGFEADFQIESYLRYQGSVFVDRFDANSYLYITRAMDYFDLSKQYKGNLSDAFKKSKTKFFVISFTSDWLYPTSENREIVIALNSIGADVGFVEIESDKGHDSFLLDVPSFLKTLGDYINSTYKVINERRI

SEQ ID NO: 113272 - protein, 318 aa, Unknown
  Bacterial polypetide isolated from the Sargasso Sea
MKTKFTTDTKLESEIAYFENINLKLESGDIINSFKLAFKTFGKLNTDKTNAILVCHALTGDQYVAGNNPITGREGWWSRMVGPNKPIDTNKFFVICSNVLGGCAGSTGPKELQNGSDVTYGSNFPSVTIKDMVKTQSLLIESLNIEKLFSVIGGSMGAMQALQWSIDFPDKILNIIHIAGALKHSAQNIAFHEVGRQAIMNDPIWKNGKYFENKEVPERGLSVARMIAHITYLSEDAMHRKFGRKLQSRDIISFGFDADFQVESYLRYQGKSFVERFDANSYLYLTRAMDYFDHDETFRKNVEFSHNPNNHLKYLIVS

SEQ ID NO: 113273 - protein, 306 aa, Unknown
  Bacterial polypetide isolated from the Sargasso Sea
MDGGLFAVGPNKSIDTNKYFVICANVIGGCMGSFGPSHENPETKKIYATDFPIITINDMVNAQVNLLDHFGIKKLFSVAGGSMGGMQVLQFVSNFPDKTKTAVPIACTYSHSAQNIAFNELGRQAITADHNWLDGKYTSKNTIPEKGLAVARMAAHITYLSKKGLQEKFGRKLHERDVLKFGFDADFQIESYLRYQGSVFVDRFDANSYLYITRAMDYFDLAKQFDGNLSNAFKNTKTKFFIISFTSDWLYPTQENKDIVIALNAIGADVGFVEIKSDKGHDSFLLDVPDFLKALKNFLDKSYTGQ

SEQ ID NO: 113274 - protein, 175 aa, Unknown
  Bacterial polypetide isolated from the Sargasso Sea
MGTSADISGDQSRNQEEQKLAFEMVTFQSSQPLRLDSGEDLYPVVQAYNTYGTLNADNSNAVLVCHALTLDQHAANVHPATGKEGWWQGMIGPGCPIDTNRFFVICPNVVGGCQGTTGPESINPETGKPYGLDFPVITIADMVRAQVQLIDHLGIDKLFCVAGGSMGGMQTLEWA

SEQ ID NO: 113275 - protein, 229 aa, Unknown
  Bacterial polypetide isolated from the Sargasso Sea
MGSYGPGTIDPKTNKPIGTNFPVITINDMVNAQHNLLDYFKIERLFAVAGGSMGGMQVLQFVSNFPNKARVALPIACTASHSAQNIAFNELGRQAIMSDTNWKDGLYDGKTINPDKGLAVARMAAHITYLSKKGLQEKFGRNLQERSDLKFSFDADFQIESYLRYQGSVFVDRFDANSYLYITRAMDYFDLTKQHGGNLSRAFKIVRQNFSLFLLLQIGYIQLLKIKTL

SEQ ID NO: 113276 - protein, 302 aa, Unknown
  Bacterial polypetide isolated from the Sargasso Sea
MNNKDNIKTLTINKPLKLDCGKTINNFPLAYETYGSLNKDKNNAILVFHALTGDQFVTGINPVTNKDGWWSYAVGPGKSIDTEKYFVICANVIGGCMGSFGPSHQNPETKKKYGTDFPVITINDMVNAQINLLDHFDIKKLFSVVGGSMGGMQVLQFVSNYPDKTKTAVPIACTSSHSAQNIAFNELGRQAIAADHKWQDGEYLSKNTIPDKGLAVARMAAHITYLSKKGLQEKFGRKLQERDDLKFGFDADFQIESYLRYQGSVFVDRFDANSYLYITRAMDYFDLIKQNNGNLSNAFKNT

SEQ ID NO: 113277 - protein, 224 aa, Unknown
  Bacterial polypetide isolated from the Sargasso Sea
QALQFCSIFPDRTFTAVPIACAASHSAQNIAFNELARQAIMADPEWDSGNYISSGKVPRKGLAIARMAGHISYLSEQGLQNKFGRKLQEDKGLQFSFDADFQVESYLKYQGYSFVDRFDANSYLYITRAMDYFDLYKENNGNLSLAFKNSKIKYCIISFSTDWLYPTSESKKIVIALNSIGAEVSFVNIVTNNGHDSFLVDEPKFLETLKGFIDSSYEDFKNEN

SEQ ID NO: 113278 - protein, 246 aa, Unknown
  Bacterial polypetide isolated from the Sargasso Sea
LLEHFKIDKLFAVIGGSMGGMQVLQFVSNFPDKAHIAIPIACTSSHSAQNIAFNELGRQAILADTNWKNGLYEQNKTSPDKGLAVARMAAHITYLSKKGLQEKFGRKLQERDDLKFSFDADFQIESYLRYQGSVFVDRFDANSYLYITRAMDYFDLSKQFNGNLSAAFSNTTSKFFVISFTSDWLYPTGENREIVIALNAIGADVGFVEIESDKGHDSFLLDVPDFLDTLGNYLKTNYKTVNEKRI

SEQ ID NO: 113279 - protein, 313 aa, Unknown
  Bacterial polypetide isolated from the Sargasso Sea
KKEGWWNYAVGPGKSFDTDKFFVICANVIGGCMGSYGPGAIDPLTNKPIGTNFPVITINDMVNAQYNLLDYFKIEKLFAVAGGSMGGMQVLQFVSNFPNKAKVALPIACTASHSAQNIAFNELGRQAIMSDSNWKEGLYNEESTNPDKGLAVARMAAHITYLSKQGLQEKFGRNLQERSDLKFGFDADFQIESYLRYQGSVFVDRFDANSYLYITRAMDYFDLTKQYGGNLSKAFKDTKTKFFIISFTSDWLYPTSENKDIVIALNAIGADVGFVEIKTDKGHDSFLLDVPDFLSTIKNYLNTTYSNINERRI

SEQ ID NO: 113280 - protein, 279 aa, Unknown
  Bacterial polypetide isolated from the Sargasso Sea
NLVVGENKPIDTKKYFVICANVIGGCMGSTGPKEICEGTGKPYGLSFPVITIKDMVKAQAYLLDHLGIKKTLAVLGGSMGGMQALQFCSLYPDKTFTAVPIACAASHSAQNIAFNELARQAIMADPEWDAGNYISAGKVPRKGLAIARMAGHISYLSEQGLQNKFGRKLQEDKGLQFSFDADFQVESYLKYQGYSFVDRFDANSYLYITRAMDYFDLYKANNGNLSLAFKNTKIKFCIISFSTDWLYPTSESKKIVIALNSIGAEVSFVNIVTNNGHDS

SEQ ID NO: 113281 - protein, 257 aa, Unknown
  Bacterial polypetide isolated from the Sargasso Sea
MNKLDNSAGLVIEKSFKEPNPFLLKSGLTLPGFEIVYETYGELNYKKSNAILICHALSGHHHAAGYHSPEDQKPGWWDSCIGPGKPIDTNKFFVVSLNNLGGCHGSTGPSSINPETGEIYGSDFPSVAVEDWVKSQTMLSDYLGIQKYAAIIGGSLGGMQAMQWAIDYPERLDNAVVIAAASKLSAQNIAFNEIARHAIETDQDFHSGNYIKYGKRPTHGLMLARMVGHVTYLSDDGMGNKFGRELQNPTEGQDSEF

SEQ ID NO: 113282 - protein, 301 aa, Unknown
  Bacterial polypetide isolated from the Sargasso Sea
LYFAFHALTGDQFCLNINPITKREGWWTTAVGPGKAIDTNKYFVICANVLGGCMGSYGPIEINPETNKLFGTTFPVITIRDMVKAQKYLIEDLGIKKLLSVIGGSMGGMQVLQFTALYPNLAYSAIPIACSASHSAQNIALNELGRQAIMADPNWKKENSSPNKGLAVARMAAHITYLSKKGLQEKFGRKLQEKGSLKFSFDADFQIESYLRYQGATFVDRFDANSYLYITRAMDYFDLEKQFKGNLSLAFKNTKSKFCIISFSSDWLYPTVENKEIVIALNACGANVGFVEINSDKGHDS

SEQ ID NO: 113283 - protein, 309 aa, Unknown
  Bacterial polypetide isolated from the Sargasso Sea
PIAYETYGSLNSKKDNAILVFHALTGDQFVTGINPATNKEGWWSYAVGPDKAIDTNKYFVICSNVIGGCMGSYGPSHKDPNQKIFGTNFPVITINDMVNAQYNLLDHFGIDKLFSITGGSMGGMQVLQFISNFPDKSKTVIPIATTSSHSAQNIAFNELGRQAITADSNWKDGNYTSNETNPGKGLAVARMAAHITYLSKKGLQEKFGRKLQEREDLKFGFDADFQIESYLRYQGSVFVDRFDANSYLYITRAMDYFDLAKQFNGNLSEAFINTNAKFFIISFTSDWLYPTQENKDIVIALNSIGADVG

SEQ ID NO: 113284 - protein, 274 aa, Unknown
  Bacterial polypetide isolated from the Sargasso Sea
GPLTTNPDTGEIYGPNFPLVTVKDWVKTQAMLADHLDIDVWAVVIGGSLGGMQCMEWSIAYPDRLKHTFVIAAAPKLSTQNIAFNEVARQVIRSDRNFNEGYYYKDGNKPIQGLMQARMLGHITYLSDDALDEKFGRQLRDGEIKFGYDVEFQIESYLRYQGRSFVDRFDANSYLLITKVLDYFDPASETNGDLAKAMSPALAEFLIISFSSDWRFSPSRSVEIVGALLETGKRVSYIEIQSKEGHDSFLKEIPIYHQAIKTALNRIAMEIGVS

SEQ ID NO: 113285 - protein, 257 aa, Unknown
  Bacterial polypetide isolated from the Sargasso Sea
FPVITIKDMVKAQKFLLDHLGINKLLAVVGGSMGGMQVLQFCSLYPEKAHSAIPIACSASHSAQNIALNELGRQAIMADSNWKRENATPDKGLAVARMAAHITYLSKKGLQEKFGRKLQDKGSLKFSFDADFQIESYLRYQGATFVDRFDANSYLYITRAMDYFDLEKQFNGNLSAAFKNTKSKFCIISFSSDWLYPTVENKEIVIALNTCGANVGFVEIDSDKGHDSFLLNVPEFLKTLSEFINSTFNEIKNEKRI

SEQ ID NO: 113286 - protein, 294 aa, Unknown
  Bacterial polypetide isolated from the Sargasso Sea
WWSYAVGPGKAIDTNKYFVICSNVIGGCMGSYGPSHKDPNTQSIFGTNFPVITINDMVNAQYNLLDHFGIDKLFCLTGGSMGGMQVLQFISNFPDKSKTVIPIATTASHSAQNIAFNELGRQAITADGNWKNGNYNSNNTNPGKGLAVARMAAHITYLSKKGLQEKFGRKLQEREDLKFGFDADFQIESYLRYQGSVFVDRFDANSYLYITRAMDYFDLTKQFKGNLSEAFRDTKAKFFIISFTSDWLYPTQENKDIVIALNSIGADVGFVEIESDKGHDSFLLDVPNFLNALK

SEQ ID NO: 113287 - protein, 244 aa, Unknown
  Bacterial polypetide isolated from the Sargasso Sea
SYNLLDHFGIDKLFSITGGSMGGMQVLQFISNFPNKSKTVIPIATTSSHSAQNIAFNELGRQAITADSNWKDGNYTSNDTNPGKGLAVARMAAHITYLSKKGLQEKFGRKLQEREDLKFGFDADFQIESYLRYQGSVFVDRFDANSYLYITRAMDYFDLAKQFNGNLSEAFKNTNAKFFIISFTSDWLYPTQENKDIVIALNSIGADVGFVEIESDKGHDSFLLDVPDFLSALKNFLDKSYEEN

SEQ ID NO: 113288 - protein, 252 aa, Unknown
  Bacterial polypetide isolated from the Sargasso Sea
GPNKSIDTNKYFIICANVLGGCMGSFGPSHENPKTKKIYGTDFPVITINDIVNAQVNLLDFFGIEKLFSVVGGSMGGMQVLQFVSNFPDKAKTAIPIACTSNHSAQNIAFNELGRQAITADHNWLDGNYNLKKTVPEKGLAVARMAAHITYLSKKGLQEKFGRKLQERDDLKFGFDADFQIESYLRYQGSVFVDRFDANSYLYITRAMDYFDLVKQFNGNLSNAFKNTKTKFFVISFTSDWLYPTQENKEIV

SEQ ID NO: 113289 - protein, 300 aa, Unknown
  Bacterial polypetide isolated from the Sargasso Sea
MRKITNNTDYPGFLLSCEESLLLDSGKSINKFQIAYQTYGELNSNKDNAILICHALTGDQFPAEESPITKKNGWWDLMVGPNKPIDTNKYFVICSNVLGGCVGTTGPNDINPETSKIYGLDFPTITIRDMVKVQKILIDELGIAKLRSVIGGSMGAMQVLQWAATFPELVKSTVCIAGSLKHSAQNIAFDEAGRQSIMLDPNWNQGRYIEFDQKPENGLSVARMIAHITYLSETAFQNKFGRNLQEKKDLSFGFGIDFQVESYLRYQGRSFVDRFDANSYLYMTRAMDYFDVSEEIKKYQ

SEQ ID NO: 113290 - protein, 239 aa, Unknown
  Bacterial polypetide isolated from the Sargasso Sea
HLAYETYGSLNADRSNAVLVCHALNASHHVAGVYAGQDKSEGWWDNMIGPGKPVDTDRFFVIGVNNLGSCFGSTGPMHPHPDTGEVYGADFPVVTVEDWVNAQARLLDRLGITQLAAVLGGSLGGMQALSWTLQYPERMRHAVVVASAPNLTAENIAFNEVARRAIVTDPDFHGGHFYRHGVIPKRGLRIARMIGHITYLSDDVMNEKFGRQLREGIDLKYSTQDIEFQIESYLRYQGD

SEQ ID NO: 113291 - protein, 158 aa, Unknown
  Bacterial polypetide isolated from the Sargasso Sea
MIAHITYLSEKALQQKFGRKLQSREMISFGFDADFQVESYLRYQGRSFVNRFDANSYLYMTRAMDYFDVTKIFPKSIEFNSQDNSHIHHCIISFTSDWLFPTDENKEIVKILNKHGKKVSFTEIESDRGHDSFLLDVQDFTETVSSFLNGNFKTQRQS

SEQ ID NO: 113292 - protein, 236 aa, Unknown
  Bacterial polypetide isolated from the Sargasso Sea
ICSNVIGGCMGSYGPSHKDPEQNILGTNFPVITINDMVNAQYNLLNHFGINKLFSITGGSMGGMQVLQFISNFPDKSKTVIPIATTSSHSAQNIAFNELGRQAITADNDWKNGDYTSNKTNPGKGLAVARMAAHITYLSKKGLQEKFGRKLQEREDLKFGFDADFQIESYLRYQGSVFVDRFDANSYLYITRAMDYFDLTKQFKGNLSNAFKNTKAKFFIISYTSDWLYPTQENKE

SEQ ID NO: 113293 - protein, 289 aa, Unknown
  Bacterial polypetide isolated from the Sargasso Sea
KELKDIEVCYQTYGTLNEDKSNVILVCHALSGSAHAAFKNETNEYGWWSHYIGPHKAIDTTQFFIISSNVLGSCYGTTGPKSIDKSTGRQYGPNFPIITISDMVTVQKALIDALEIPRLHSVVGGSMGGMQALEWSVSYPDMVKQCVAIASTACVSAQVIAFDTVGRHAITSDKHWKNGDYTRESSPKEGLSIARMIGHITYLSNESIATKFGRNLQQKPDFDYTFENEFQIESYLKYQGDKFVNYFDPNSYLYLTKAIDYFDLTKKHGSLEKAFAATQSKYLLVSINS

SEQ ID NO: 113294 - protein, 297 aa, Unknown
  Bacterial polypetide isolated from the Sargasso Sea
AILICHALTGNSHVTAGDTNEKGWWEPMVGPGKAIDTNKYFVICSNSIGSCKGSTGPATIDPESNKPYGLAFPIITMTDIVNAQHYLLEHLDITCLDAVVGPSMGGMQALLWSMLYPKKLKKCIVIASSASLSPQALAFGTVARNAIISDKEFNQGNYTADSKPKKGLAIGRMIGHITYLSKESITKKFGRKLQSKENYNYDWDTDFQVESYLKHQGDKFVDQFDANSFLYLSKALSYFDLEKQFGSLKKAFQTVDANMLFISISSDWLYPTDLSKEMVSSCMKNNKHVSFCEVQSD

SEQ ID NO: 113295 - protein, 206 aa, Unknown
  Bacterial polypetide isolated from the Sargasso Sea
MNNLTDSVGIVKPQKAVFDSPLQLDCGKELKKIELVYETYGSLNERKDNAVLICHALSGDHHAAGFNSPEDKKPGWWDVCIGPGKPFDTNKFFIVCPNNIGGCKGSSGPNTVNPETGQLYGPSFPIVTVEDWVNTQNLLGDSLGIKKWACIIGGSLGGMQALQWTISFPEKVQNIISVAAASKLSAQNIAFNEVARQSIINDPDFR

SEQ ID NO: 113296 - protein, 303 aa, Unknown
  Bacterial polypetide isolated from the Sargasso Sea
VGPGKSFDTDKFFVICANVIGGCMGSYGPGTIDPLTNKPIGTNFPVITINDMINAQYNLLDYLKIEKLFAVAGGSMGGMQVLQFVSNFPNKARVALPIACTASHSAQNIAFNELGRQAIMSDSNWKEGLYDEKSTNPDKGLAVARMAAHITYLSKQGLQEKFGRNLQERSDLKFGFDADFQIESYLRYQGSVFVDRFDANSYLYITRAMDYFDLTKQFGGNLSKAFKDTKTKFFIISFTSDWLYPTSENKDIVIALNAIGADVGFVEIKTDKGHDSFLLDVPDFLSTIKNYLNTTYSNINERR

SEQ ID NO: 113297 - protein, 238 aa, Unknown
  Bacterial polypetide isolated from the Sargasso Sea
KLFAVIGGSMGGMQVLQFVSNFPDKAHIAIPIACTSSHSAQNIAFNELGRQAILADTNWKNGFYEQNKTSPDKGLAVARMAAHITYLSKKGLQEKFGRKLQERDDLRFSFDADFQIESYLRYQGSVFVDRFDANSYLYITRAMDYFDLSKQFNGNLSDAFSNTASKFFVISFTSDWLYPTAENREIVIALNAIGADVGFIEIESDKGHDSFLLDVPDFLDTLGNYLKTNYKTVNEKRI

SEQ ID NO: 113298 - protein, 290 aa, Unknown
  Bacterial polypetide isolated from the Sargasso Sea
EKAIDTNKYYVLCPNNIGGCHGSTGPSSMNPDTQKFYGPEFPVITVQDWVKSQALLADHLKINCWHAAIGGSLGGMQALEWTRLFPDRILKAAVIAAAPKLSAQNIAFNEVARQAIITDPDYQEGKYLDSDKSPKRGLRLARMVGHITYLSDEAMRDKFGRELKEGKLNFGFDVEFEVESYLRHQGDVFSESFDANTYLLMTKILDYYDPAEGHDGDLVKAFESIKAKVMVISFSSDWRFSPQRSKEIVNALLAAEKEATYLEIESSHGHDSFLFAEDRYVNALSAFLGN

SEQ ID NO: 113299 - protein, 296 aa, Unknown
  Bacterial polypetide isolated from the Sargasso Sea
MNKETKNIKKLIIDQSFELDCGKTIKNFPLAYETYGSLNKNKSNAILAFHALTGDQFCTNINPITKREGWWTTAVGPDKAIDTNKYFVICANVLGGCMGTYGPKEINPETNKIFGTTFPVITIRDMVKAQKYLLDHFGINKLLAVIGGSMGGMQVLQFASLYPDKSYSAIPIACSASHSAQNIALNELGRQAIMADPNWKKENSTPDKGLAVARMAAHITYLSKKGLQEKFGRKLQDKGSLKFSFDADFQIESYLRYQGSTFVDRFDANSYLYITRAMDYFDLEKQFNGSLSLASK

SEQ ID NO: 113300 - protein, 246 aa, Unknown
  Bacterial polypetide isolated from the Sargasso Sea
MKEEIPANSVGLVTPQIAECDTPFTFANGALLGSHELVYETYGELNSAGDNAVLICHALSGSHHAAGFHANDDPRPGWWDLAIGPGKPIDTGRLFVVCSNNLGCCDGSSGPNAINPDTGKPWGGQFPQPQVQDWVRSQKWLAEHLGISRWAAVMGGSLGGMQALQWAIDFPDWVEHCVALAAAPGLTAQNIAFNEIARHAILSDPDWHEGDYLATGALPTRGVALARMVGHLTYMSADGMSDRFGR

SEQ ID NO: 113301 - protein, 145 aa, Unknown
  Bacterial polypetide isolated from the Sargasso Sea
TYLSDDSMRQKFGRDLKEGKLNFSYDVDFQVESYLRYQGKSFVDKFDANTYLLMTKVLDYYDPASRFGGDLSKAFEKSISNYLIVSFTSDWRFSPERSQEIVEALVGAKKNVTYSEIEANNGHDAFLMPIPNYLNILKNFMDSIL

SEQ ID NO: 113302 - protein, 376 aa, Unknown
  Bacterial polypetide isolated from the Sargasso Sea
MNTEKNIKTLIVKKPLKLDCGKTINNFPVAFETYGSLNENKDNAILVFHALTGDQFVTGLNPITKKDGWWSFAVGPDKAIDTNKYFVICSNVIGGCMGSYGPSHKDPETQKTFGTDFPVITINDMVNAQYNLLEHFGIDKLFAITGGSMGGMQVLQFITNFPDKAKTVIPIATTSSHSAQNIAFNELGRQSITADSNWKDGNYEANNTNPGKGLAVARMAAHITYLSKKGLQEKFGRKLQEREDLKFGFDADFQIESYLRYQGSVFVDRFDANSYLYITRAMDYFDLVKQFNGNLSDAFKKTKAKFFVISFTSDWLYPTQENKDIVIALNSIGADVGFVEIVSDKGHDSFLLDVPDFLNALKNFLDKSYTELKNEK

SEQ ID NO: 113303 - protein, 383 aa, Unknown
  Bacterial polypetide isolated from the Sargasso Sea
MKNIELINDKNLDCNFAIFKDANLTLASGSILKNFKLAYKTFGSLNENKTNAVLVCHALTGDQYVSGHNPITGKDGWWARMVGPNKPIDTNKFFVICSNVLGGCAGSTGPKETKENEQNIYGRDFPSVTIKDMVSAQVKLLDALKIAQLFSVVGGSMGAMQALQWSIDFPNRVQSIIHIAGALKHSAQNIAFHEVGRQAIMNDPNWHKGNYTEKNAIPERGLSVARMIAHITYLSEDAMHRKFGRKLQSRDIISFGFDADFQIESYLRYQGRSFVERFDANSYLYLTRAMDYFDHSESYRKTLEFVNNQKNNIKYLVISFTSDWLFPTKENKEIVEILNSLSRNVSFLEIDTDKGHDSFLLDEPELDYVIKGFFNSNYGKINE

SEQ ID NO: 113304 - protein, 381 aa, Unknown
  Bacterial polypetide isolated from the Sargasso Sea
MESIGIVAPQKMHFTEPLLMQNGSSLAGYDLMVETYGTLNAARSNAVLVCHALNASHHVAGVYADNPKDIGWWDNMVGPGKPLDTNRFFVIGVNNLGSCFGSTGPMSIDPATGKPYGATFPVVTVEDWVNAQARVADEFGIARFAAVMGGSLGGMQALAWSMMYPDRVGHCIVVASTPKLSAQNIAFNEVARSAILSDPDFHGGNYYAHNVKPKRGLRVARMIGHITYLSDDDMAEKFGRSLRRAEGAVDAYNFNFDVEFEVESYLRYQGDKFADYFDANTYLLITRALDYFDPAKAFDGDLTAAVAHTTAKYLIASFSTDWRFAPARSRELVKALLDHKRTVTYAEIDAPHGHDAFLLDDARYHNLMRAYYERIANEVNA

SEQ ID NO: 113305 - protein, 284 aa, Unknown
  Bacterial polypetide isolated from the Sargasso Sea
MNEEHKKNDCLFYNDPESLLLESGQIINGHDIAYKTYGTLNSKKDNAILICHALSGDQYVASPHPITKKEGWWERMVGKDKPIDTNRFFVICINVLGGCMGSTGPASIDPETNKVFAVNFPIITIADMVKAQVRLIDNLGIDKLVSVIGGSMGGMQALEWAASYPERLKSAIPIATSSRHTAQNIAFHELGRQAIMADVNWNSGNYKDKNTNPSKGLSIARMTAHVTYLSEASLTKKFGRKLQDKTDLGFGFDADFQIESYLRHQGHTFVDRFDANSYLYITRA

SEQ ID NO: 113306 - protein, 369 aa, Unknown
  Bacterial polypetide isolated from the Sargasso Sea
MNESVGIVEPKKLTLQGKLDLECGQSLTDIEIVYETYGNLNQDSSNAILICHALSGNHHAAGVYEGEKRPGWWDSLIGPGKAIDTNKFYVVCPNNIGGCHGSLGPSSINKETGDYFGPDFPIITVKDWVRSQSLLSDSLGIEKWHAVVGGSLGGMQALEWSRLFPDKIKKAGIIAAAPKLSAQNIAFNEVARQAILNDPDFAAGRYLDTGQSPKQGLKLARMVGHITYLSEEAMKSKFGRDLKEEKLNFVYDAEFEIESYLRYQGDVFSENFDANTYLLMTKLLDYFDPADDHQGDLAKAFEAIEAQLLVVSFTTDWRFAPERSREIVNALIAAKKRVSYLEIDSPHGHDSFLFADEDYTKGLSSFLEN

SEQ ID NO: 113307 - protein, 381 aa, Unknown
  Bacterial polypetide isolated from the Sargasso Sea
MESIGIVAPQTMHFAEPLRLQSGSVIGNYQLVVETYGELNAARSNAVLVCHALNASHHVAGVYADDPRSTGWWDNMVGPGKPLDTNRFFVIGVNNLGSCFGSTGPMSIDPSSGKPYGASFPVVTVEDWVHAQARVADAFGIERFAAVMGGSLGGMQALAWSLMYPERVAHCIDIASTPKLSAQNIAFNEVARSAILSDPDFHGGDYYAHGVKPKRGLRVARMIGHITYLSDDDMAEKFGRALRRADGALDAYNFSFDVEFEVESYLRYQGDKFADYFDANTYLLITRALDYFDPAKAFDGNLTAALAHTQAKYLIASFSTDWRFAPARSREIVKALLDNKRTVSYAEIDAPHGHDAFLLDDARYHNLIRAYYERIANEVGA

SEQ ID NO: 113308 - protein, 362 aa, Unknown
  Bacterial polypetide isolated from the Sargasso Sea
MKVDQPLELKSGKILKRYDLAYETYGVLNKSRDNAVLICHALSGNQHAAGKYKDDDKPGWWDNMIGSGKPIDTDHLFVVSLNNLGGCHGSTGPKSINPETKKIYGSDFPIVTVEDWVNSQCKLMESLGITKWKFVIGGSLGGMQAFQWTLQFPDKVEKCIIIAAAPKLTAQNIAFNEVARQAIMKDPNWHNGHYLEKNVIPNQGLALARMLGHITYLSDDSMKQKFGRDLQKQKLNFNFDVEFQIESYLRYQGEKFGNSFDANTYLLMTKSLDYFDPIKDFGDDLNTRLSKTCSKYLIISFTSDWRFPPSRSKEIMKLLIHNNKNVSYSEIDSSGGHDAFLMENEDYFQIMRNFISGDNNGV

SEQ ID NO: 113309 - protein, 372 aa, Unknown
  Bacterial polypetide isolated from the Sargasso Sea
MNDASKKNDCLFYSDPEPLLLESGQTIHSHDVAYKTYGTLNSNKDNAILICHALSGDQYVASSHPITNKDGWWARMVGENKPIDTNRFFVICINVLGGCMGSTGPASIDPETKKEFAINFPIITIADMVKAQVRLIDHLGIEKLVSVIGGSMGGMQALEWAASFPKRLKSAIPIATSSRHTAQNIAFHELGRQAIMADINWNSGNYKDKGTNPSKGLSIARMTAHVTYLSEASLTKKFGRKLQDKKDLGFGFDADFQIESYLRHQGHTFVDRFDANSYLYITRAMDYFDLEKTHKKTLTEIFTDTNLKFLVVSFTGDWLYPTSENLMIVRALSAGGADVSFVEIESDKGHDAFLLDEPEFDACMDGFLKSLL

SEQ ID NO: 113310 - protein, 386 aa, Unknown
  Bacterial polypetide isolated from the Sargasso Sea
MNYKFNIIDDKSLECKIVEFSNANFKLDSDYILNNFKIAFKSFGTLNKKKNNVILVCHALTGDQYVTGYNPVTKREGWWSRMVGPDKPIDTNKFFVICSNVIGGCAGSTGPKEIDVNTNSPFGGKFPSITINDIVNAQNYLLESLSIKKLFAVIGGSMGAMQAIQWSLNYPDKIENIIHIAGALKHSSQNIAFHEVGRQAIMNDNNWNKGSYNENGKRPETGLAVARMIAHITYLSENAMHRKFGRKLQSRDIISFGFDADFQVESYLRYQGRSFVERFDANSYLYLTRAMDYFDIVDKFSKAIEFPTIPNKHINYLVVSFTSDWLFPTIENKEIVKKLNYFNRNVSFTEIETDKGHDSFLLDELELDFTINGFLESNYRKLESHE

SEQ ID NO: 113311 - protein, 351 aa, Unknown
  Bacterial polypetide isolated from the Sargasso Sea
MDSGKKIKNFQIAYQTYGSLNAQKNNAILVCHALTGDQFPAEENPITKKNGWWELMIGPDKPIDTNKYFVICSNVLGGCVGTTGPNDTNPDTSKIYGLDFPTITIRDMVRVQKILVDELGISKLLSVAGGSMGAMQVLQWAATYPESVRSIMSIAGSLKHSAQNIAFDEAGRQSIMLDPNWQNGRYLESNEKPENGLSVARMIAHITYLSEKAFQNKFGRNLQEKNDLSFGFGIDFQVESYLRYQGRSFVDRFDANSYLYMTRAMDYFDVKDEIIANKKTIIDNSIRFLVLSFTSDWLFPTKESREIVSLLNSIGSNVSFAEVVSDRGHDSFLLDEPQFFKVAQGFLKGIK

SEQ ID NO: 113312 - protein, 370 aa, Unknown
  Bacterial polypetide isolated from the Sargasso Sea
MSKSVGKVTEQKIKLPTDLLLECGQTLKNIDLTYETYGELNDDSSNAILICHALSGNHHAAGFYKDDSERPGWWDALIGPDKAIDTNKYYVVCPNNIGGCHGSTGPSSINPDTAKFYGPEFPVITVQDWVKSQALLADHLKINCWHAAIGGSLGGMQALEWARLYPDRILKAAVIAAAPKLSAQNIAFNEVARQAIITDPDYQEGKYLDSDKSPKRGLRLARMVGHITYLSDEAMRDKFGRELKEGKLNFGFDVEFEVESYLRHQGDVFSESFDANTYLLMTKILDYYDPAEDHDGDLVKAFESIKAKVMVISFSSDWRFSPQRSKEIVNALLASEKEATYLEIESSHGHDSFLFAEDRYVNALSAFLGN

SEQ ID NO: 113313 - protein, 352 aa, Unknown
  Bacterial polypetide isolated from the Sargasso Sea
MNSTNKFYKTFGPIELQLEGGHLLKKTSIAYNTWGKLNAKRSNAILVCHALTGDQFVTGKNPITNRKGWWENIVGPNKILDTNKYFIICTNVLGGCMGTTGPSSTNLETSKPYGMQFPIFTIKDMVNLQLKLIESLNIDKLFSIIGGSMGGMQVLEWAASYPDKLYSAIPIATSYRHSAQNIAFHEVGRQAIMNDPDWNNGNYYNNGNKPRHGLSVARMIAHITYLSEGAFQKKFGRDMQSKVLSWGFDADFQVESYLRHQGTSFVDRFDANSYLYITRAMDYFDLTNSYKGNLAQAFRNTKCKFLIISFTSDWLFPSSESQYIVKALNKTASDISYIEIESDKGHDSFLLE

SEQ ID NO: 113314 - protein, 360 aa, Unknown
  Bacterial polypetide isolated from the Sargasso Sea
MNEEHKKNDCLFYNDPESLLLESGQIINGHDIAYKTYGTLNSKKDNAILICHALSGDQYVASSHPITKKKGWWERMVGKDKPIDTSRFFVICINVLGGCMGSTGPASINPETNKVFAVNFPIITIADMVKAQVRLIDSLEIEKLVSVIGGSMGGMQALEWAASYPERLKSAIPIATSSRHTAQNIAFHELGRQAIMADVNWNSGNYKDKNTNPSKGLSIARMTAHVTYLSEASLTKKFGRKLQDKTDLGFGFDADFQIESYLRHQGHTFVDRFDANSYLYITRAMDYFDLEKTHKKSLTEIYANTNLKFLIVSFTGDWLYPTSENLMIVRALSAGGVDVSFVEIDSDKGHDAFLLDEPRI

SEQ ID NO: 113315 - protein, 308 aa, Unknown
  Bacterial polypetide isolated from the Sargasso Sea
MTKLVKYTTNDFNLASGKSISPLEIAYETYGKLNKDKTNAVLICHALTGDQYACAINPITKKPGWWDILVGKGKPIDTDKYFIICSNVLGGCMGTTGPKSQNLITNEPYGLNFPVITISDMVKSQVLLLDHLEIPKVLTVIGGSMGGMQVLAWMSEYPDRIKSAIPIATAAYHTSQNIAFHEVGRQAVMADPKWHEGKYFEHNTSPEKGLSVARMTAHITYLSEVALQNKFGRNLQDRAKKTFSFDADFQVESYLRYQGVNFVKRFDANSYLFLTRAMDYFDLISENDGVLANAFNDLNASVCVISFT

SEQ ID NO: 113316 - protein, 365 aa, Unknown
  Bacterial polypetide isolated from the Sargasso Sea
IGKVQAQKVTLEGKFELECGQSFNDIELVYETYGALNADATNAILICHALSGNHHAAGKYENEEKPGWWDSLIGPGKAVDTNKFFIVCPNNIGGCHGSLGPSSINHDTGDYYGPDFPIITVKDWVNSQAKLSDSLGIEKWHAVIGGSLGGMQALEWSYLFPKRIKKAGIIAAAPKLSAQNIAFNEVARQAILNDPDFEGGRYLDKSKYPKQGLKLARMVGHITYLSEEAMRSKFGRELKKEKLNFGYDAEFEIESYLRYQGDVFSESFDANTYLLMTKILDYFDPASNFEGKLVNAFESIEAQLLVVSFSTDWRFAPERSKEIVNALIEAKKNVSYLEIDSPHGHDSFLFANEDYVKGLSAFLEN

SEQ ID NO: 113317 - protein, 338 aa, Unknown
  Bacterial polypetide isolated from the Sargasso Sea
MSNFDKIKSITIKQPLKLDCGKEISNFPLAYETYGNLNEKKDNAILVFHALTGDQFASGQNPVTNKEGWWNYAVGPGKAFDTEKFFVICANVIGGCMGSYGPGTIDPKTNNPIGTNFPVITINDMVNAQYNLLDHFKIERLFAVAGGSMGGMQVLQFVSNFPNKAKVALPIACTASHSAQNIAFNELGRQAIMSDANWKDGLYDGKTSNPDKGLAVARMAAHITYLSKKGLQEKFGRNLQERSDLKFGFDADFQIESYLRYQGSVFVDRFDANSYLYITRAMDYFDLTKQHGGNLSKAFKESKTKFFIISFTSDWLYPTSENKDIVIALNAIGADVGF

SEQ ID NO: 113318 - protein, 371 aa, Unknown
  Bacterial polypetide isolated from the Sargasso Sea
MNTEKNIKTLIVKKPLKLDCGKTIKDFPIAYETYGSLNSKKDNAILVFHALTGDQFVTGINPVTNKEGWWSYAVGPDKAIDTNKYFVICSNVIGGCMGSYGPSHKDPDQKIFGTNFPVITINDMVNAQYNLLDHFGIDKLFSITGGSMGGMQVLQFISNFPDKSKTVIPIATTSSHSAQNIAFNELGRQAITADSNWKEGNYTSNDTNPGKGLAVARMAAHITYLSKKGLQEKFGRKLQEREDLKFGFDADFQIESYLRYQGSVFVDRFDANSYLYITRAMDYFDLAKQFNGNLSEAFKNTNAKFFIISFTSDWLYPTQENKDIVIALNSIGADVGFVEIESDKGHDSFLLDVPDFLSALKNFLDKSYEEN

SEQ ID NO: 113319 - protein, 378 aa, Unknown
  Bacterial polypetide isolated from the Sargasso Sea
MEDYNKHAILGVKQPLVLECGVSLNNFPVYYQTYGSLSEKKDNAVLVCHALSGDQFLAGVNPTTGKVGWWNLVVGPDKVIDTNRYFVICTNILGGCMGTVGPKEVNSETGEIWGSNFPMITIQDMVKAQALLIDHLDIDKLFCVIGGSMGGMQVLEWAATYPDRVLTAVPIAAAAQHSAQNIAFHEVGRQAIMADPNWCGGNYYASDIFPDRGLAIARMVAHITYLSEPSLQTKFGRRLQDRESITFGFDADFQVESYLRHQGSTFVDRFDANSYLYITRAMDYFDLSERFDGGLAEAFRGSKTRFCVISFSSDWLYPTSESRMVVHALNSVAASVSFAEIRSDKGHDSFLLDEPEFWSVLRGFLSGSADYFGLDEFS

SEQ ID NO: 113320 - protein, 358 aa, Unknown
  Bacterial polypetide isolated from the Sargasso Sea
MKTKFTTDTKLESEIAYFENINLKLESGDIIDSFKLAFKTYGKLNADKTNAILVCHALTGDQYVAGNNPITGREGWWSRMVGPNKPIDTNKFFVICSNVLGGCAGSTGPKELQNGSDVAYGGNFPSVTIKDMVKAQSLLIESLNIEKLFSVIGGSMGAMQALQWAIDFPDKILNIIHIAGALKHSAQNIAFHEVGRQAIMSDPIWKNGKYFENNEVPERGLSVARMIAHITYLSENAMHRKFGRKLQSRDIISFGFDADFQVESYLRYQGKSFVERFDANSYLYLTRAMDYFDHDETFRKNIEFSHNPNNHLKYLIVSFTSDWLFPTIESKMIVNQLNSLSREVSFLEIDTDKGHDSF

SEQ ID NO: 113321 - protein, 370 aa, Unknown
  Bacterial polypetide isolated from the Sargasso Sea
MSKGLGKVIKQSFKLPSDLLLECGKTLKNIELTYETYGELNADASNAILICHALSGNHHAAGYYEDENERPGWWDALIGPNKAIDTDKFFVVCPNNIGGCHGSTGPSSINPETKKFYGPDFPVITVKDWVNSQALLADHLNVKCWHAAIGGSLGGMQALEWCRLFPDRILKASVIAAAPKLSAQNIAFNEVARQAIITDPDFQEGHYLDTEKSPKRGLRLARMVGHITYLSDEAMRDKFGRELKEGKLNFGFDVEFEVESYLRYQGDVFSESFDANTYLLMTKLLDYYDPAEKYHGNLVKAFETIKAKIMVISFSSDWRFSPERSKEIVNALLAAEKDTTYLEIESSHGHDSFLFAEDRYVNALSAFLEN

SEQ ID NO: 113322 - protein, 370 aa, Unknown
  Bacterial polypetide isolated from the Sargasso Sea
MSGSVGKVIKQIFNLPTDLLLECGQTLKNIELVYETYGELNADSSNAVLICHALSGNHHAAGYYEDTNERPGWWDALIGPNKPIDTNKYFVVCPNNIGGCHGSTGPSSINQETSELYGPDFPVITVKDWVNSQALLADYLNINCWHAVIGGSLGGMQALEWSRLFPDRISKSIVIAAAPKLSAQNIAFNEVARQAIITDPDFQEGRYLDAGKSPKRGLRLARMVGHITYLSDEAMRNKFGRELKEGKLNFGFDVEFEVESYLRYQGDVFSESFDANTYLLMTKLLDYYDPAESFDGNLVKALEPIKAKTMVISFSSDWRFSPERSKEIVNALLAANKEITYLEVDSPHGHDSFLFTEDRYINALTAFLGN

SEQ ID NO: 113323 - protein, 377 aa, Unknown
  Bacterial polypetide isolated from the Sargasso Sea
MDNLSKVKSIIVKKSLKLDCGKEISNFPLAYETYGKLNEKRDNAILVFHALTGDQYASGKNPVTNKDGWWSYAVGPEKAFDTKKFFVICANVIGGCMGSYGPSTIDPNTKKPLGTDFPVITINDMVNAQYNLLEFFKIEKLFAVAGGSMGGMQVLQFVSNFPNKTEVALPIACTASHSAQNIAFNELGRQAIMSDSNWKEGLYEEINSNPDKGLAVARMAAHITYLSKKGLQEKFGRKLQERSDLKFGFDADFQIESYLRYQGSVFVDRFDANSYLYITRAMDYFDLTKKFNGNLSKAFEKTKTKFFVISFTSDWLYPTSENRDIVIALNAIGAEVSFVEIKSDKGHDSFLLDVPDFLNTIKNYLNATFLELNETRI

SEQ ID NO: 113324 - protein, 373 aa, Unknown
  Bacterial polypetide isolated from the Sargasso Sea
MREITANTDYPGYLLKCNEELLLDSGKKIKDFQIAYQTYGKLNNQKDNAILVCHALTGDQFPAEENPITKKKGWWELMIGPNKPIDTNKYFVICTNVLGGCVGTTGPNDINPETSKIYGLDFPTITIRDMVKAQKILIDELGISKLLSVAGGSMGAMQVLQWAATYPESVRSIMSIAGSLKHSAQNIAFDEAGRQSIMLDPNWQNGRYLEGNEKPENGLSVARMIAHITYLSEKAFQNKFGRNLQEKNDLSFGFGIDFQVESYLRYQGRSFVDRFDANSYLYMTRAMDYFDVKNEIIENKKTIINNSIRFLVLSFTSDWLFPTKESREIVSLLNSIGSNVSFAEVVSDRGHDSFLLDEPQFFKVAQGFLKGIK

SEQ ID NO: 113325 - protein, 369 aa, Unknown
  Bacterial polypetide isolated from the Sargasso Sea
MSDSIGKVKAQKVTLEGKFELECGQSFNDIELVYETYGVLNADSTNAILICHALSGNHHAAGKYEHEEKPGWWDSLIGPGKAVDTNKFFVVCPNNIGGCHGSLGPSSINHDTGDYYGPDFPIITVRDWVNSQAKLSDLLGIGKWHAVMGGSLGGMQALEWSYLYPKRIKKAGIIAAAPKLSAQNIAFNEVARQAILNDPDFEGGRYLDKSKYPKQGLKLARMVGHITYLSEEAMRSKFGRELKKEKLNFGYDAEFEIESYLRYQGDVFSESFDANTYLLMTKILDYFDPASNFEGKLVSAFESIEAQLLVVSFSTDWRFAPERSKEIVNALIEAKKNVSYLEIDSPHGHDSFLFANEDYVKGLAAFLEN

SEQ ID NO: 113326 - protein, 596 aa, Unknown
  Bacterial polypetide isolated from the Sargasso Sea
MNSINSSDDLRTDKFSKYIEEFEIPFTLNLERGDQLENVKVAYETYGELNQDKSNCILVCHAITGDSHVAKHDENDVPGWWDIMVGPGKPLDTNKYFVICSNILGSCRGTTGPNSINPKTGKYYGADFPVVTIKDMVIVQKYLIDHLKIDKLLGVIGGSLGGFQCLEWATQFPDKVEGCLPIASSSRLTTQGLAFDVVARNSIISDPYFNSGNYYENDKKPDVGLALARMLGHITYLSRESMNDKFEIDRNSPRDISTSFEKKFSVGSYLAYQGEKFVERFDANSYITLSTALDLFDLGATKELLSENLSKSHCEWLLISFTSDWLYPAFQSLDIVEALISHSKKVSYCNVKSNAGHDAFLLKEDIEHYGELTKSFFNKLNNKSKLKGDVKKLDSTVKIGLNNRIDFQYIAELIPEKSSILDLGCEEGELIEQLSTIGISRALGVEINQNNVISCFAKGINVIHSDLASRLEKFYDSQFDVAILSQTLQAIKNVEKILKEMTRVSKSSIVSFPNFAFKPMREMFYNEGKAPKISGWYGYNWYDTPNVRFPSINDFLEFCEEKDISIKESLYLDTLNNKKITDNPNLNADSAIFVIS

SEQ ID NO: 113327 - protein, 194 aa, Unknown
  Bacterial polypetide isolated from the Sargasso Sea
TAQNIAFNEVARQAIMKDPNWCDGNYLENNVSPNQGLALARMLGHITYLSDESMKEKFGRDLKLSKLNYNYDVEFQIESYLRYQGEKFVSGFDANTYLLMTKSLDYFDPIKDMGDMFISNLNITNAKFLVISFTSDWRFPPIRSKEIVKILINNNKRISYSEINADGGHDAFLMNNQDYFDVMKEFIDEACNGI

SEQ ID NO: 113328 - protein, 324 aa, Unknown
  Bacterial polypetide isolated from the Sargasso Sea
FHALTGDQFVTGINPVTKKEGWWSYAVGPDKAIDTNKYFVICSNVIGGCMGSYGPSHKDPDKKIFGTNFPVITINDMVNAQYNLLDHFGIDKLFSITGGSMGGMQVLQFISNFPNKSKTVIPIATTSSHSAQNIAFNELGRQAITADSNWKDGNYTSNETNPGKGLAVARMAAHITYLSKKGLQEKFGRKLQEREDLKFGFDADFQIESYLRYQGSVFVDRFDANSYLYITRAMDYFDLAKQFNGNLSEAFINTKAKFFIISFTSDWLYPTQENKDIVIALNSIGADVGFVEIESDKGHDSFLLDVPDFLSALKNFLDKSYEEN

SEQ ID NO: 113329 - protein, 398 aa, Unknown
  Bacterial polypetide isolated from the Sargasso Sea
MNCERFKKTAKKVFFLTIQPSAFIMDIKQNIKTLIVEKPLKLDCGQTINNFPLAYETYGSLNNEKDNAILVFHALTGDQFVTGINPVTKKDGWWSYAVGSGKSIDTDKYFVICANVIGGCMGSFGPSHENPKTKKIYGTDFPVITINDMVNAQINLLDFFGIKKLFSVVGGSMGGMQVLQFISNYPDKAKTAIPIACTSSHSAQNIAFNELGRQAIAADHNWSDGDYNSKNIVPDKGLAVARMAAHITYLSKKGLQEKFGRKLQERDDLKFGFDADFQIESYLRYQGSVFVDRFDANSYLYITRAMDYFDLVKQFNGNLSDAFKNTKAKFFIISFTSDWLYPTLENKDIVIALNSVGANVGFVEIESDKGHDSFLLNVPDFLKALKNFLDKSYAEKHL

SEQ ID NO: 113330 - protein, 260 aa, Unknown
  Bacterial polypetide isolated from the Sargasso Sea
TNNPYGFEFPIVTVQDWVNSQKVLMDEFGIDKWQFIIGGSLGGMQALQWSLDYPDNVNNAIIIAASPKLTAQNIAFNEVARQAITSDPEWCDGNYLKQGKIPKRGLALARMLGHITYLSDESMAKKFGRDLKQDKINFNFDVEFQIESYLRYQGEKFVTSFDANTYLLMTKALDYFDPFNEIDFVERMSKSRSRFLVISFTSDWRFPPKRSEEIVKTLIKFNKDVSYTCIKSDGGHDAFLMKNDNYFEIMRTYIEANING

SEQ ID NO: 113331 - protein, 292 aa, Unknown
  Bacterial polypetide isolated from the Sargasso Sea
FCDLCNVIGGCMGSYGPVTIDPLTNKPIATNFPIITINDMVNAQYKLLDHFKIEKLFAVAGGSMGGMQVLQFVSNFPNKAKVALPIACTASHSAQNIAFNELGRQAIMSDINWKDGLYDGKTFNPDKGLAVARMAAHITYLSKKGLQEKFGRNLQERSDLKFGFDADFQIESYLRYQGSVFVDRFDANSYLYITRAMDYFDLTKQHGGNLSKAFKDSKTKFFIISFTSDWLYPTSENKDIVIALNAIGADVGFVEIKTDKGHDSFLLDVPDFLSTIKNYLNTTYLNINERRI

SEQ ID NO: 113332 - protein, 364 aa, Unknown
  Bacterial polypetide isolated from the Sargasso Sea
MIVKKPLKLDCGKTINEFPIAYETYGSLNEKKDNAILVFHALTGDQFVTGLNPITKKDGWWSYAVGPNKAIDTKKYFIICANVIGGCMGSFGPSHEDPNTGSAFGTNFPVITINDMVNAQYNLLDHFGIDKLFSIAGGSMGGMQVLQFISNFPDKAKTVVPIACTSSHSAQNIAFNELGRQAIAADSNWKDGNYSSEDTIPNKGLAVARMAAHITYLSKKGLQEKFGRKLQEREDLKFGFDADFQIESYLRYQGSVFVDRFDANSYLYITRAMDYFDLAKQFKGKLSDAFRATRAKFFIISFTSDWLYPTQENKDIVIALNSIGANVGFVEIESDKGHDSFLLDVPDFLHALKNFLDKSYIENL

SEQ ID NO: 113333 - protein, 324 aa, Unknown
  Bacterial polypetide isolated from the Sargasso Sea
DQFASGINPITNKEGWWSYAVGPNKAFDTNKFFVICANVIGGCMGSYGPGSIDPNTNKVFGTNFPVITINDMVNAQYNIIEFFNIEKLFAVAGGSMGGMQVLQFVSNFPNKAKVALPIACTASHSAQNIAFNELGRQAIMSDSDWKEGLYETNKDNPDKGLAVARMAAHITYLSKKGLQEKFGRKLQERTDLKFSFDADFQIESYLRYQGSVFVDRFDANSYLYITRAMDYFDLTKKFNGNLSKAFEKTKTKFFIISFTSDWLYPTSENKDIVIALNAVGADVGFVEIKTDKGHDSFLLDVPDFLNTIKSYLSTTYFKLNEKGI

SEQ ID NO: 113334 - protein, 298 aa, Unknown
  Bacterial polypetide isolated from the Sargasso Sea
IGPNKPIDTDKLYVVCLNNLGGCHGSTGPTSINPKTKKIYGSEFPIMTVSDWVNSQKELMTYLDIPCWRFIVGGSLGGMQAFQWTIQNPTLVENCVIIAAAPKLTAQNIAFNEVARQAIMKDPNWHDGNYIEKGVIPSQGLALARMLGHITYLSDESMGEKFGRDLKKTKLNFNYDVEFQIESYLRYQGEKFVTGFDANTYLLMTKSLDYFDPIKDFGNSLKNIFKKVNSKYLIISFTSDWRFPPKRSRELVKLLLDNDKNVSYSEINSEGGHDAFLMDNKDYFDVMRSFIDEASDGV

SEQ ID NO: 113335 - protein, 377 aa, Unknown
  Bacterial polypetide isolated from the Sargasso Sea
MNNLNKMKSILIEKTLKLDCGKEISNFPLAYETYGNLNEKKDNAILIFHALTGDQYASGINPITKKEGWWNYAVGPGKSFDTDKFFIICANVIGGCMGSYGPGTIDPLTNKPIGTNFPVITINDMVNAQYNLLDYFKIEKLFAVAGGSMGGMQVLQFVSNFPNKARVALPIACTASHSAQNIAFNELGRQAIMSDSNWKEGLYDEKSSNPDKGLAVARMAAHITYLSKQGLQEKFGRNLQERSDLKFGFDADFQIESYLRYQGSVFVDRFDANSYLYITRAMDYFDLTKQFNGNLSKAFKDTKTKFFIISFTSDWLYPTSENKDIVIALNAIGADVGFVEIKTDKGHDSFLLDVPDFLSTIKNYLNTTYSNINERRI

SEQ ID NO: 113336 - protein, 290 aa, Unknown
  Bacterial polypetide isolated from the Sargasso Sea
MNIKENIKTLVIKKPLKLDCGKTINNFPLAYETYGSLNKNKDNAILVFHALTGDQFVTGINPVTKKDGWWSYAVGPNKSIDTNKYFVICANVIGGCMGSFGPSHKNPDTNKIYGTDFPVITINDMVNAQVNLLDHFEIKKLFSVVGGSMGGMQVLQFISNYPDKASTVVPIACTSNHSAQNIAFNELGRQAIASDHNWSDGKYLSNNTLPDKGLSVARMAAHITYLSKKGLQEKFGRKLQERDALKFGFDADFQIESYLRYQGSVFVDRFDANSYLYITRAMDYFDLVKQ

SEQ ID NO: 113337 - protein, 398 aa, Unknown
  Bacterial polypetide isolated from the Sargasso Sea
MNCERSKKTAKKVFFLTIQISALIMNIKQNIKTLIVEKPLKLDCGQTINNFPLAYETYGSLNNEKDNAILVFHALTGDQFVTGINPVTKKDGWWSYAVGSGKSIDTDKYFVICANVIGGCMGSFGPSHENPKTKKIYGTDFPVITINDMVNAQINLLDFFGIKKLFSVVGGSMGGMQVLQFISNYPDKAKTAVPIACTSSHSAQNIAFNELGRQAIAADHNWSNGDYDSKNIVPDKGLAVARMAAHITYLSKKGLQEKFGRKLQERDDLKFGFDADFQIESYLRYQGSVFVDRFDANSYLYITRAMDYFDLVKQFNGNLSDAFKNTKAKFFIISFTSDWLYPTQENKDIVIALNAVGANVGFVEIESDKGHDSFLLNVPDFLKALKNFLDKSYAEEHS

SEQ ID NO: 113338 - protein, 368 aa, Unknown
  Bacterial polypetide isolated from the Sargasso Sea
MNIENNIKTLFVKKPLKLDCGKTIDNFPIAYETYGSLNEKKNNAILVFHALTGDQFVTGLNPITKKEGWWSYAVGPNKAIDTKKYFVICSNVIGGCMGSFGPSHTDPHTGKVFGTNFPILTINDMVNAQLNLLDHFGIDKLFSIAGGSMGGMQVLQFISNFPDKSKTVVPIACTSSHSAQNIAFNELGRQAIAADSNWKDGTYSSKNTNPNKGLAVARMAAHITYLSKKGLQEKFGRKLQEREDVKFGFDADFQIESYLRYQGSVFVDRFDANSYLYITRAMDYFDLSKQFNGNLSNAFKATKAKFFIMSFTSDWLYPTQENKDIVIALNSIGADVGFVEIKSDKGHDSFLLDVPDFLSALKNFLDKS

SEQ ID NO: 113339 - protein, 312 aa, Unknown
  Bacterial polypetide isolated from the Sargasso Sea
MNIKENIKTLVIKKPLKLDCGKTINNFPLAYETYGSLNKNKDNAILVFHALTGDQFVTGINPVTKKDGWWSYAVGPNKSIDTNKYFVICANVIGGCMGSFGPSHKNPDTNKIYGTDFPVITINDMVNAQVNLLDHFDIKKLFSIVGGSMGGMQVLQFISNFPDKASTVVPIACTSSHSAQNIAFNELGRQAIASDHNWSDGKYLSNNTLPDKGLSVARMAAHITYLSKKGLQEKFGRKLQERDALKFGFDADFQIESYLRYQGSVFVDRFDANSYLYITRAMDYFDLVKQFDGNLSNAFKKTKAKFFVILSP

SEQ ID NO: 113340 - protein, 377 aa, Unknown
  Bacterial polypetide isolated from the Sargasso Sea
MSNLNKMKNIIIEETLKLDCGKEISNFPLAYETYGNLNEKKDNAILIFHALTGDQYASGINPITKKEGWWNYAVGPGKSFDTDKFFVICANVIGGCMGSYGPGTIDPLTNKPIGTNFPVITINDMVNAQYNLLDYLKIEKLFAVAGGSMGGMQVLQFVSNFPNKARVALPIACTASHSAQNIAFNELGRQAIMSDSNWKEGLYDEKSTNPDKGLAVARMAAHITYLSKQGLQEKFGRNLQERSDLKFGFDADFQIESYLRYQGSVFVDRFDANSYLYITRAMDYFDLTKQYGGNLSKAFKDTKTKFFIISFTSDWLYPTSENKDIVIALNAIGADVGFVEIKTDKGHDSFLLDVPDFLSTIKNYLNTTYSNINERRI

SEQ ID NO: 113341 - protein, 372 aa, Unknown
  Bacterial polypetide isolated from the Sargasso Sea
MNTENNIKTLIVKKPLKLDCGKTINEFPIAYETYGSLNENKDNAILVFHALTGDQFVTGVNPITKKDGWWSYAVGPNKAIDTKKYFVICANVIGGCMGSFGPSYKDSQTGKAFGTNFPIITINDMVNAQYNLLDHFGIDKLFSIAGGSMGGMQVLQFISNFPDKAKTVIPIACTSSHSAQNIAFNELGRQAIAADSNWKEGNYSSNDTIPNKGLAVARMAAHITYLSKKGLQEKFGRKLQEREDIKFGFDADFQIESYLRYQGSVFVDRFDANSYLYITRAMDYFDLAKQFKGNLSDAFKATKAKFFIISFTSDWLYPTQENKDIVIALNSIGADVGFVEIESDKGHDSFLLDVPDFLSALKNFLDKSYIES

SEQ ID NO: 113342 - protein, 226 aa, Unknown
  Bacterial polypetide isolated from the Sargasso Sea
MPRNFSLKKSPLAPIREPKLMPVQGLNLYTFSARLYNKKRDDIAIFVFPKNSSVAEVFTNSSIRSFTLDWNEKILKNKKIHALFVNSGNANTFTGNHGKQSIRLIVNQIKKTYLINDNNIFVASTGVIGEKFPVEQVLKTITKPKMTKEWMDSARAIMTTDTFPKGMSVTSMIEGKKVTITGISKGSGMIKPNMATMLGFIFIDADLGSEILKKLLKENISYSFNS

SEQ ID NO: 113343 - protein, 298 aa, Unknown
  Bacterial polypetide isolated from the Sargasso Sea
VFTKSETSSAAVKYCKKNLSPNRDNNTVKSILVNSGNANAFTGKKGEKTVSEIIKFLSDLQNCNPKEIFTASTGVIGEFLDSGKIINSIKKDMPFSKNSWLEASKAIMTTDTFHKISSAKCKIENEEVNIIGIAKGSGMIAPNMATMLAFIFTDANISSQVLQKILLYQNERTFNSISVDSDTSTSDTVLLVSTNKKNNKFITSYNDPKVRKFENKVYELMLSLAKQIVRDGEGASKFIELNILNAKSFKAAKKIGMSIANSPLVKTAIAGEDANWGRIIMAIGKSYEKIIPNKIKIY

SEQ ID NO: 113344 - protein, 205 aa, Unknown
  Bacterial polypetide isolated from the Sargasso Sea
ISSSTLKQILNLNIKTTFNAITCDGDTSTNDMVSIFSTGKANNKEIKSFKDPKLKQFINSVHQVMLNLAKRVASDGEGATKFVTIKCLNSKTEKDAKNICFSIANSPLVKTAIFAEDPNWGRIAMAIGKSGATVKHEKLSISMGSNIILKNGKLDKNYNENILSDYMKNEKIEITIDLSIGSKKFTAYTMDLSKEYIEINSDYRS

SEQ ID NO: 113345 - protein, 249 aa, Unknown
  Bacterial polypetide isolated from the Sargasso Sea
KPKIAMEECKIGSEKVKIYGISKGSGMIHPNMATTLAYIFTDASLSNDILSKLLKKNIFNTFNAISCDGDTSTNDMVSIFATNKINNSQVKNINENKIKNFDRALNNVLLNLAKRVVSDGEGASKFISINVSKCKNEIDAKKIAFSIANSPLVKTAIAGGDPNWGRIIMAIGKAGPKINIKKLCIKLGNLKIVQEGKLYQNYSEEVASKYMKKEIIEISVEVYTGTKDFTAYTMDLTKKYIDINADYRS

SEQ ID NO: 113346 - protein, 291 aa, Unknown
  Bacterial polypetide isolated from the Sargasso Sea
RAGHDDLVVIALAPGTRTSALFTQNAFRAAPVRLAQTHLILAEALPRYLLINTGNANAGTGEAGIQSAGDCCAVLAQLTETDATAVLPFSTGVIGELLPVGQISAALPTALDDLRDTGWERAAGAILTTDTRAKLRSTEVELDGQRCTITGIAKGAGMICPNMATMLAFLATDAAIEAPLLDKLLLVAVEASFNRITVDGDTSTNDAVTLSATGQSGVEITAGSEHAEHFARALATLMIELAQDIVRDGEGASKFVEIRVIGGESEAACDQVARTVAHSPLVKTALFASDP

SEQ ID NO: 113347 - protein, 322 aa, Unknown
  Bacterial polypetide isolated from the Sargasso Sea
GQANACTGNLGIQHFQIATGKIAELLGIKEEEVLMCSTGVIGVPIQINDLVKNLPSLVSDLKGNNFANAAEAILTTDLTLKKVSIETIIQSRKITIAGFAKGSGMIYPNMATMLAFLTCDVGIQKEEWDKMIAIAVQKSFNAISVDGETSTNDSFVGINAGEKIEKRFFPIIQQGIDIVCQNLAKNIARDGEGANCLLEVLVQGAKNTDDAIMLAKSICNSALVKTAIHGCDPNWGRIISAAGNSGVKFNLNDVDLYIGNAHILEKGKLNKYDPQKVTDYIKSRMKGRYLVDDIVNIMINLNSGESKGTAWGCDLSKKYVEI

SEQ ID NO: 113348 - protein, 248 aa, Unknown
  Bacterial polypetide isolated from the Sargasso Sea
PKIAMEECKIGNINIKIYGVAKGSGMIFPNMATTLGYIFTDAKISSKILKKLLKKNIETTFNAISCDGDTSTNDMVSIFATGTANNTIINNINDDRITNFDKSLHEVLLNLAKRVTADGEGASKFISISVVNVKKDIDAKKIAFSIANSPLVKTAFAGEDPNWGRIIMAIGKSQVQINLNKINISIGDNKIIEKGELVNDYNESILKETMKNEKIDLKIDLKMGSKKFTAYTMDLTKKYIEINSDYRS

SEQ ID NO: 113349 - protein, 302 aa, Unknown
  Bacterial polypetide isolated from the Sargasso Sea
PEGSIFSGMFTQSIVRASCVDICEERIKTTSGFVRAILINSGQANACTGNLGIQHFQIATGKIAELLGIKEEEVLMCSTGVIGVPIQINDLVKNLPNLVSDLKGNNFENAAEAILTTDLTLKKVSIETIIQGRKIKIAGFAKGSGMIYPNMATMLAFLTCDAGIQKEEWDKMIAIAVQKSFNAISVDGETSTNDSFVGINAGEKIEKRFFPIIQQGIDIVCQNLAKNIARDGEGANCLLEVLVQGAKNIDDAIMLAKSICNSALVKTAIHGCDPNWGRIISAAGNSGVRFNLNDVDLYIGNA

SEQ ID NO: 113350 - protein, 239 aa, Unknown
  Bacterial polypetide isolated from the Sargasso Sea
IGSANIKIYGIAKGSGMIYPNMATALGFIFTDASLSSSILQKVLNESIKTTFNAISCDGDTSTNDMVSLFSTNKASNPSIKNYNDPKLKNFRQSLTDVLLNLAKRIAADGEGASKLICIKCKNSKTEEDAKNICFSIANSPLVKTAISGEDPNWGRIVMAIGKSNAKINEKKLSIDIGPFKVLVKGNVYKEYDEKTVSEYMQNELLEITVDIGIGKKYFTAYTMDLTKKYIEINADYRS

SEQ ID NO: 113351 - protein, 270 aa, Unknown
  Bacterial polypetide isolated from the Sargasso Sea
ENIKWNIKQRPKKIFSLIINTRNANAFTGKQGYESLKKIADLTAKQLNKKQEEDEENPKKISTKNIIFGCTGTIGEIFPYEKISNNIPNLINKIRYTQNKFIWMKAALAIMTTDTKPKLAMEECQIGSEKVKIYGIAKGSGMIYPNMATTLAYVFTDATLSNDILGKLLKKNITNTFNAISCDGDTSTNDMATIFATNEVKNYQVKSVNENKIKNFDKALNNVLLNLAKRVVSDGEGASKFITINVSKCKNEIEAKKIAFSVANSPLVKT

SEQ ID NO: 113352 - protein, 274 aa, Unknown
  Bacterial polypetide isolated from the Sargasso Sea
IVSRNRLSNDTHRGIVVNSGCANCSVGSQGVLDAEEMISLASKNLEVSPDDLFVASTGMIGVELPMALIRQNIGNIKLDNNSGSDFAKSMMTTDTYHKERAVSFIHDGETVVIGGASKGVGMIHPNMATMLCFISTDANVDKLFLQEVLSDVVNDSFNMIDVDGDQSTNDSVILLANGASETSQINKGSDSADAFKEALSYVCVELAKELVKDGEGAKTLVEVSVEGARTKEDARKSSRAIASSILVKAMVHGKDPNWGRIVMALGSSGIDIEE

SEQ ID NO: 113353 - protein, 278 aa, Unknown
  Bacterial polypetide isolated from the Sargasso Sea
FNLVDKLRERQNKFVWFKAASSIMTTDTRPKLAYEECRLWNKDIRICGIAKGSGMIAPNMATTLAFVFTDADIPSIYLKGLLKRTVGNSFNAITVDSDTSTNDMIGIFSTNKVKTGKIYNLLDPKLRDFENALKRLLLNLAKQVVSDGEGSKKFITVKVINARSQQMAKNISFSIANSPLFKTAMAGEDPNWGRIIMAIGKSGEKISPDKIEIKFGDLKVAEKGKISEEYDEEKLKKYMEWESLVVEVNLKLGQGSFECYTCDLTKEYVNINADYRNL

SEQ ID NO: 113354 - protein, 295 aa, Unknown
  Bacterial polypetide isolated from the Sargasso Sea
TSETVKIKDLIFASTGVIGEEFPVEKIRDRIPDLVDRLRSEHNKMYWIKMASSIMTTDTKPKLAYEEIIIGDELIKICGIAKGSGMIAPNLATMLSFIFTNADINSNLLKTLLKRAVANSFNAITVDSDQSTNDMVTIFSTRTIKIGQNISLNDKAVQKFEVALKKLCLNLAKQIVVDGEGSKKFVTINVINAKSLGSAKNVAFSIANSPLVKTAVAGEDPNWGRIAMGIGKSGEIVDQKKLRIKIGNFIVAENGKISDSYDEKKLKEYMQWGSIEIEVNLKLGNDAFKCYTCDL

SEQ ID NO: 113355 - protein, 291 aa, Unknown
  Bacterial polypetide isolated from the Sargasso Sea
ISELVSNKFNVSKSKIFFASTGIIGEEFPEKKIIDAIRKNKIKNNNWMAAAKAIMTTDTFPKAISSKTKVDSKVVTITGIAKGSGMIEPNMATMLGFIFIDLEISQKILQALLRQLNAKSFNRISVDGDESTNDTVILASSNKIKLKNKINSINDKRINSLKISLDKVFNSLSEQIVRDGEGATKLVKIKVKKAKNILQAEKIGRSIANSNLFKTAIYGKDANWGRIIMAIGKTYEKINQSKLKIYFGSYLVAMNGKANTKINNSDIKKYLGQKEVEIQSDLAIGNSQADI

SEQ ID NO: 113356 - protein, 282 aa, Unknown
  Bacterial polypetide isolated from the Sargasso Sea
GRIGVPLPMSRITAGIRDATDDVLQGFDGAQAFQEAILTSDTCTKSCSAKIDTPGGEITVGGVVKGAGMIEPNMATMLAFLTTDAGGSPELLKTILKQATDQSFNLMTIDGDMSTNDSAVLLANQGGGINLDKEEPAVVRKFQQAVNAVCAALARKCVSDGEKVTKFVKVRILGAPSPKDAEKVARCIANSLLVKSSWYGSDPNWGRLVDAAGYAKIGLIFDQLDLFYEEVPALLSGEPIVGNKSQWQEIVAKKEFTITLDLKIKKGTAEIWTNDLSEEYVN

SEQ ID NO: 113357 - protein, 281 aa, Unknown
  Bacterial polypetide isolated from the Sargasso Sea
YRGNLGIQHFQIATGKIAELLGIKVEEVLMCSTGVIGVPIQINDLVKNLPNLVSDLKDNNFENAAEAILTTDLTLKKVSIETIIQGRKIKIAGFAKGSGMIYPNMATMLAFLTCDAGIQKEEWDKMIAIAVQKSFNAISVDGETSTNDSFVGINAGEKIEKRFFPIIQQGIDIVCQNLAKNIARDGEGANCLLEVLVQGAKNTDDAIMLAKSICNSALVKTAIHGCDPNWGRIISAAGNSGVKFNLNDVDLYIGNAHILEKGQLNKYDPQKVADYIKSRMK

SEQ ID NO: 113358 - protein, 247 aa, Unknown
  Bacterial polypetide isolated from the Sargasso Sea
KIAMEECKIGNTLVKIYGIAKGSGMIQPNMATTLGYIFTDADISNDVLKKLLKKNVENTFNAISCDGDTSTNDMISIFSTGKARNSLIKSIADKKIKSFDESLNKVLLNLAKRVVADGEGSSKFITINVLNAKTENDAKKIGFSIANSPLVKTAIAGEDPNWGRIIMAIGKSNVDINLSKLSIKFGELIIINKGKIYSQYDETEVESYMKSSAINISIDIGNGKKSFTVYTMDLTKEYININTDYRS

SEQ ID NO: 113359 - protein, 222 aa, Unknown
  Bacterial polypetide isolated from the Sargasso Sea
IFPNLATTLGFVFTDANLSSSILKNILKDTIETTFNAISCDGDTSTNDMVSFFATNKANNPEINGHKDKKLHDFKESVHEVLLNLAKRVAADGEGASKFVTINCQKAKTIADAKKICFSISNSPLVKTAIAGEDPNWGRIAMAIGKTEIKVDINKLTIFFGPHKIFSKNNLSKDYNDQKVTDYMKNESIEITVDIGMGKKNFTSYTMDLTKDYIEINADYRS

SEQ ID NO: 113360 - protein, 296 aa, Unknown
  Bacterial polypetide isolated from the Sargasso Sea
ACTGTIGETFPLKKIKNAILDLIKKIKYTQNKMIWMKAAMGILTTDTRPKLAMSECKIGSTIIKIYGIAKGSGMIYPNMATTLGFVFTDANLSSSILQKALNESIQTTFNAISCDGDTSTNDMVSLFSTNESRNPIIKDFKDSKLKNFRQSLKDVLLSLAKRVAADGEGASKFISITCKNTKTEQDAKNVCFSIANSPLVKTAIAGQDPNWGRIAMAIGKSNAEIDIKKLSINIGPFKVLVKGNLFQGYDEKLVREYMQSELIHITVDIGIGKKDFTAYTMDLTKKYIDINADYRS

SEQ ID NO: 113361 - protein, 254 aa, Unknown
  Bacterial polypetide isolated from the Sargasso Sea
MTLNLKNLLNPKVKMSKMGEFQELQPIEGLQISSVSADLYGDGRDDLTLFFFDEGANFGAVYTNSKITSASINWNMKIKRHFVKALMVNTKNANTFTGTKGAQGLKEVAQALSKALTLKSSQSPKGVKEVIKITDLLFASTGVIGEDFPHLKIKNRIPELVKKLRTEQNKFVWFKAASAIMTTDTRPKVAYEECKIGNKLVKISGIAKGSGMIAPNMATMLSFIFTDADIPSVFLKGILKKVTSTTFNSITVDS

SEQ ID NO: 113362 - protein, 257 aa, Unknown
  Bacterial polypetide isolated from the Sargasso Sea
MGIITTDLKPKIAMEECKIGNATVKIYGIAKGSGMIYPNMATTLGFIFTDATLSSTILRKILKKNIETTFNAISCDGDTSTNDMVTIFSTNKIKNTEIKNANDKKLFEFKKSLHNVLLNLAKRVASDGEGASKFVTISTINSKNETQAKTISFSIANSPLVKTAIAGQDPNWGRIIMAIGKAKIKIDIKKLSIKFGNHKIIEKGELINNYNEEEVSNYMKSEKIDIVIDLGVGSKNFTVYTMDLTKKYIEINSDYRS

SEQ ID NO: 113363 - protein, 262 aa, Unknown
  Bacterial polypetide isolated from the Sargasso Sea
LVLFYFREGANYANVYTQSKLVSENIKWNKKIREKKIFGILINTRNANALTGKDGYNSLKKISLNLSKFLTSKQTSDEDKPREIKPNQILFACTGTIGEKFPEDKILSNINQLIEKIKYTQNKLIWIKAALGIMTTDTKPKLSMAECKIGGSDVKIYGIAKGSGMIFPNMATTLGFIFTDANISSSILKQILNLNIKTTFNAITCDGDTSTNDMVSIFSTGKANNKEIKSFKDPKLKQFIKSVHQVMLNLAKRIASDGEGAT

SEQ ID NO: 113364 - protein, 254 aa, Unknown
  Bacterial polypetide isolated from the Sargasso Sea
YDTDTRPKVAYEECKIGNKLIKLSGIAKGSGMIAPNMATMLSFIFTDANIPSVFLKSILKKVVATTFNSITVDSDTSTNDMVGIFATGKAKNSKIYNVLDPKLQDFEKALHRLTLNLAKQIVVDGEGAKKFISINVIGARSFNMAKNIGFSIANSPLFKTAVAGEDPNWGRIIMAIGKSGENIIPTKIQIKFGNYLVTEHGRVAKDYNETDLKEYMKWDSINIEVNLNLGSAQFTVYTCDFTHEYIDINADYRN

SEQ ID NO: 113365 - protein, 309 aa, Unknown
  Bacterial polypetide isolated from the Sargasso Sea
YFKNGANYATVNTTSTIISESIIWNNSSHKKSIKGLLVNTKNANTFTGKQGKESLDILAKNLSRLLTLRESKSEQGTSETVKIKDLIFASTGVIGEQFPVDKIKDALPSLVEKLKSDHNKLFWLKVASGIMTTDTRPKLAYEEIIIGDELVKICGVAKGSGMIAPNLATMLSFIFTNADINSNLLKSLLKRAVANTFNAITVDSDQSTNDMVAIFSTKAIKIGQNLSLNDKIVHKFELALKKLCLNLAKQIVVDGEGAKKFLTIKIINAKSLSSAKNIAFSIANSPLVKTAVAGEDPNWGRIVMGIGKS

SEQ ID NO: 113366 - protein, 223 aa, Unknown
  Bacterial polypetide isolated from the Sargasso Sea
MIAPNMATMLSFIITDIKISYAILQKITSNLSNKTFNSITVDSDTSTSDMVLVSTTSSANMKPIKKFSDNRIKQFSKTLELVMKELAIEIVKDGEGSNKLIEYQIIGALNDKSAKNIALSIANSPLVKTAIAGEDPNWGRIIMAIGKSGENIIQEKIKIYFGKYLITNNGRVHKKYDEKKAKDYMKNTNLLVKVDLGIGKGIANVWGCDFTKEYIEINADYRS

SEQ ID NO: 113367 - protein, 246 aa, Unknown
  Bacterial polypetide isolated from the Sargasso Sea
MKINPTPPIPVQGYLWMGRNIGIKDQSLDFGVLAAVHPCTAAAVFTRSNLPGAPVIVGREHAAKGTLQAIVVNSKCANVGLGEQGLQDARKMCQWTAEALKIQPELVLPGSTGVIGLPLPMDKIRKGTLSIATNLDNSPEAVESFARAIMTTDTHPKWRNARSGHARLLGVAKGSGMIEPNMATMLSYLVTDVEIDHSKLQKMLKRAVDSSFNRISIDTDTSTSDMVVLMANGMAGRVNEDELKKT

SEQ ID NO: 113368 - protein, 243 aa, Unknown
  Bacterial polypetide isolated from the Sargasso Sea
KQNDDEENPKKIKPSDILFACTGTIGEKFPLIQIRNSIPNLINKIKYTQNKLIWMKAAMGIITTDLKPKISMSETKIGSANVKIYGIAKGSGMIYPNMATTLGFLFTDANLSSSVLKNVLKKNIQNTFNSISCDGDTSTNDMVSLFSTNCAKNPEIKNANDPKLKNFDQAINEVLLNLAKQVAFDGEGASKFITVNCKGCKSDKDAKNISFSIANSLLVKTAIAGEDPNWGRIAMAIGKSNAR

SEQ ID NO: 113369 - protein, 289 aa, Unknown
  Bacterial polypetide isolated from the Sargasso Sea
MEISAISADLYGTGRDDLCLFYFKDGANYGAVYTNNTICSESITWNRHIRKKNIKAIMINTKNANTFTGTQGAEALDSLSKNLAKNLTLREAQKKGGTSQVIKPNEILFASTGVIGEKFPTQQIKNNTPQLVEKLREKQNKFVWFKAASSIMTTDTRPKLAYEECRIWNKDIRLSAIAKGSGMISPNMATMLAFVFTDAEIPSVFLKSLLKRAMTNTFNAITVDSDTSTNDMVAIFSSNKVKTGKFYNVLDPKLKDFEMALQRLLLNLAKQIVSDGEGAKKFITVKVVN

SEQ ID NO: 113370 - protein, 242 aa, Unknown
  Bacterial polypetide isolated from the Sargasso Sea
KIRYKKDKIEIFGISKGSGMISPNMATMLAYIFINVPIAKKILDGILKKSNELSFNSISVDGDMSTNDSVLFFSLYNKSIKKITSKRDKRFKIIEKSIILLMQDLAKKIVLDGEGISKFIEINIKNSKTINQARTIAKAISNSPLVKTAIAGSDPNWGRIIASIGSTTEKLNSNNIKLKFGRFVICDRGKVINKYNESKVKKYMKRNKIKIDIDLRLGKYSKQFWTTDLNENYIRINKGYRT

SEQ ID NO: 113371 - protein, 100 aa, Unknown
  Bacterial polypetide isolated from the Sargasso Sea
IANSPLVKTAISGEDPNWGRILMAAGKAGVEFEIDRVNLFIGDYKILDKGQLNKNYVEKEVADYMKQPNLEITIEINNGNKNFTCYTMDLTQKYISLNSD

SEQ ID NO: 113372 - protein, 223 aa, Unknown
  Bacterial polypetide isolated from the Sargasso Sea
MIHPDMATTLGFVFTDAKIKGNILKQLLKKNIENTFNAISCDGDTSTNDMVSIFATGYAKNKDVNSYKDKSLNDFDKSLNLVLKNLAKSVAADGEGASKFVTIKVEKCKNENDAKKICFSIANSPLVKTAIAGEDPNWGRIVMAIGKAKVKTNLSKLNISIGPFKIIENGKISQNYKEEDVAEYMGSLEININVQIGTGKKDFEVYTMDLTKKYIEINADYRS

SEQ ID NO: 113373 - protein, 291 aa, Unknown
  Bacterial polypetide isolated from the Sargasso Sea
LSRILTIKESKNQKGTSETVKIKDLIFASTGVIGEEFPVEQIKDRLTNLVDKLRKEHNKMYWIKMASAIMTTDTKPKVAYEEVIIGDELIKISAIAKGSGMIAPNLATMLSFIFTNADINSNLLKTLLKRAVANSFNAITVDSDQSTNDMVSIFSTRAVKIGPNISLNDKAVQKFEIALKKLCLNLAKQIVVDGEGAKKFVTVKVTNSKSLGSAKNIAFSIANSPLFKTAIAGEDPNWGRIAMGIGKSGEIIDQKKLKIKIGNFVVAENGKISESYDEQKLREYMQWGSIE

SEQ ID NO: 113374 - protein, 259 aa, Unknown
  Bacterial polypetide isolated from the Sargasso Sea
TFTGLQGQEGLDSISKSLAKNLTLKEAQKEDGTTNVVKKNEILFASTGVIGEKFPAQQIKGSVPNLVDKLRDKQNKFVWFKAASSIMTTDTRPKLAYEECRIWNKDIRLCGIAKGSGMISPNLGTMLSFVFTDADIPSVYLKSLLKKAVANSFNAITVDSDTSTNDMVAIFSTNKIKTGKIYNVLDPKLKDFENALQRLLLNLAKQIVNDGEGAKKFVTVKVINARSQQMAKNIAFSIANSPLFKTAMAGEDPNWGRII

SEQ ID NO: 113375 - protein, 219 aa, Unknown
  Bacterial polypetide isolated from the Sargasso Sea
DMATTLGFIFTDAKLNGGVLKQLLKKNIASTFNAISCDGDTSTNDMVSIFSTGYANNKVIKSYKDKNLIHFDKSLNNVLKNLAKSVAADGEGASKFVIIKVEKCKKEIDAKKICFSIANSPLVKTAIAGEDPNWGRIIMAIGKAKIKINLNKLNIFIGPHRIIENGKISQNYREEEVADYMKSLEIKINVQIGSGNKDFEVYTMDLTKKYIEINSDYRS

SEQ ID NO: 113376 - protein, 231 aa, Unknown
  Bacterial polypetide isolated from the Sargasso Sea
YGIAKGSGMIYPNMATTLGYIFTDADLSNVILKKLLKKNIETTFNAISCDGDTSTNDMVTIFATSKVKHSKINNINDEKLKEFDEALYNVLLNLAKRVVADGEGATKFITINVKKTKNVNDAKKICFSIANSPLVKTAIAGEDPNWGRILMAIGKSNVNINLNKISLKIGNFKIIEKGQIYSKYNENEVSEYMKNMDINIEAEINTGNKDFTSYTMDLTKKYIEINTDYRT

SEQ ID NO: 113377 - protein, 274 aa, Unknown
  Bacterial polypetide isolated from the Sargasso Sea
ANCFTGNQGYRSLERIADILSLKLSEKQKEDDEEPKKIKSKEIIFGCTGTIGEIFPEEEIKNKIPDLVNNIKYTQNKYIWMKAALGMMTTDTQPKMAMEECFISSSKIKIFGVAKGSGMIQPNMATTLGYIFTDANIQNDILKKLLKKNISNTFNAITCDGDTSTNDMVSIFSTGKKKHSLIRNINDEKIADFDLALNKVLLNLAKRVVSDGEGASKFITVNVKNCKLEKDAKKIAFSVANSSLVKTAIAGEDPNWGRIVMAIGKAGITINLNK

SEQ ID NO: 113378 - protein, 250 aa, Unknown
  Bacterial polypetide isolated from the Sargasso Sea
FPKGVSVTSMIEGKRITITGISKGSGMIEPNMATMLGFIFIDADFRSEILNKLLKENISNSFNSISVDGEESTNDTVILASTRAIKFKKPIKNINDKRIIDFKKKLKKVFMKLSELIVRDGEGATKLIEINVLNARNEKDANTFGKSIANSPLVKTAIHGSDPNWGRIIMALGKTYININTKILKVYFGKYLVIKNGTAHSKVDDKIISKYLGKDNIKITVDLGLGIKSSRILTCDLSKQYIDINASYKT

SEQ ID NO: 113379 - protein, 217 aa, Unknown
  Bacterial polypetide isolated from the Sargasso Sea
ATTLGYLFTDADIPNNILNKLLKKNISSTFNAISCDGDTSTNDMVSIFSTGKAKHAKIKNLNDPRLKEFDEALNKVLLNLAKRVVLDGEGATKFITINILNCKIENDARKLAFSIANSPLVKTAIAGEDPNWGRIIMAIGKSLINLDLEKLSIKFGNHHIISNGKMSSLYNETELKNYMKNSNIDINVDISCGSKNFTAYTMDLTKKYIDINADYRS

SEQ ID NO: 113380 - protein, 205 aa, Unknown
  Bacterial polypetide isolated from the Sargasso Sea
IKNHILKKLLKKNISTTFNAITCDGDTSTNDMVSIFSTGKVKHSKINNINDQKIISFDQALNKVLLNLAKRVVNDGEGASKFITVNVQNCKFDKDAKKIAFSIANSSLVKTAIAGEDPNWGRVVMAIGKSGISINIEKISIKFGELSIIQNGYLNSNYNESDVASYMKNNHIEININLSLGTKSFTCYTMDLTKKYIEINSDYRS

SEQ ID NO: 113381 - protein, 270 aa, Unknown
  Bacterial polypetide isolated from the Sargasso Sea
ANEILFACTGTIGENFPTEKIHKSIYDLIKKIKYTQNKYIWMKAAMGILTTDLKPKIAMEECYIGNKLVKIYGIAKGSGMIYPNMATTLGFVFTDATIPSAILKQLLKNNIQKTFNAISCDGDTSTNDMVSLFATNKVSNKKLKNSKDKKLNEFNSALFKVLLNLSKRVAADGEGASKFVTIKVKNCKTEEDAKKICFSIANSPLVKTAIAGEDPNWGRIIMAIGKAKVNLNPRKLAIQIGKIKVIENGKISPAYNEQEAANYMKEKSID

SEQ ID NO: 113382 - protein, 261 aa, Unknown
  Bacterial polypetide isolated from the Sargasso Sea
MKAAMGIITTDTKPKLAMAECKIGSANIKIYGIAKGSGMIYPNMATTLGFVFTDASLSSSILQKILNENIKTTFNAISCDGDTSTNDMVSLFSTNEANNPIIKDFKDSKLKNFRQSLKDVLLNLAKRVAGDGEGASKFISIKCKNAKTEEDARNVCFSIANSPLVKTAIAGEDPNWGRIAMAIGKSNANIDVKKLSIQIGPFKVLVKGNLFHDYDEKIVCEYMQNELLDISVDIGLGKKDFTAYTMDLTKKYIEINADYRS

SEQ ID NO: 113383 - protein, 200 aa, Unknown
  Bacterial polypetide isolated from the Sargasso Sea
LLKKMLKKSPLAPKSLRNIIQIKGVELYAQSAHLYKERRLDLVLFLFKNKTTVSEVFTKSSLRSCTLDWNEKNLRNKEIQVLVVNSGNANTFTGQAGANALIKISKIVSNKFKVSTKKVFFASTGVIGEKFPEQKIINALKKTKSKSKNWLQAAQAIMTTDTFPKAISVKTRIENKTITITGIAKGSGMIEPNMATMLGF

SEQ ID NO: 113384 - protein, 218 aa, Unknown
  Bacterial polypetide isolated from the Sargasso Sea
MKSVPGFSWLGINLGIKDKTPDFGVIASDCKCSAAGVFTRNNIQGAPVIIGRKHIQNGQLQAIVVNSKIANVATGKHGIEDAKKMCRWTASTLGIAPEQVLPSSTGVIGLRLPIDKIKSGCESILENLGSTTEYIENFARAIMTTDTKPKWGCESIGNATLLGVAKGAGMIEPNMATMLGYFVTDASIDHELLQKILGRVVNKSFNRISIDTDTSTKR

SEQ ID NO: 113385 - protein, 310 aa, Unknown
  Bacterial polypetide isolated from the Sargasso Sea
EELPKEIKSNEILFACTGTIGEKFPLDKIKNTIPNLIENIKYTQNKIIWMKAAMGIITTDTKPKLAMSECKIGSTNVKIYGIAKGSGMIYPNMATTLGFVFTDASLSSSVLQKILNESIKTTFNAISCDGDTSTNDMVSLFSTNEANNKIIKDYKDSKLKNFRQSLKDVLLNLAKRVAGDGEGSSKFITIKCKNAKSDKDAKDICFSIANSPLVKTAIAGEDPNWGRIAMAIGKSYARIDVKQLSINIGPFNVLVKGNLFQDYNEKLVSEYMQSELIDISVDINLGNKNFTAYTMDLTKKYIEINADYRS

SEQ ID NO: 113386 - protein, 261 aa, Unknown
  Bacterial polypetide isolated from the Sargasso Sea
MKAALGIMTTDTVPKMSMTDCKIGTSDIKIYGIAKGSGMIYPNMATTLGYIFTDANISSTILKKLLKKNIETTFNAISVDSDTSTNDMVSIFATKKASHIKIKNINDKNLKNFDKAINVVLLELAKKVAFDGEGASKFVQIDVLNTKNVQDAKKIAFSIANSPLVKTAIAGEDPNWGRIVMAIGKAYVNFNVSKLEIKLGKLKVVEKGLISKNYREDLLKEYMKNKDINIVVEINSGKKSFTTYTTDLTKKYIEINADYRT

SEQ ID NO: 113387 - protein, 305 aa, Unknown
  Bacterial polypetide isolated from the Sargasso Sea
IVRASCVDLCEERIKTTSGFVRAILINSGQANACTGNLGIQHFQIATRKIAELLGIKEEEVLMCSTGVIGVPIQINDLVKNLPNLVSDLKDNNFENAAEAILTTDLTLKKVSIETIIQGRKIKIAGFAKGSGMIYPNMATMLAFLTCDAGIPKEEWDKMIGIAVKKSFNAISVDGETSTNDSFVGINAGEQIEKRFFPIIQQGIDIVCQNLAKNIARDGEGANCLLEVLVQGAKNTDDAILLAKSICNSALVKTAIHGCDPNWGRIISAAGNSGVKFNLNDVDLYIGNTQILENGKLNEYDPQKV

SEQ ID NO: 113388 - protein, 257 aa, Unknown
  Bacterial polypetide isolated from the Sargasso Sea
GLSISVLSANLYKNDRDDLSMFYFRDGANHASLYTQSKIVSENIKWNLNQKTKKVFSLIVNTRNANAFTGKQGYESLKKLADLVSKNLTEKQKQDEETPKKINPKEIIFGCTGTIGEEFPFEKISNQIPNLINKIRYTQNKFIWMKAALGIMTTDTKPKIAMEECNIGSEKVKIYGIAKGSGMIHPNMATTLAYIFTDASLSNDILSRLLKKNIFNTFNAISCDGDTSTNDMLTIFATNKINNSKIKSINENKIKNF

SEQ ID NO: 113389 - protein, 235 aa, Unknown
  Bacterial polypetide isolated from the Sargasso Sea
AGVFTKSTTASEAVKWCQKIIKNNDIRAIIVNAGNANVFNGELGKSAINKIISKLSSCLKIFKNQILIAQTGVIGEPLKTHKIIDAISNLTDNLNSNNWQSAAKAIMTTDTYPKYSSLRYNFEGSKIHITGIAKGSGMIAPNMATMLAFISTDIKISKPILQKLLEDVSEETFNSISVDGDTSTSDSVILSATGMSDNKILKNKKDKHYEKFKDALLKISKDLALLNCKRRGRSI

SEQ ID NO: 113390 - protein, 286 aa, Unknown
  Bacterial polypetide isolated from the Sargasso Sea
PLEKIKNSIPNLVDNIKYNQNKLIWMKAASGIKTTDTKPKLAMSECKIGNTPIKVYGIAKGSGMIFPNMATTLGFLFTDANLSSSILKNILKDNIETTFNAISCDGDTSTNDMVSIFATNKANNYEIKSHKDKKLHDFKASVHEVLLNLAKRVAADGEGASKFVTINCQKAKTIADAKKICFSISNSALVKTAIAGEDPNWGRIAMAIGKTEIKIDIQRLTIFFGPHKIFSKNELSKDYDEQKVTDYMKNESIEITVDLGMGKKNFTSYTMDLTKDYIEINADYRS

SEQ ID NO: 113391 - protein, 193 aa, Unknown
  Bacterial polypetide isolated from the Sargasso Sea
SGILEQLLKKNIDNTFNAITCDGDTSTNDMVSIFSTCKINNPKIHNINDKKLNEFDKSLNSVLLNLAKSVVSDGEGASKFIEITCVNSKSKDDAKKISFSIANSPLVKTAIAGEDPNWGRLIMAIGKANVRLDLKKISIKLGNHKIIDKGEKSNSYNEKDLKKYMQDERINIIIDLGIGKESFTAYTMDLTKK

SEQ ID NO: 113392 - protein, 222 aa, Unknown
  Bacterial polypetide isolated from the Sargasso Sea
MAKLEKVSPLAPASFPDIPAINGVNFATASAGIKYQGRSDVMLAVLDPGTEIAGVFTSSSTRSFAVIDCEEKIHLTDSSSGAAIVVNSGNANAFTGSRGKVSVQAITTAAAEVLNIPRSRVFSSSTGVIGEELPHNLIIDALGKMVVEKTKHDILEAAKAIMTTDTYPKGSVRKVLTDQGAITIAGIAKGSGMIAPNMATMLVYLFTDASVKKEVCNLIYPK

SEQ ID NO: 113393 - protein, 289 aa, Unknown
  Bacterial polypetide isolated from the Sargasso Sea
GLQHCQKPVAKNLTIKEAQKEDGTTNVIKPNEILFASTGVIGEKFPTQKIKSSIPNLVDKLRDKHNKFVWFKAASSIMTTDTRPKLAYEECRLWNKDIRICGIAKGSGMIAPNLGTMLAFIFTDADIPSIYLKGLLKRTVNSSFNSITVDSDTSTNDMVAIFSTGKVKTGKIYNLLDPKLKDFENALQRLMLNLSKQIIIDGEGAKKFVTVKVINARSQQMAKNIAFSIANSPLFKTAMAGEDPNWGRVVMGIGKSGEKISPDKIEIKFGDLKVAEKGKISEEYDEKKL

SEQ ID NO: 113394 - protein, 271 aa, Unknown
  Bacterial polypetide isolated from the Sargasso Sea
QGLESLDEIAKNLSKTLTLRESQSEEGVNEAVKIKDILFASTGVIGEKFPADKINQRVQELVDKLRPDQNKLIWLKTASAIMTTDTKPKLAYEEFTVGNKMIRIAGLAKGSGMIAPNLATMLSFIFTDVEIPSNILRILLKRVAQNSFNAITVDNDQSTNDLIAIFSTKKVKIGHNRNITDPIIQKFESALKKLTLNLAKQIVVDGEGAKKFITVKIINAKSITSAKKIGFSIANSPLVKTAVAGEDPNWGRIVMGIGKSGEKIDSEKLII

SEQ ID NO: 113395 - protein, 202 aa, Unknown
  Bacterial polypetide isolated from the Sargasso Sea
VYLKSLLKKTVGNSFNAITVDGDTSTNDMVAIFATNKVKTGKIYNILDPKLKDFESALQKLLLNLAKQIVSDGEGAKKFVTVKVINARSQNMAKNIAFSIANSPLFKTAMAGEDPNWGRIVMGIGKSGENITPEKIEIKIGDFKVAEKGKVSEEYNEKKIKEYMAWDSIFIEVNLKLGQASFECYTCDFTNDYVNINTDYRN

SEQ ID NO: 113396 - protein, 278 aa, Unknown
  Bacterial polypetide isolated from the Sargasso Sea
GFVRAILINSGQANACTGNLGIQHFKIATGKIAELLSIKEEEVLMCSTGVIGVPIPINDLVKNLPNLVSALKGNNFENAAEAILTTDLTLKKVSIETIIQGRKIKIAGFAKGSGMIYPNMATMLAFLTCDAGIQKEEWDKMIAIAVQKSFNAISVDGETSTNDSFVGINTGDKIEKRFFPIIQQGIDIVCQNLAKNIARDGEGANCLLEVLVQGAKNTDDAIMLAKSICNSALVKTAIHGCDPNWGRIISAAGNSEVKFNLNDVDLYIGNAHIWKKAS

SEQ ID NO: 113397 - protein, 261 aa, Unknown
  Bacterial polypetide isolated from the Sargasso Sea
NAAEAILTTDLTLKKVSIETIIQGRKIKIAGFAKGSGMIYPNMATMLAFLTCDAGIQKEEWDKMIAIAVQKSFNAISVDGETSTNDSFVGINTGDKIEKRFFPIIQQGIDIVCQNLAKNIARDGEGANCLLEVLVQGAKNTDDAIMLAKSICNSALVKTAIHGCDPNWGRIISAAGNSGVKFNLNDVDLYIGNAHILEKGQLNKYDPQKVTDYIKSRMKGRYLVDDIVKIMINLNSGESKGTAWGCDLSKKYVEINSEYTT

SEQ ID NO: 113398 - protein, 268 aa, Unknown
  Bacterial polypetide isolated from the Sargasso Sea
NDLSDKLTKKQSEDEEYPKDIKSNEILFACTGTIGEKFPIDKIKNAFPNLIKNLKYTQNKLIWVKAAMGIITTDTKPKLAMAECKIGTTNVKIYGIAKGSGMIYPNMATTLGFVFTDANLSSSILKKTLNESIKNTFNAISCDGDTSTNDMVSLISTNKANNPKINNFKDSKLKNFRQSLNDVLLNLAKRVASDGEGASKFITINCKSSKTEQDAKNICFSIANSPLVKTAIAGEDPNWGRIAMAVGKSNAKIDEKKLSINIGSFKVL

SEQ ID NO: 113399 - protein, 241 aa, Unknown
  Bacterial polypetide isolated from the Sargasso Sea
VKFGNTNVKIYGIAKGSGMIYPNMATTLGFVFTDAHLSSSILKKTLSESIKKTFNAISCDGDTSTNDMVSLISTNKANNPKINDYKDTKLKNFRQSLNDVLLNLAKRVASDGEGASKFITINCKNSKTDQDAKNICFSIANSPLVKTAIAGEDPNWGRIAMAVGKSNAKIDEKKLSINIGSFKVLVKGNLYQDYDEKIVSEYMQNELIDITVDIGLGNKSFTAYTMDLTKRYIEINSDYRS

SEQ ID NO: 113400 - protein, 275 aa, Unknown
  Bacterial polypetide isolated from the Sargasso Sea
KVGHFQDLDHLDGLSISTVSCGLYEKKRDDLVFFYFREGASHASVFTQSKLISENIKWNKKIREKKVYGILTNTKNANALTGIEGYNSLKKISINLSKLLNLKQISDEDKPNPIKPSQLLFACTGTIGEKFPESKILNNLENLVQKIKYNQNKLIWIKAALGIMTTDTKPKLSMAECKIGTSIVKIYGIAKGSGMIFPNMGTTLGFIFTDANISSPLLKQILNMNIKTTFNAITCDGDTSTNDMVSIFATGKANNREIKSIKDTKLKQFIGSVIK

SEQ ID NO: 113401 - protein, 264 aa, Unknown
  Bacterial polypetide isolated from the Sargasso Sea
SLQNAAEAILTTDLVDKKITIETFIEGRKVKISGFAKGSGMIYPNMATMLAFLTCDVGVDKEEWDKMISIAVKKSFNAISVDGETSTNDAFIGINSGKKIDKKFLSKIQSGIDIVCQSLAKNIARDGEGANCLLEVLVEGAKNNSDAIKIAKSICNSSLVKTAINGCDPNWGRIISAAGNSGINFKLDDLDLYIGDFQILKKGKLNKYDANKVAYYMQIKMNGKYLVEDIVSITLNLNSGTEKGTAWGCDLSKKYVEINSEYTT

SEQ ID NO: 113402 - protein, 183 aa, Unknown
  Bacterial polypetide isolated from the Sargasso Sea
CDGDTSTNDMVSIFSTGKANNKVIKSFKDPKLKQFIKSVHQVMLNLAKRVASDGEGATKFVTINCLNCKTEKDAKNICFSIANSPLVKTAIFGEDPNWGRIAMAVGKSDATIKHEKLSILMGPNIILRDGKLDKNYNESILSEYMKNENIEITIDLSIGNKKFTAYTMDLSKEYIEINSDYRS

SEQ ID NO: 113403 - protein, 262 aa, Unknown
  Bacterial polypetide isolated from the Sargasso Sea
MVKAASSIMTTDTRPKLAFETCKLWNKDIRLSAIAKGSGMISPNLGTMLSFVFTDADIPSIYLKNLLKKAVSNTFNAITVDSDTSTNDMVAIFATGKVKTGKIYNVLDPKLKDFEAALQRLLLNLAKQIVSDGEGAKKFVTVKIVNARSNNMAKNIAFSIANSPLFKTAMAAGDPNWGRIVMGIGKSGEKVSAEKIDIKIGEFKVAEKGKISKEYDEEKLKEYMQWDSIVIEVNLKLGQASYECYTCDFNEDYIKINADYRS

SEQ ID NO: 113404 - protein, 264 aa, Unknown
  Bacterial polypetide isolated from the Sargasso Sea
YIWMKAAMGILTTDLKPKLTMEECRIGQTNIKIYGVAKGSGMIQPNLATTLGFIFTDANLSSGILKKMLKKLMANTFNAISCDGDTSTNDMVSIFATCAAKNSEVKNINDKKLKDFESKLESVLLNLAKSVVADGEGASKFVTVNVQNCKKEDDARKIAFSIANSSLVKTAISGEDPNWGRIIMAIGKAGIKLNLKKLSVLLGNINIIDKGELNEKYKESEAKDYMLGKNIDIFVNLNIGNKNFTSYTMDLTKKYIEINGDYRS

SEQ ID NO: 113405 - protein, 273 aa, Unknown
  Bacterial polypetide isolated from the Sargasso Sea
ATGGNARAVLINSGQANACTGDLGLIDSQRATQAVADQLGLNADEVLICSTGVIGVPIPMDTLLAGVAPLVLALSSTPEAAAAAADAILTTDLIDKQVALEAELGGRTVRIGGMAKGSGMIHPDMATMLGFFSCDAAVPADVWQAMVRRAVQRSFNSITVDGDTSTNDTVLAYAAGEPLAVEHHNALEQGLTTAMQQLARAIARDGEGATLLLEVQVQGAADEAAAQAIARTVCGSSLVKTAVHGRDPNWGRIVAAAGRAGVPMDPDAVALWL

SEQ ID NO: 113406 - protein, 253 aa, Unknown
  Bacterial polypetide isolated from the Sargasso Sea
ITSQKLTEKQKEDDEEPKKIKSKEIIFGCTGTIGENFPEDKIKSKIPELINKLKYTQNKLVWMKAALGIMTTDTQPKMAMEKCFIGNSEIKIFGVAKGSGMIQPNMATTLGYIFTDADIKNDILKKLLKKNIATTFNAISCDSDTSTNDMVSIFSTGKIKHPKINSLNDEKLKDFDNALNKVLLNLAKRVVADGEGASKFITVNVKECKNDIEAKKIAFSISNSPLVKTAIAGEDPNWGRIKMAIGKAGVQLN

SEQ ID NO: 113407 - protein, 285 aa, Unknown
  Bacterial polypetide isolated from the Sargasso Sea
FPVEPIKERLAELVDKLREDHNKMYWLKIASSIMTTDTKPKLAYEELIVGDELIRICGIAKGSGMIAPNLATMLSFIFTNADINSNLLKTLLKRSVANSFNAISVDSDQSTNDMVSIFSTRALKVGQNLSLNDKIIQKFELALKKLCLNLAKQIVVDGEGAKKFLTVKVINAKSLGSAKNIAFSIANSPLVKTAVAGEDPNWGRIVMGIGKSGEIIDPKKLKIKIGDFIVAENGKISETYNEKKLKEYMQWESIEIEINLKLGNDAFKCYTCDFTHDYIDINSRL

SEQ ID NO: 113408 - protein, 249 aa, Unknown
  Bacterial polypetide isolated from the Sargasso Sea
IKKNKEDLLLIIVPKNASISGVLTKSLSCSSAVNFCKNNLKSKNKKVRAILVNSGNSNAFTGIKGEKCVRTILSYLSKKLNCTEEEIYTASTGVIGEFLDPGIIITALKKNEPSSINSWPEAAKSIMTTDTFHKVFYETCYINESLINIVGIAKGSGMIAPNMATMLSFIFTDANISSNVLQKILANENEKTFNSITVDSDTSTSDTVLLTSTNTKNHKKIINFNDPDLNQFKNALFNLMLNLAKQIVT

SEQ ID NO: 113409 - protein, 219 aa, Unknown
  Bacterial polypetide isolated from the Sargasso Sea
IEPNMATMLAYFVTDASLSQDLLKKMLDRVVNKSFNRISIDSDTSTSDTVIILANGKAGEVDPETFEEAFTRIAVKLGKEIARDGEGSKKLVELTVSGAESQQMALQIAKSIINSPLVKTAIHGADPNWGRFVMAVGKVFQYPVKLDELSIQFGCESKGLTLNAQNIDHSKVILNEISEYLQNQELQMKVTVGKGMFSETVWGCDLTKEYIEINAFYTT

SEQ ID NO: 113410 - protein, 198 aa, Unknown
  Bacterial polypetide isolated from the Sargasso Sea
FTGKQGYESLKKLAESTSKLLNKKQEEDEQSPKKISPKNIIFGCTGTIGEKFPYEKVSNNIPNLIKKIRYTQNKFIWMKAALAIMTTDTKPKLAMEECQIGTEKVKIYGIAKGSGMIYPNMATTLAYIFTDATLSNDVLGKLLKKNITNTFNAISCDGDTSTNDMATIFATNEVKNSQVKSINENKIKNFDKSLNNVL

SEQ ID NO: 113411 - protein, 251 aa, Unknown
  Bacterial polypetide isolated from the Sargasso Sea
MTLKKVLIETTIQDRKIKIAGFAKGSGMIYPNMATMLAFLTCDAGIQKEEWQKMIAIAVKKSFNAISVDGETSTNDSFVGINAGEKIEKRFFPIIQKGIDIVCQNLAKNIARDGEGANCLLEVMVQGAKNTDDAIMLAKSICNSALVKTAIHGCDPNWGRIIAAAGNSGVKFNFNDVDLYIGNAQILKKGKFNKYDPQKVTDYIKSRMKGRYLVDDIVKIMINLNSGESKGTAWGCDLSKKYVEINSEYTT

SEQ ID NO: 113412 - protein, 168 aa, Unknown
  Bacterial polypetide isolated from the Sargasso Sea
MATMLAFLATDAAIEAPLLDELLLVAVEASFNRITVDGDTSTNDAVTLSATGQSGIEITAGSEYAEHFARALATLMIELAQDIVRDGEGASKFVEIRVIGGESEAACDQVARTVAHSPLVKTALFASDPNWGRILAAIGRTGLEDLNTEAVSIHLNGVLVAEHGARAA

SEQ ID NO: 113413 - protein, 211 aa, Unknown
  Bacterial polypetide isolated from the Sargasso Sea
MINVKGFKFSGISCGLKKSKKKDLGLIISSNECISHAVFTKNKVIAAPLIVSKEIINKNKLRAIIVNSGNANACTGDEGIRNVKSVINQAAKVSGLPKNNFFISSTGIIGEQLDVKKINTKLSKLFKDAKPNKSVDFAEAIRTTDKYIKIESTKIKIGNKTGTLLGIAKGAGMIHPNMATMLCYLITDIKINKSTFKKFINYATKNSFNSI

SEQ ID NO: 113414 - protein, 308 aa, Unknown
  Bacterial polypetide isolated from the Sargasso Sea
ILSENIKWNLKIRAKKIKGLLVNTRNANAFTGKKGFKGLKVIADDISELLTFKQKEDESDPKKIKPEEILFSCTGTIGEPFPTTKIKSALPTLVKNIKYTQNKYIWMKAAMAILTTDTKPKLAMEECYIGKTQVKIYGIAKGSGMIFPNMATTLGFLFTDADLSSRILDKILKKNIENTFNAISVDGDTSTNDMVVFFSTCKAKNQEINSIHDKKLSNFNSSVNRVLLNLAKRIASDGEGASKFVEVKVSACKSKEHAKKVGFSIANSPLVKTALNGEDPNWGRIIMAIGKSDVKINLNKLLIKIGEY

SEQ ID NO: 113415 - protein, 261 aa, Unknown
  Bacterial polypetide isolated from the Sargasso Sea
MKAAMGIITTDLKPKIAMEECKIGSSTVKLYGIAKGSGMIYPNMATTLGFIFTDATLSSNVLKKVLKKNIETTFNAISCDGDTSTNDMVAIFSTNKVKNSEIKNIGDKKLSEFSKSLHNVLLNLAKRVAADGEGASKFISISTINCKNEKQAKTISFSVANSPLVKTAIAGEDPNWGRIIMAIGKAKIKIDVKKLSIRFGNHKIIEKGELINNYNEEEVSSYMKSEKIDIIIDVGSGLKNFTVYTMDLTKKYIEINSDYRS

SEQ ID NO: 113416 - protein, 282 aa, Unknown
  Bacterial polypetide isolated from the Sargasso Sea
LFYFRDGANYASVFTQSKTISENIKWNLKVKSKKLYALLVNTRNANALTGAEGYQSLKELSLELSKYLSDKQNKDEENPKKINPYEIMFACTGTIGEKFPSDKIKSCIPKLIEKLKYTQNKLIWIKAALGIMTTDTKPKISMSECKIGSKLVKVYGIAKGSGMIYPNMATTLGFLFTDANLSSLTLKQVLKKNIENTFNAISCDGDTSTNDMVSIFSTNKANNSIIKNFNDPKLKNFNNSVKEVLLNLAKRVVSDGEGASKLISINCKNCRTENDAKKILSL

SEQ ID NO: 113417 - protein, 201 aa, Unknown
  Bacterial polypetide isolated from the Sargasso Sea
MKTNPTPPIPVQGFLWMGRNIGIKDQSLDFGVLAASHPCSAAAVFTRSNLPGAPVIVGREHAAKGTLQAIVVNSKCANVGLGEQGLQDARKMCQWTAEALKIQLELVLPASTGVIGLPLPMDKIREGTLSIATNLDNSAEAVESFARAIMTTDTHPKWRNSRSGHASLLGVAKGSGMIEPNMATMLSYLVTDAEIDHSKLQ

SEQ ID NO: 113418 - protein, 264 aa, Unknown
  Bacterial polypetide isolated from the Sargasso Sea
LKKADINQLDCLSQSIMTTDTHPKKISRTLVLDGEEIKIVGIAKGAGMIEPNMATMLAFILTDAKINSINLQTALKDAVDHSFNRITIDGDQSTNDSVLILANGAANQEELTSSSEDWSVFTKALHEICFELAMMIVHDGEGADRFVTLHVTGAVSNQEADAAARSVANSLLNKTAWAGSYPDWGRIMDAIGYSSAKIIEENTNIFYGDVQAAKNGCQSAVDHKDLVSAVSAKELLINVDLGLGKGSAVIYTCNCTERYVRINY

SEQ ID NO: 113419 - protein, 283 aa, Unknown
  Bacterial polypetide isolated from the Sargasso Sea
PKEINYNEILFGSTGTIGEKFPLSNIKNSIPNLIKNIKYTQNKLIWMKAAMGIITTDTKPKLAMSECKIGSNNIKIYGIAKGSGMIYPNMATTLGFVFTDANLSSSILQKILNESIKTTFNAISCDGDTSTNDMVSIFSTSKANNPIIKDFRDSKLKDFRQSLTDVLLNLAKRIAADGEGASKFISIKCQNTKTEEDAKKICFSIANSPLVKTAIAGEDPNWGRIAMAIGKSNVTISEKKLSINIGPFKVLVKGNLHKDYDEKIVSEYMQNELIDIIVDIGLG

SEQ ID NO: 113420 - protein, 231 aa, Unknown
  Bacterial polypetide isolated from the Sargasso Sea
YIGKSNIKIYGIAKGSGMIQPNMATTLGFIFTDADISNEILKKLLKKNIATTFNAITCDGDTSTNDMVTIFSTGKIKHSRIKNINDVKIAEFDKALNKILLNLAKRVVSDGEGASKFVTINVIKSKNEVDAKKIAFSIANSPLVKTAITGEDPNWGRIIMAIGKSGVPINLKKLSIKFGNTNIIQNGKMNVNYNEKDVSSYMKSDNIDIYIDISNGSKKFTAYTMDFTKKY

SEQ ID NO: 113421 - protein, 190 aa, Unknown
  Bacterial polypetide isolated from the Sargasso Sea
TLSNDVLGKLLKKNITNTFNAISCDGDTSTNDMATIFATNEVKNSQVKSVNENKIKNFDKALNNVLLNLAKRIVSDGEGASKFITINVSKCKNEIDAKKIALSVANSPLVKTAISGEDPNWGRVIMAIGKAGPKINLKKLSVKFGNIAIVEGGKLNQSYDEKQTANYMKSENIEINIETFTGNKNFTAYT

SEQ ID NO: 113422 - protein, 258 aa, Unknown
  Bacterial polypetide isolated from the Sargasso Sea
ASKAIMTTDKFNKIISQKITVSGKKVTVNAICKGAGMIEPNMATMLSFVSIDLNISRKNLNQILKKIVNKTFNRISVDGDMSTNDSVALIATGGNPNIKTDSFINMKEIECKLEKIFNHLSEMIVMDGEGATKLITINILKSKTESIAKKISYAIANSNLFKTAMHGSDPNWGRIIAKLGSIEGINFTPSKVKLFINDILLFDNETNAKRVNHKKLKTSMKNKKIKIDLFLNNGRQSYTIKTSDLSKQYIHLNSAYPT

SEQ ID NO: 113423 - protein, 270 aa, Unknown
  Bacterial polypetide isolated from the Sargasso Sea
MSSTGVIGVEIPVGLIINSIEKFNLDIHGGEKFSRAIITTDSKTKNISIEVKSKKGTYKIGGVAKGSGMIHPKMGTMLSYITTDAVISSSNLTNILRNSVKNSFNQVDVDGDTSTNDTVVIMSNGLSGAIINTKEDIDEFQEALNYVTKHLARLIAEDGEGISHLITVTVTGAKDEKDALEVSNTVVSSSLVKTAIFGKDPNWGRIMMAIGNANAEIIRDKVKIYVNGIQIAEDGKSISFHYQSVLSALDKFQIDIEIDLGIGDGKGIAW

SEQ ID NO: 113424 - protein, 312 aa, Unknown
  Bacterial polypetide isolated from the Sargasso Sea
STVSANLYNAKRDDLVMFYFRDGANFASVYTKSKIISENIKWNLNQKAKKIFSLIVNTRNANAFTGDQGYKSMQNIAEVISLELTNKQKQDESDPKIIKPKNILFGSTGTIGEIFPFQKIISKIPELIKNIKYTQNKLIWMKAALGIMTTDTQPKMAMEECYIGKTKIKIYGIAKGSGMIHPNMATTLGYVFTDADLSNDILKKLLNKNIETTFNAISCDGDTSTNDMVSIFSTSKAKHIKISSMKDKQLKDFDQSLNKVLLNLAKRVVADGEGSSKFITININDAKSDADAKKIAFSIGNSPLVKTAIAGE

SEQ ID NO: 113425 - protein, 276 aa, Unknown
  Bacterial polypetide isolated from the Sargasso Sea
YVYSAGLYNKKRLDLALFLFKNKTSVAEVFTKSSLRSCTLDWNEKNLKNKEIEALIVNSGNANTFTGQAGINALTKISNFVSNKFKVSVKKVFFASTGVIGEKFPENKIVNTLKKDKSKTNNWLQAAESIMTTDTFPKAISIETMIENKTITITGIAKGSGMIEPNMATMLGFIFIDCLIPQNILQKLLKDLVDKSFNQITVDGDESTNDTVIMTSTNSVSLKNKISSIKDKRISKIKNSLLPVVKYLAEQIVRDGEGATKLINIKVESAKNHRKQ

SEQ ID NO: 113426 - protein, 279 aa, Unknown
  Bacterial polypetide isolated from the Sargasso Sea
FPLEKIKTSLTQLVEKIKYTQNKLIWMKAAMGIITTDLKPKVAMAEAKIGSSTIKIYGVAKGSGMIYPNMATTLGYIFTDATLSSSVLNDVLKNNIKTTFNAISCDGDTSTNDMVSIFSTSKVSHPEIKKYSDSRLKNFNKAVHEVLLNLAKQVVSDGEGASKFISINCINCKTEKDAKNISFKIANSLLVKSAIAGEDPNWGRVAMAIGKSNTKINEQKLSISFGPYKIYHKGSLYKSYDEKKVMEYMKGQSIEIEVDIGQGIKKFKSFTMDLTKKIY

SEQ ID NO: 113427 - protein, 218 aa, Unknown
  Bacterial polypetide isolated from the Sargasso Sea
MATMLSFIFTDANIPSVFLKAILKKNVATTFNSITVDGDTSTNDMVAIFATSKAQNPKIYNILDPKLVEFEKALHRLTLNLAKQIVVDGEGAKKFITIKVINARSTNMAKNIGFSIANSPLFKTAIAGEDPNWGRIVMAVGKAGENITANKLQIKIGNYLIVDQNKRAPDYDEQQIKDYMKWDSIEIEVNLNIGNGSFTVYTCDFTHDYIDINADYRS

SEQ ID NO: 113428 - protein, 212 aa, Unknown
  Bacterial polypetide isolated from the Sargasso Sea
YVFTDAIIDKDTLDKITARLVNGSFNRITIDGDTSTNDAAMLAATGKSEISISNLETTEQEKYFSCLQYVFERLAIELVKDAEGATKFITINISEGKDEQECLKVAYCVAESLLVKTALFASDPNWGRILAVIGRAGLESLEIYKVDIDVGNVRIVSGGKIADSYTEEDGQAVMKHEEICITINLGRGNAKETVWTSDLSHDYVRINADYRT

SEQ ID NO: 113429 - protein, 196 aa, Unknown
  Bacterial polypetide isolated from the Sargasso Sea
MKKNITNTFNAISCDGDTSTNDMATIFATNEVKNSQVKSVNENKIQNFDKALNNVLLNLAKRVVADGEGASKFITINVSKCKNEIDAKKIAFSVANSPLVKTAIAGQDPNWGRVIMAVGKAGTKINLKKLTIKFGNIIIVEGGKLSQSYDEKLTSNYMKTENIEINIEIFTGKKNFTAFTMDLTKKYVEINSDYRS

SEQ ID NO: 113430 - protein, 261 aa, Unknown
  Bacterial polypetide isolated from the Sargasso Sea
MKAAMGIITTDIKPKIAMEECKIGNSSVKIYGIAKGSGMIYPNLATTLGFIFTDATLSSNVLKKILKKNIETTFNAISCDGDTSTNDMVTIFSTNKVKNSEIKNVGDKKLLEFSKSLHNVLLNLAKRVAADGEGASKFVTISTINSKNENQAKTICFSVANSPLVKTAIAGEDPNWGRIIMAIGKAKVKIDIKKLSIKFGHHKIIEKGELINNYQEDEVASYMKSEKIDITIDLGCGSKNFTAYTMDLTKKYIEINSDYRS

SEQ ID NO: 113431 - protein, 251 aa, Unknown
  Bacterial polypetide isolated from the Sargasso Sea
MTTDKYYKIKKSEISIGTKKGSIIGIAKGAGMIHPNMATMLCYLLTDIKFDTKTFKNFINRAVDSTFNCISVDGEMSTNDTVLGLSNGLLGNKKINDKSPQANKIYKSIENIFYGLSKDIVLDGEGSTKICKIIVKGAKNSRDSKRIARNIANSLLFKTALFGSDPNWGRIISAVGSTQIKYIDQNSIDIYIGDKLVVKNGLGLKLSKKINQIMRKKEIKIIIDLKKGKYESFMLTNDIGHEYIKINSLYT

SEQ ID NO: 113432 - protein, 247 aa, Unknown
  Bacterial polypetide isolated from the Sargasso Sea
TDTKPKLAMEECHIGSEKVKIYGIAKGSGMIYPNMGTTLAYVFTDATLSNDILGKLLKKNINNTFNAISCDGDTSTNDMVTIFATNAVKNSQVKSINENKIKSFDKALNNVLLNLAKRVVSDGEGASKFITINVSKCKNEIEAKKIAFSVANSPLVKTAIAGEDPNWGRVIMAIGKAGPKINLNKLLIKFGNIIIVDGGKLNQSYDEKQIANYMKFENIEINIETFTGKKNFTAYTMDLTKKYIEIN

SEQ ID NO: 113433 - protein, 233 aa, Unknown
  Bacterial polypetide isolated from the Sargasso Sea
KIYGIAKGSGMIYPDMATTLGFIFTDAKINGNILKLLLKKNIQNTFNAISCDGDTSTNDMVSIFSTGYANNKKINSYKDKSLNEFDKSLNTVLKNLAKSVAADGEGASKFIIIKVEKCKNENDAKNICFSIANSPLVKTAIAGEDPNWGRIVMALGKSKVKINLNKLNISIGPNKIIENGKINPNYNESEVAEYMKSYEININVQIGGGSKEFEVYTMDLTKKYIEINADYRS

SEQ ID NO: 113434 - protein, 280 aa, Unknown
  Bacterial polypetide isolated from the Sargasso Sea
QSKILSENIKWNLKQNNKKIYSLIVNTRNANAFTGKQGYESLKKLADIVSKKLTEKQNEDETTSRKIEPKEIMFGCTGTIGELFPYDKIASKVPDLINKIRYTQNKFIWMKAALGIMTTDTKPKLTMEECKIGNEKIKIYGIAKGAGMIHPNMATTLAYIFTDATLSNDILKKLLSKNIATTFNAITCDGDTSTNDMVTIFATSKVKNSTVKSLNDKKISSFDNALNKVLLNLAKRVVSDGEGSSKFITINVKKCKTENDAKKIAFSIANSPLVKTAVQA

SEQ ID NO: 113435 - protein, 290 aa, Unknown
  Bacterial polypetide isolated from the Sargasso Sea
RDDLTMFYFREGANYASVYTQSKIVSENIKWNINQRPKKIYSLIVNTRNANAFTGKQGYESLKKIADLTAKQLNKKQGEDEDNPKKISTKNIIFGCTGTIGEIFPYEKILNNIPNLINKIRYTQNKFIWMKAALAIMTTDTKPKLAMEECHIGSEKVKIYGIAKGSGMIHPNMATTLVYLFTDATLSNDILGKLLKKNITNTFNAISCDGDTSTNDMATIFATNKVKNSQVKSVNENKVKNFDKALRNVLLNLAKRVVSDGEGASKFIKINVAKCKNEIDAKKIVFRLQI

SEQ ID NO: 113436 - protein, 251 aa, Unknown
  Bacterial polypetide isolated from the Sargasso Sea
DLVPKIAMEECKIGNINVKLYGVAKGSGMIHPNMATTLGYIFTDARISSKILNKLLKKNIETTFNAISCDGDTSTNDMVSLFATGEAKNTVINNIHDERIKNFDKALHNILLNLAKRVTADGEGASKFITINIENAKTEKDAKKIAFSIANSPLVKTAFAGEDPNWGRVIMAIGKSQVQININKINISFGENKIVEKGELSKDYNEVELKEFMKNEKIDLNIDLKMGSKKFIAYTMDLTKKYIEINSDYRS

SEQ ID NO: 113437 - protein, 274 aa, Unknown
  Bacterial polypetide isolated from the Sargasso Sea
IVSENIKWNINQKPKKIYSLIVNTRNANAFTGKQGYESLKKIADLTVKLLNKKQEEDEDNPRKITTKNIIFGCTGTIGEIFPYVKISDNIPNLIKKINYTQNKFIWMKAALAIMTTDTKPKLAMEECHIGSEKVKIYGIAKGSGMIHPNMATTLAYIFTDATLSNDILGKLLKKNISNTFNSITCDGDTSTNDMVSIFATNEVNNHQVKSINENKIKNFDKALNNVLLNLAKRVVSDGEGASKFITINVSKCKNEIDAKKIAFSVANSPLVKTA

SEQ ID NO: 113438 - protein, 241 aa, Unknown
  Bacterial polypetide isolated from the Sargasso Sea
TKIGSSTIKIYGIAKGSGIIYPNMATTLGYIFTDATLSSSVLKDVLKNNIKTTFNAISCDGDTSTNDMVSIFSTNKVNNLEIKKYSDVRLKNFNKAVHDVLLNLAKQVVSDGEGASKFISINCINCRTDKDAKNISFKIANSLLVKTAIAGEDPNWGRVAMAIGNSDSKINEQKLSISFGPYKIYHKGSLYKSYDEEKVMEYMKGKSIEIEVDIGQGNKKFKSYTMDLTKKYIEINADYRT

SEQ ID NO: 113439 - protein, 412 aa, Unknown
  Bacterial polypetide isolated from the Sargasso Sea
MSQLDSNWSFVDDSKVTPKGFLFAGISAGLKASNKKDLALILAPEGSIFSGMFTQSIVRASCVDICEERIKTTSGFVRAILINSGQANACTGNLGIQHFQIATGKIAELLGIKEEEVLMCSTGVIGVPIQINDLVKNLPNLVSDLKGNNFANAAEAILTTDLTLKKVSIETIIQGRKIKIAGFAKGSGMIYPNMATMLAFLTCDAGIQKEEWDKMIAIAVQKSFNAISVDGETSTNDSFVGINAGEKIEKRFFPIIQQGIDIVCQNLAKNIARDGEGANCLLEVLVQGAKNTDDAIMLAKSICNSALVKTAIHGCDPNWGRIISAAGNSGVKFNLNDVDLYIGNAQILENGKLNEYDPQKVTDYIQSRMKGRYLVDDIVKIMINLNSGESKGTAWGCDLSKKYVEINSEYTT

SEQ ID NO: 113440 - protein, 226 aa, Unknown
  Bacterial polypetide isolated from the Sargasso Sea
GSGMIHPNMATTLAYIFTDATLSNDILGKLLKKNITNTFNAISCDGDTSTNDMATIFATNEVKNYQVKNVNENKIKDFDKALNNVLLNLAKRVVADGEGASKFITINVSKCKNEIEAKKIAFSVANSSLVKTAIAGEDPNWGRVIMAIGKAGPKINLNKLLIKFGNIIIIEGGKLNQSYDEKQTANYMKGENIEINVETFTGKKNFTAYTMDLTKKYIEINADYRS

SEQ ID NO: 113441 - protein, 239 aa, Unknown
  Bacterial polypetide isolated from the Sargasso Sea
IGSSKIKIYGIAKGSGMIYPNMATTLGYIFTDATLSSSVLNDVLKNNIKTTFNAISCDGDTSTNDMLSIFATSKVNHSEIKKYNDSRLKNFNKAVHEVLLNLAKQVVSDGEGASKFISINCINCRTERDAKKISFKIANSLLFKTAIAGEDPNWGRVAMAIGNSDAKINEQKLSISFGSYKIYYKGSLYKFYDEEKVKAYMKGQSIEIEVDIGQGIKKFKSYTMDLTKKYIEINADYRT

SEQ ID NO: 113442 - protein, 338 aa, Unknown
  Bacterial polypetide isolated from the Sargasso Sea
MPTKFVTLKLGIKKNIIDGLLIHIPPGSNTAMITTKNKFAASPVIISRENIKSGTIKYIFINSGNANACTGKEGHKNTKRILDILSKKLNCSLDQILIMSTGIIGRQLPIKKIIESITNSKLDIYSNIKKAASAIMTTDKFPKHLTKSYTIGAKKITFRGICKGAGMIEPNMATMLSFIETNADLSKSLLNKYIKHCAGVSFNSISVDGDMSTNDTVAFSSTGNIKLNTKNKSIEAKFIACASDFFIRLSSLIVKDGEGATKFIKLNVINAKSIILAQEISKKLSNSILVKTAMFGEDPNWGRIIASIGSIQSTHIKPLKITLMINNILCFKNGISID

SEQ ID NO: 113443 - protein, 319 aa, Unknown
  Bacterial polypetide isolated from the Sargasso Sea
MRESKKKEGISETVKIKDLIFASTGVIGETFPVEKITNNMSDLVSKLRDDQNKLIWIKTASAIMTTDTKPKLAYEEFTFNNKIIRIAAIAKGSGMIAPNLATMLSFIFTDADIPSNLLKTLLKKAVANTFNAITVDSDQSTNDMVSIFSTRKIKIGHNRGITDPVIQKFETSLKSVCLNLAKQIVVDGEGAKKFLTINVVNAKSILSAKKIAFSVASSPLVKTAIAGEDPNWGRVIMGIGKSGEKVDKNKISIKFGEFLLAENGSPVENLDYNKVREYMKWDSIIIEINLNTGSDFFECYTCDFTHDYIDINADYKNAT

SEQ ID NO: 113444 - protein, 433 aa, Unknown
  Bacterial polypetide isolated from the Sargasso Sea
MAIKISNFFNYQNNNSKIGDFQDLEHIDGVSISATTANLYNIKRDDVVMFYFRKGASYASVYTQSKIISENIKWNQKIKTKKIRAIIINTRNANAFTGAEGFKSLKVIAENLADGLSIKQKSDEEQPVRIKPNELLFACTGTIGEPFPQKKIIDCIPSLLKNLKYTQNKYLWIKASMGILTTDTKPKMAMDECKIGNTVVKIYGIAKGSGMIYPNMATTLGFIFTDAKLSSSILKKILKKSIANSFNAISCDGDTSTNDMVTIFATGEAKNSEIKNVNDQKLSEFQKKVDNVMLNLAKSVVADGEGATKFITISVLNCKNEEDAKKIAFSIANSPLVKTAINGEDPNWGRIIMAVGKTSAKLNLKKLKIMFGGVKIIENGELYSKYNEQDASDYMKNEKIDIFVDLNMGNKNFTAYTMDLSKKYIDINSDYRT

SEQ ID NO: 113445 - protein, 433 aa, Unknown
  Bacterial polypetide isolated from the Sargasso Sea
MVFNINNFFDDRNRKSKIADFQDLDHIDGVSISTVSANLYDKKRDDLVLFYFRNGASHASVYTQSNIVSENIKWNKKIKSKKLNALLINTRNANALTGSSGFIAIKQIAKELSNKLSEKQKLDEEHPKEIKSSEILFACTGTIGEKFPLNKIKNTIPNLIENIKYTQNKIIWMKAAMGIITTDTKPKLAMSECKIGSTNIKIYGIAKGSGMIFPNMATTLGFVFTDASLSSSVLQKTLNESIKTTFNAISCDGDTSTNDMVSLFSTNKANNPIIKDYKDSKLKNFRQALKDVMLNLAKRVAGDGEGASKLITIKCKNAKSEEDARNICFSIANSPLVKTAIAGEDPNWGRIAMAIGKSNARIDVKKLSINIGPYDILVKGNLFQDYNEKLVSEYMQNELIDITIDISLGNKHFTAYTMDLTKSYIEINADYRS

SEQ ID NO: 113446 - protein, 348 aa, Unknown
  Bacterial polypetide isolated from the Sargasso Sea
MVNTKNANTFTGSQGFEGVETLSKTLAKNLTLREAQKKEGTTSVIKPNEILFASTGVIGEKFPTQKIKECIPNLVEKLRDRQNKFIWFKSASSIMTTDTRPKLAFEECKFGNHDIRLCGIAKGSGMIAPNLGTMLSFVFTDADIPSIYLKSLLKKAVSNSFNSITVDSDTSTNDMVAIFSTNKFKAGKVYNALDPKLKDFENALQKLLLNLAKQIIIDGEGAKKFVTVKVINARSQQMAKKIAFSVANSPLFKTAMAGEDPNWGRVIMGIGKSGEKVSVDKIEIKFGDLKVAEKGRISDQYDEKKLKEYMKWDSLLIEINLKLGQGSYECYTCDFTNDYVNINADYRN

SEQ ID NO: 113447 - protein, 402 aa, Unknown
  Bacterial polypetide isolated from the Sargasso Sea
ISTTTANLYSKQRDDLVLFYFRKGANHASVYTQSKLISENIKWNLKINKKKIKALLINTRNANAFTGKDGYKGLKILADNLSDELTQKQKNDEEKPEKIEPNDILFACTGTIGETFPTEKIKKSIPSLIKKIKYTQNKYIWMKAALGILTTDLKPKLAMEECYIGNKVVKIYGIAKGSGMIFPNMATTLGFVFTDATISSTILKQLLKQNIQKTFNAISCDGDTSTNDMVSIFATGEVSNLSLSSVKDKKLSEFNSSLYNVLLNLAKRVAADGEGASKFISIKVKNCKTEEDAKKICFSIANSPLVKTAIAGEDPNWGRIIMAIGKANISLNPNKLVIKFGDILIIENGKLSSSYNEDEAATYMKEPKIDLLVNLNIGKKEFTSYTMDLTKKYIEINSDYRT

SEQ ID NO: 113448 - protein, 404 aa, Unknown
  Bacterial polypetide isolated from the Sargasso Sea
MKENNSQDFKPIKGILISSGCLGLYDNKRNDISLISLETDATVCGYFTQNIYRSATVVISEKNIKENPPKYIIVNAGNANACTGYEGELDIKKYCEKISELTNIKENLICPLSTGVIGERINVERFIKIIPLLLDSLSINNYKKFSKSIMTTDTYNKLCSSSFHCKNGEEIIINGVAKGSGMIFPKMATTLGFFFTNLRISKKSLDKICTQCLEESFNSITVDGETSTNDSLLVISSNTSNIEYEKLNNEDKIKFENTLRNSMIYLAKEVVRDGEGASKFITINVQGLRNTQDAKKAALCIANSNLVKTALFAEDPNWGRVVSALGNSNISYIDCKDLNLKINNLAVFENNSISDQYDEEAVKRSMKDKNIEISLIFSHGKSNATVWTSDLTYNYVKINAEYRS

SEQ ID NO: 113449 - protein, 227 aa, Unknown
  Bacterial polypetide isolated from the Sargasso Sea
KGSGMIYPNMATTLGFIFTDAKLSSSILKKILKKGIANSFNAISCDGDTSTNDMVTIFATGEAKNSEIKNVNDQKLNEFQKKVDTVMLNLAKSVVADGEGATKFITISVLNCKNEEDAKKIAFSIANSPLVKTAINGEDPNWGRIIMAVGKTSAKLNLKKLKITFGNVKIIENGELYSKYNEQEASDYMKNEKIEIFVDLNMGNKNFTAYTMDLSKEYIDINSDYRS

SEQ ID NO: 113450 - protein, 416 aa, Unknown
  Bacterial polypetide isolated from the Sargasso Sea
MGDFQDLDHIDGLSISVTSANLYSKQRDDLVLFYFRNGVNHASVYTQSKLISENIKWNLKINKKKIKALLINTRNANAFTGKEGFKGLKILADSLSQELTQKQKSDEEKPIKVEPDEILFGCTGTIGEIFPTEKIKKNIPDLIKKIKYTQNKYLWIKASMGILTTDLKPKLAMEECYIGNKLVKIYGIAKGSGMIYPNMATTLGYIFTDATISSSILKQLLKQNIQNTFNAISCDGDTSTNDMVSIFATGEVENSNVKSAKDKKLAEFNLSLNNVLLNLAKRVAADGEGASKFISIKVKNCRTEEDARKISFSIANSPLVKTAIAGEDPNWGRIIMAIGKANVNIIPNKISIKFGNINVIENGKLSNSYNEIEAANYMKEEKIELLINLNLGKKEFTSYTMDLTKKYIEINSDYRT

SEQ ID NO: 113451 - protein, 410 aa, Unknown
  Bacterial polypetide isolated from the Sargasso Sea
MTNSESPLKPKQVKKIYTISGVNLSLTNSEERYIGRDDLILISFKNKSNFAGVFTKSTAASEAVKWCQKIIKNNDIRAIIVNAGNANVFTGKLGKSAINKIVSKLSSCLKIFKNQILIAQTGVIGEPLKTHKIIDAISNLTDNLNSNNWQSAAKAIMTTDTYPKYSSLCYNFEGSKIHITGIAKGSGMIAPNMATMLAFISTDIKISKPILQKLLEEVSEETFNSISVDGDTSTSDSVILSATGMSDNKILKNKKDKHYEKFKDALLKISKDLALQIVRDGEGASKLITIRVSGTKNKIISKKVAFSIANSPLVKTAIAAEDANWGRIIMAIGKTNEIFDHKKLSIYIGKYLITYDGRRNNGYNENKLSKYMKNSEIEISVEFGSKKNKATIWTCDLTQKYIDINGKYRS

SEQ ID NO: 113452 - protein, 211 aa, Unknown
  Bacterial polypetide isolated from the Sargasso Sea
IFTDASLSNNILSKLLKKNIFNTFNAISCDGDTSTNDMVSIFATNKINNSKVKSINENKIKNFDSALNNVLLNLAKRVVSDGEGASKFISINVSKCKNEIDAKKIAFSIGNSPLVKTAIAGEDPNWGRIIMAIGKAGPKINLKKLCIKLGNLKIVQEGKLYQNYSEEVASKYMKKENIEISVEVYTGSKEFSAYTMDLTKKYIDINADYRS

SEQ ID NO: 113453 - protein, 413 aa, Unknown
  Bacterial polypetide isolated from the Sargasso Sea
FQNLEHLDGISISTISANLYDSKRDDLVMFYFRDGANYASVYTQSKIKSENIKWNLNLKNKKINALMINARNANAFTGKKGYQGLKEIADELAIQLSIKQKNDEEKPITIKPNQILFGCTGTIGEKYPTEKIKKSIPDLIEGIKYTQSKYIWMKAALGIMTTDLVPKLAMEECKIGNVDVRIYGIAKGSGMIFPNMATTLGYVFTDASLSSSILQKLLRKNIETTFNAISCDGDTSTNDMVTIFATNKSKNSMIKTINDSKLEEFEKSLHNVLLNLSKRIAADGEGASKFITVNVNNSKTQEEAKKIAFSIANSPLVKTAIAGEDPNWGRIIMAIGKANVNISLSKLEITFGKIKIIEKGQLSINYNEIEVAEYMKNEKIDLTINLNMGKKNFSAYTMDFTKKYVEINSDYRS

SEQ ID NO: 113454 - protein, 284 aa, Unknown
  Bacterial polypetide isolated from the Sargasso Sea
NKIKNTIPDLIDNIKYTQNKIIWMKAAMGIITTDTKPKLAMSECKIGSTNIKVYGIAKGSGMIFPNMATTLGFIFTDANLSSSVLQKSLNESIKTTFNAISCDGDTSTNDMVSLFSTNEANNPIIKDYKDSKLKSFRQALNDVMLNLAKRVAGDGEGASKFISIKCKNAKSEEDAKNICFSIANSPLVKTAIAGEDPNWGRIAMAIGKSNARIDVNKLSINIGPFNVLVKGNLFKDYNEKLVSEYMQNELLDITIDISLGKKNFTAYTMDLTKKYIEINADYRS

SEQ ID NO: 113455 - protein, 411 aa, Unknown
  Bacterial polypetide isolated from the Sargasso Sea
MTHPWRAIEGGITAPAGFQAAGITAGLKASGRSDLALVLAPAGAACGGSFTTNRVRAACVDLCAERLEATSGKAQAVLINSGQANACTGDLGLIDSHRATQAVADQLGLSQDEVLICSTGVIGVPIPMDTLLAGVAPLVSALGSTPEAAAAAADAILTTDLIDKQVALEAELGGRTVRIGGMAKGSGMIHPDMATMLGFFSCDAAVPADVWQAMVRRAVQHSFNSITVDGDTSTNDTVLAYAAGEPLAVEHHSGLEQGLTTAMQQLARAIARDGEGATLLLEVHVEGAADEAAAQAIARTVCGSSLVKTAVHGRDPNWGRIVAAAGRAGVPMDPDAVALWLGEHQLMAAGQPLAFDRAAASAYMRERAASSYLLDDTVVIRLVVGQGSGTATAWGCDLSDQYVRINADYTT

SEQ ID NO: 113456 - protein, 433 aa, Unknown
  Bacterial polypetide isolated from the Sargasso Sea
MKFNINNFIKTSSQSSKIVDFQDLDHIDGVSISAVSAGLYKFRRDDLVLFYFRNGANYASVYTQSKLISENLKWNKKIKAKKIFALLVNTRNANALTGPDGYDALRKISLDLSSKLTEIQKRDEDAPKQISPKEILFGCTGTIGEKFPLEKIKNSLPELVEKIKYTQNKLIWMKASMGIITTDLKPKVSMAETKIGSSTIKIYGIAKGSGMIYPNMATTLGYIFTDATLSSSILNDVLKNNIKTTFNAISCDGDTSTNDMVSIFSTCTVNHSEIKKYTDTRLKKFNEAVHYVLLNLAKQVVSDGEGASKFISINCINCKTEKDAKNISFKIANSLLVKTAIAGEDPNWGRVAMAIGNSDPKINEQKLSISFGNYKIFHKGSLYKSYDEEKVMEYMKGQLIEIKVDIGQGIKKFKSYTMDLTKKYIEINADYRT

SEQ ID NO: 113457 - protein, 374 aa, Unknown
  Bacterial polypetide isolated from the Sargasso Sea
SVYTQSKIISENIKWNLKIKTKKIKGLLVNTRNANAFTGKQGFNGIKELANDLSEKLTEKQKIDEEEPTKIYPQDLLFASTGTIGEEFPTEKIKLNLNKLVEQIKYTQNKYIWIKAAMGILTTDLKPKLTCEECKIGKSNVKIYGIAKGSGMIAPNMATTLGFIFTDANLSSGILEQILKKNIDNTFNAITCDGDTSTNDMVSIFSTCKINNPKIHNIKDKKLKEFDKTLNSVLLNLAKRVVSDGEGASKFIEITCVNSKSKDDAKKISFSIANSPLVKTAIAGEDPNWGRLIMAIGKANVRLDLKKISIKLGNHKIIDKGEKSNSYNEKDLKKYMQDERIDIIIDLGIGKESFTVYTMDLTKKYIEINSDYRT

SEQ ID NO: 113458 - protein, 406 aa, Unknown
  Bacterial polypetide isolated from the Sargasso Sea
MKFNINNFINTSSQSSKIVDFQDLDHIDGVSISAVSAGLYKFKRDELVLFYFRDGANYASVYTQSKLISENLKWNKKIKAKKIFALLVNTRNANALTGSEGYDALKKISLDLSSKLTEIQKRDEDVPKQISSKEILFGCTGTIGEKFPLEKIKTSLPELVEKIKYTQNKLIWMKAAMGIITTDLKPKLSMAETKIGSSSIKIYGIAKGSGMIYPNMATTLCYIFTDATLSSSVLNDVLKNNIKTTFNAISCDGDTSTNDMVSIFSLSKVNHSEIKKYSDSKLKNFNKAVHDVLLNLAKQVVIDGEGASKLISINCINCRTEKDAKNISFKIANSLLVKTAIAGEDPNWGRVAMAIGNSDSKINEQKLSISFGPYKIFHKGSLYKSYDEEKVMEYMKGKLIEIEVDI

SEQ ID NO: 113459 - protein, 281 aa, Unknown
  Bacterial polypetide isolated from the Sargasso Sea
KGQIQDLVEKLREKQNKFVWFKAASSIMTTDTRPKLAFETCRVWNKDIRISAIAKGSGMIAPNMGTMLSFVFTDADIPSVYLKSLLKKTVSNTFNAITVDSDTSTNDMVAIFATGKVKTGKFYNVLDPKLKDFEIALQKVLLNLAKQIVSDGEGAKKFVTVKVSNARSVNMAKNIAFSVANSPLFKTAIAAEDPNWGRIVMGIGKSGENISPEKIEIKIGEFKVAEKGRMAENIDEKKIKEYMQWDSIDIEINLKIGQANFECYTCDFTNEYININANYRS

SEQ ID NO: 113460 - protein, 254 aa, Unknown
  Bacterial polypetide isolated from the Sargasso Sea
MTTDTYPKIRYKKFKLENKFVSVVGIAKGSGMIAPNMATMLAFMITDVKISYGILKKLTANLCDKTFNSITVDSDTSTSDMVLISATSKVEMMPIEKLSDNRILKFSKMLELIMKELALDIVKDGEGAKKLVEYQIVGAKNDNSAKNIAFSIANSPLVKTAVAGEDPNWGRIIMAVGKSGEKIDQEKIKIYFGQYLITKNGKVYSEYDEEKAKNYMKKTELLIKVDLGIGKGSSTIWGCDLTKEYIDINADYRS

SEQ ID NO: 113461 - protein, 183 aa, Unknown
  Bacterial polypetide isolated from the Sargasso Sea
CDGDTSTNDMVSLFATGKANNSEIKNINDQKLKGFEKSLFNVLLNLAKRVAADGEGASKFITINVKNCKSDEDAKKISFSIANSPLVKTAIAGEDPNWGRVVMAIGKSNVSLKLNKLFLNFGSYKIIENGNLSKSYNEKEVANYMKNENIDIIVDLGIGKKEFTSYTMDLTKKYIEINSDYRS

SEQ ID NO: 113462 - protein, 313 aa, Unknown
  Bacterial polypetide isolated from the Sargasso Sea
KNDEEKPKKIEASEILFACTGTIGENFPTEKIKKSISDLIKKIKYTQNKYIWMKAAMGILTTDLKPKIAMEECYIGNKLVKIYGIAKGSGMIHPNMATTLGFVFTDATISSSILKQLLKTNIQKTFNAISCDGDTSTNDMVSLFATNKVANKKLRNSKDKKLNEFNSALFKVLLSLSKRVAADGEGASKFVTVKVKNCKTEEDAKKICFSIANSPLVKTAIAGEDPNWGRIIMAIGKANVNLNPKKLAIQIGKIKVIENGKICPSYNEQDAANYMKEKAIDLSVNLNLGKKEFTSYTMDLTKKYIEINADYRT

SEQ ID NO: 113463 - protein, 404 aa, Unknown
  Bacterial polypetide isolated from the Sargasso Sea
MESEIKINKKGDICSPKGFLSGSIFSGIKSPGQDKRDIGIIYSESDCISAGTFTQNTVVSPSVTWTKDITSNGNVRAIVANSGCANCAVGEQGLIDAKEMASIAANTLGIDQKEVAVASTGIIGVELPMALMRKFIPEIKMSKNDGNGFARSILTTDTKTKEISVSFEIDGKEINVAGVAKGSGMIHPNMATMLAFITSDIDIEKSALQEILKNSVKKSFNQISVDGDQSTNDTVLLLANGMAKNKKINTQGESKKFIEALDIVCTFLAKEIAKDGEGNTRLIEATVTGAKTEEDAMLASRFIVTSNLVKTAVYGRDPNWGRIIMALGASQIPLEESKIEIFVNDIQIVSEGIAISYNHQSIVIAMGEELIRFKINLNIGSESGVAWGSELTEEYVVFNSAYTT

SEQ ID NO: 113464 - protein, 251 aa, Unknown
  Bacterial polypetide isolated from the Sargasso Sea
MTLKQVSIETIIQGRKIKIAGFAKGSGMIYPNMATMLAFLTCDAGIQKEEWDKMIAIAVQKSFNAISVDGETSTNDSFVGINTGDKIEKRFFPIIQQGIDIVCQNLAKNIARDGEGANCLLEVLVQGAKNTDDAIMLAKSICNSALVKTAIHGCDPNWGRIISAAGNSGVKFNLNDVDLYIGNAHILEKGQLNKYDPQKVTDYIKSRMKGRYLVDDIVKIMINLNSGESKGTAWGCDLSKKYVEINSEYTT

SEQ ID NO: 113465 - protein, 341 aa, Unknown
  Bacterial polypetide isolated from the Sargasso Sea
MHPVSRGGSAVAMASSWQPIQGGVTAPNGFQAAGIVAGLKPSGKPDLALVLAPETAVCAGTFTTSVVRAACVDLCRDRLVSTAGQARAVLINSGQANACTGDRGLVDSQRATQVLADQLGVDAESVLICSTGVIGVPIPMPTLLAGLAPLMEALDDAGGDAAANAILTTDLVDKQVALELELEGRRVRIGGMAKGSGMIHPDMATMLGFFSCDAGVDAGVWRGMVQRAVQRSFNAITVDGDTSTNDTVLAFAAGPPLGQQHHAVLEQGLTQAMQQLAQAIARDGEGATCLIEVQVEGAVDEVAALQVARTVCGSSLVKTAVHGRDPNWGRILAAAGRSGVS

SEQ ID NO: 113466 - protein, 289 aa, Unknown
  Bacterial polypetide isolated from the Sargasso Sea
DKYPTQKIKENLPELVEKLREKQNKFIWFKAASSIMTTDTRPKLAFETCRVWNKDIRISAIAKGSGMIAPNLGTMLSFVFTDADIPSVFLKSLLKRAVTNTFNSITVDSDTSTNDMVAIFATGKVKTGKFYNVLDPKLKDFELALQKVLLNLAKQIVSDGEGAKKFVVVKVANARSINMAKNIAFSVANSPLFKTAMAAEDPNWGRIVMGIGKSGETVSPEKIEIKIGEFKVAEKGKVYENIDEKKIKEYMQWDSITIEINLKLGQANYECYTCDFTKDYIDLNADYRS

SEQ ID NO: 113467 - protein, 254 aa, Unknown
  Bacterial polypetide isolated from the Sargasso Sea
MTTDLKPKLAMEECKIGNKIIKIYGIAKGSGMIYPNMATTLGYIFTDADISSKILKQLLKKNINTTFNAISCDGDTSTNDMLSIFATGKAKNIEVKNINDNRLVEFNNSLNSVLLNLAKRIAADGEGASKFITINTLNCKTEDDAKKISFSIANSPLVKTAIAGEDPNWGRIIMAIGKANVNINPNKISIKIGPYKIIEKGQIHNSYKEQEVSNYMKDEKIDIFVDLSIGKKNFIAYTMDLTKKYIEINSDYRT

SEQ ID NO: 113468 - protein, 218 aa, Unknown
  Bacterial polypetide isolated from the Sargasso Sea
MGTMLSYIFTDANVDGTLLKSLLIDATKNSFNSITVDGETSTSDTVMLISTNEASNDMITKEDDPRINLFRNALNYVATDLAKQIVQDGEGATKFVEIIVSGAKNKDIATNIAKSVANSPLVKTAIYGEDPNWGRIIAAIGKSYEEINHEALGLFFGEHKIISAGMALDNYNEEIVKQYMKKDEIQIIIDLGMGSSDHTVWTCDFSHKYIDINTDYRS

SEQ ID NO: 113469 - protein, 422 aa, Unknown
  Bacterial polypetide isolated from the Sargasso Sea
MGINLTNFLSSKSKNKRMMEFQDLDHIDGVSISTVSANLYENNRDDLVMFYFRDGAQHASVYTQSKIVSENIKWNLNQKVKKIFSLIINTRNANCFTGKQGYKSLERIAELASEKLSEKQKEDEDEPKKIRNKEIVFGCTGTIGETFPEEKIKNKISELISKLKYTQNKYIWMKAALGMMTTDTQPKMSMKECLIGSSKVKIYGIAKGSGMIQPNMATTLGYIFTDADISNDILKKLLRKNIETTFNAISCDGDTSTNDMVSIFSTGKAKHPKINNVNDEKIKFFEESLNEVLLNLAKRVVADGEGASKFITINVQNCKTENDAKKIAFSIANSPLVKTAIAGEDPNWGRIVMAIGKAGVIPNYDKLSIKFGDFNIVQNGKLNANYNEIETADYMKNDNIEIFVDISNGTKNLLLTQWILLK

SEQ ID NO: 113470 - protein, 335 aa, Unknown
  Bacterial polypetide isolated from the Sargasso Sea
MGINLSNFLYSKSKNARMIDFQDLDHIDDLSISVVSANLYKDNRDDLSMFYFRNGANYASVYTQSNIVSENIKWNLNQNSKKIFSLVVNTRNANAFTGKQGYDSLKKLSNILSKELSNKQEQDEEIPKKISPKEIMFGCTGTIGELFPYDKIVSQIPNLINKIRYTQNKFIWMKSALAIMTTDTKPKLTMEECKIGNEKIKIYGIAKGSGMIYPNMATTLAYIFTDASLSNDILGKLLKKNITTTFNAISCDGDTSTNDMATIFATNKVKNSLVKSINDKKIRNFDNALHNVLLNLAKRVVSDGEGASKFVTVNVKKCKNEIDAKKIAFSIANSP

SEQ ID NO: 113471 - protein, 433 aa, Unknown
  Bacterial polypetide isolated from the Sargasso Sea
MGINLTNFLSSKSKSKRMMEFQDLDHIDGVSISTVSANLYNSSRDDLVMFYFRDGANSASVYTQSKIISENIKWNLNQKAKKIFSLLINTRNANCFTGRQGYKSLEKIAEIISQKLTEKQKEDDEEPKKIKLKEIIFGCTGTIGENFPEDKIKSKIPELINKLKYTQNKLVWMKAALGIMTTDTQPKMTMEKCFIGNSEIKIFGVAKGSGMIQPNMATTLGYIFTDADIKNDILKKLLKKNIATTFNAISCDSDTSTNDMVSIFSTGKSKHPKINSINDEKLKDFDNALNKVLLNLAKRVVADGEGASKFITVNVQECKNDIEAKKIAFSISNSPLVKTAIAGEDPNWGRIIMAIGKAGVQLNYEKLSIKFGSIMIVQNGKVNPNYKEEEAAEYMKNDSIDIFVNTSSGSKNFTAYTMDLTKKYIEINADYRS

SEQ ID NO: 113472 - protein, 387 aa, Unknown
  Bacterial polypetide isolated from the Sargasso Sea
MGINFTNFLSSKSKNKRMLEFQDLDHIDGVSISTISANLYEEPRDDLVMFYFRDGVNYASLYTQSKIISENIRWNLNQKTKKIFSLIINTRNANCFTGKQGYKSLEKIAELISQQLTKKQLEDEDQPKKIKPKEIIFGCTGTIGEIFPEEKIKDNIPELVNKIKYTQNKYIWMKAALGIMTTDTQPKMAMEKCFIGNTEIKIFGVAKGSGMIQPNMATTLAYIFTDADISNDILKKLLKKNISNTFNAISCDSDTSTNDMISIFSTAKSKHSKINNLNDEKLKNFDNSLNKVLLNLAKRVVADGEGASKFITINVQNCKNENDAKKIAFSVANSPLVKTAIAGEDPNWGRIIMAIGKAGVQFNHDKLSIKFGNLNIIQNGKIYTNYN

SEQ ID NO: 113473 - protein, 369 aa, Unknown
  Bacterial polypetide isolated from the Sargasso Sea
MGINLGNFLSSQSKNKRMKEFQDLDHVDGVSISTICANLYKDPRDDLVMFYFRDGANYASVYTQSKIISENIKWNLSSKVKKVFSLLINTRNANCFTGKQGFKSLEKIAELISEQLTKKQKEDEEKPKKIKSKEIIFGCTGTIGETFPEEKIKIKIPDLISKIKYTQNKYIWMKAALGMMTTDTQPKMAMEECLIGNSKIKIFGVAKGSGMIQPNMATTLGYIFTDADITNNILKKLLKKNISTTFNAISCDGDTSTNDMVSIFSTGKAKHSKINNFNDIKIKEFDNALNKVLLNLAKRVVADGEGASKFITIKVQNCKNENDAKKIAFSIANSPLIKTAIAGEDPNWGRIIMAVGKANVPINIRKLIN

SEQ ID NO: 113474 - protein, 362 aa, Unknown
  Bacterial polypetide isolated from the Sargasso Sea
MTINIKNFLKDNSKLSKMGEFQNLKQIEGMEMSSISADLYGDGRDDLALFYFSKGANYATLTTTNSITSEFIPWNNSSHKKIIKALLVNTKNANTFTGKQGKESIDILAKNLSRILTLKESKSKKGTSETVKIKDLIFASTGVIGEEFPVEKIKERLQDLADKLRSDQNKMYWLKIASAIMTTDTKPKVAYEEIIIGDELIRICGIAKGSGMIAPNLATMLSFIFTNADINSNLLKTLLKRAAANSFNAITVDSDQSTNDMVSIFSTRDLKIGQNLSLNDKVVQKFELALKKLCLNLAKQVVVDGEGAKKFLTINVINAKSLGSAKKIAFSIANSPLVKTAVAGEDPNWGRIAMGLGKSGEP

SEQ ID NO: 113475 - protein, 434 aa, Unknown
  Bacterial polypetide isolated from the Sargasso Sea
MTINLKNFLKDKPKLSKMGEFQELQEIDGLEVSAVSADLYGSGRDDLALFYFKDGANYAAVYTNNSICSESIVWNKGIRKTSIKALMVNTKNANTFTGPQGFESLDSISKNLAKNLTLREAQKQEGTKNVVKPNEILFASTGVIGEKFPTQKIKDSIPSLVEKLRDRQNKFIWFKSASSIMTTDTRPKLAYEECKFGNHDIRLCGIAKGSGMIAPNLGTMLSFVFTDADIPSIYLKSLLKKAVSNSFNSITVDSDTSTNDMVAIFSTNKFKTGKVYNALDPKLKDFENALQKLLLNLAKQIVSDGEGAKKFVTVRVINARSQQMAKKIAFSVANSPLFKTAIAGEDPNWGRVIMGIGKSGEKVSVDKIEIKFGDLKVAEKGKIYDNYDEKKLKEYMKWDSLLIEINLKLGQGSYDCYTCDFTNDYVKINADYRN

SEQ ID NO: 113476 - protein, 336 aa, Unknown
  Bacterial polypetide isolated from the Sargasso Sea
EKNLESKEIQALIINSGNANTFTGQAGVKALTKISKVVSNKFKVSIKKVFFASTGVIGEKFPEQKIVNVLKKNKSNSKNWLQAAKAIMTTDTFPKAISVKTRIEDKTITITGIAKGSGMIEPNMATMLGFIFIDCLIPQNILQKLLKDLVDNSFNQITVDGDESTNDTVIMTSTNSVSLKNTISSIKDKRILKIKNSLLTVFKYLAEQIVRDGEGATKLLNIKVESAKNLSQAKKIAKAVANSPLVKTAFYGNDPNWGRIVMAIGKTYERINPKKLKIHIGKQIVVTNGTEHKKLNLHKLKRYMASKEIDIKLDLGQGNVFINRKHVIFTQICDIN

SEQ ID NO: 113477 - protein, 255 aa, Unknown
  Bacterial polypetide isolated from the Sargasso Sea
AALGIMTTDTKPKIAMEQCNIGGEIVKIYGIAKGSGMIHPNMATTLAYIFTDASLSNDILNKLLKKNIFNTFNAISCDGDTSTNDMVTIFATNKINNSKIKNINENKIKNFDRALNNVLLNLAKRVVADGEGASKFISINVSKCKNEIEAKKIAFSIGNSALVKTAIAGEDPNWGRVIMAIGKAGPKINLKKLCIKFGNLKIVQDGKLYQNYSEEVVSKYMKKENIEINVEVYTGKKDFTAYTIDLTKKYIDINS

SEQ ID NO: 113478 - protein, 263 aa, Unknown
  Bacterial polypetide isolated from the Sargasso Sea
CLVQAASAIMTTDTRPKVAYEECKIGNKLIKISGIAKGSGMIYPNMATMLAFIFTDANIPSVFLKAILKKVVSTTFNSITVDGDTSTNDMVGIFATGKAKNSKIYNVLDPKLQDFEKALHRLSLNLAKQIVVDGEGAKKFISVNVIGARSTRMAKNVGFSIANSPLFKTAVAGEDPNWGRIAMAIGKSGENVIQNKIQIKIGNYLVAEQSRMVKNYNESDIKKYMQWDSIDIEVNLNIGNESYTVYTCDFTHDYIDINADYRN

SEQ ID NO: 113479 - protein, 275 aa, Unknown
  Bacterial polypetide isolated from the Sargasso Sea
KIFSLLVNTRNANSFTGTHGYKSMQIIAENISLQLSDKQKQDEDSPKKIKPKNILFGCTGTIGEIFPTNKINSKIPELIKNIKYTQNKLIWMKAALGIMTTDTQPKMAMEECYIGKTLIKIYGIAKGSGMIHPNMATTLGYIFTDAELSNEILKKLLKKNIERTFNAITCDGDTSTNDMVSFFSTGKADHVKIKNINDKRLIDFDNSLNKVLLNLAKRVVADGEGASKFIKITVSDAKTDLDAKKIAFSIGNSSLVKTAIAGEDPNWGRVIMAIG

SEQ ID NO: 113480 - protein, 297 aa, Unknown
  Bacterial polypetide isolated from the Sargasso Sea
CAAPVQISKDNLNESKPRICLINAGNANAGTGESGIQNARIVCETLANLTHCSKSEILPFSTGVIGEDLPVEKINKVLPILLKNLSGDHWLDVAKSIMTTDTIPKAISGQVKILNSTISITGIAKGSGMIKPNMATMLSFLATDANVTKDCLDEIKDRAIKKSFNRIIVDGDTSTNDSFLLISTCKANNSIINNKDSKEFKVLENEITKVCCNLAQAIVRDGEGATKFISIVVEEGKDEAECLSVAYKIAQSPLVKTAFTASDPNWGRIIAAIGNANVGRLDTTKVNIHINNVCVVD

SEQ ID NO: 113481 - protein, 232 aa, Unknown
  Bacterial polypetide isolated from the Sargasso Sea
LVEKLREKQNKFIWFKAAASIMTTDTRPKLAYEECRIWNKDIRLSAIAKGSGMISPNMATMLAFVFTDAEIPSVFLKSLLKRAMTNTFNAITVDSDTSTNDMVAIFSSNKVKTGKFYNVLDPKLKDFEMALQRLLLNLAKQIVSDGEGAKKFITVKVVNARSQQMARTIAFSIANSPLFKTAMAGEDPNWGRIIMAIGKSGEKISPDKIEIKFGELKVAEKGKISDEYDEAK

SEQ ID NO: 113482 - protein, 254 aa, Unknown
  Bacterial polypetide isolated from the Sargasso Sea
MTTDTRPKLAYEECKIGNKLIKISGIAKGSGMIAPNMATMLSFIFTDANIPSVFLNAILKKVCMTTFNSITVDGDTSTNDMVAIFATGKAKNSKIYNVLDPKLQDFEKALHRLALNLAKQIVVDGEGAKKFITIKVIGARSSTMAKKIGFSIANSPLVKTAIAGEDPNWGRIVMAIGKSGENIAPNKIQIKIGDYLIAEQSKAAKDYNEKDIKNYMKWDSIAIEVNLNLGNAYHTVYTCDFTHRYIEINADYRN

SEQ ID NO: 113483 - protein, 297 aa, Unknown
  Bacterial polypetide isolated from the Sargasso Sea
AYRKQKEDEDYPKIIKPKNIIFGCTGTIGEKFPEEKIKLRIPDLIKNIKYTQNKYIWMKAALSIMTTDTQPKIAMEECKIGNTLVKIYGIAKGSGMIQPNMATTLGYIFTDADISNDVLKKLLKKNIENTFNAISCDGDTSTNDMISIFSTGKAKNTLIKTINDKKLKSFDVSLNNVLLNLAKRVVADGEGATKFVTINVLNSKTELDAKKVGFSIANSSLVKTAIAGEDPNWGRVIMAIGKSGIDINLSKLSLKFGEFIIVNKGKIYSQYNENEAAKYMKNSDINISIDIGNGKKI

SEQ ID NO: 113484 - protein, 268 aa, Unknown
  Bacterial polypetide isolated from the Sargasso Sea
KKTYLINDNNIFVASTGVIGEKFPISQVLKTITKPQMTKEWMNSARAIMTTDTFPKGVSVTSMIEGKRNTITGISKGSGMIEPNMATMLGFIFIDADFGSEILNKLLKENISYSFNSISVDGDESTNDTVILASTRAIKFKKPIKNVNDKRIIDFKKKLKKVFMKLSELIVRDGEGATKLIEINVLNARNEKDANTFAKSIANSPLVKTAIHGSDPNWGRIIMALGKTYININIKKLKVYFGKYLVIKNGTAHSKVDDKIISKYLGKD

SEQ ID NO: 113485 - protein, 284 aa, Unknown
  Bacterial polypetide isolated from the Sargasso Sea
EKISHQIPNLINKIRYTQNKFIWMKAALGIMTTDTKPKIAMEECKIGNEKVKIYGIAKGSGMIHPNMATTLAYIFTDASLSNDILRKLLKKNIFNTFNAISCDGDTSTNDMVSIFATNKINNSQVKNINENKIKNFDRALNNVLLNLAKRVVSDGEGASKFVSINVSKCKNEIDAKKIAFSIGNSPLVKTAIAGEDPNWGRIIMAIGKAGPKINLKKLCVKFGNLKIVEEGKLYKNYSEEVAIKYMKKENIEISVEVYTGKKEFTAYTMDLTKKYIDINADYRS

SEQ ID NO: 113486 - protein, 288 aa, Unknown
  Bacterial polypetide isolated from the Sargasso Sea
IGEFLPMSRLAGAILEASTKLDSGGWERAATAIMTTDTRSKIVSSQTNIAGQLITITGIAKGSGMIKPDMATMLAFIASDIPIERTLLKKLLAEICDKSFNRITVDGDTSTNDCFMLACTGAADMPMISSEADRRYEQVKSVFLEQARNLAQSIVRDGEGATKFISVLVQGGVDEEECLAVAYSIAESPLVKTALFAGDPNWGRFCMAIGKAPVDNIDTSLVELWLDDVLVAKEGMLSSSYSEDQGVKVLAQDEFLVKVCLGRGDSSAEIWTTDLSYEYVKINAEYRT

SEQ ID NO: 113487 - protein, 289 aa, Unknown
  Bacterial polypetide isolated from the Sargasso Sea
MFGCTGTIGELFPYDKIVGQIPNLINKIRYTQNKFIWMKAALGIMTTDTKPKLAMEECKIGNEKIKIYGIAKGSGMIYPNMATTLAYIFTDASLSNNILGKLLKKNITTTFNAISCDGDTSTNDMATIFATNKVKNSLVKSIKDKKIKNFDTALQNVLLSLAKRVVSDGEGASKFVTVNVKKCKNEIDAKKIAFSIANSPLVKTAIAGEDPNWGRIIMAIGKAGPKINLNKLSIKLGNIKIVQNGKLHQEYDEKLAANYMKNENINLDIEVLSGNKSFTAYTMDLTNKY

SEQ ID NO: 113488 - protein, 261 aa, Unknown
  Bacterial polypetide isolated from the Sargasso Sea
MKAALGIMTTDTQPKMAMEQCLIGNANIKIYGIAKGSGMIQPDMATTLAYIFTDADISNDILKKLLKKNVYNTFNAITCDGDTSTNDMITIFSTSKANHTKINSISDPKIKEFDEALNKVLLNLAKRVVADGEGASKFITINVKNCKTDEDAKKIAFSISNSSLVKTAIAGEDPNWGRVVMAIGKAGATINLEKLSIKFGNIIIVSKGKVNSNYSESEVANYMKNSNIDIHIDGSSGTKNFIAYTMDLTKKYVEINSDYRS

SEQ ID NO: 113489 - protein, 260 aa, Unknown
  Bacterial polypetide isolated from the Sargasso Sea
FGCTGTIGEIFPYEKISNNIPNLIKKINYTQNKFIWMKAALAIMTTDTKPKLAMEECHIGSEKVKIYGIAKGSGMIYPNMATTLVYIFTDATLSNDILGKLLKKNITNTFNSISCDGDTSTNDMATIFATNEVKNSQVKSINENKIKNFDKALNNVLLNLAKRVVSDGEGASKFITINVSKCKNEKDAKKIAFSVANSPLVKTAIAGEDPNWGRVVMAIGKAGPKINLNKLSIKFGNLTVVEAGKLNQSYDEKQTANYMK

SEQ ID NO: 113490 - protein, 299 aa, Unknown
  Bacterial polypetide isolated from the Sargasso Sea
GINALTKISNFVSNKFKVSVKKVFFASTGVIGEKFPENKIVNTLKKDKSKTNNWLQAAQSIMTTDTFPKAISVKTMIENKTITITGIAKGSGMIEPNMATMLGFIFIDCLIPQNILQKLLKDLVDKSFNQITVDGDESTNDTVIMTSTNSVSLKNKISSIKDKRVSKIKNSLLPVIKYLAEQIVRDGEGATKLINIKVESAKNSPQAKRIAKAVANSPLVKTAFYGNDPNWGRIVMAIGKTYEKIDPKKLKIYIGKQTVVANGAEYKKLNLQKLKKYMASKEIDLKLDLGQGNYSLKHK

SEQ ID NO: 113491 - protein, 332 aa, Unknown
  Bacterial polypetide isolated from the Sargasso Sea
LPGAPVIVGREHAAKGHFRAIVVNSKCANVGLGEQGLQDARKMCQWTAEALMIKPELVLPASTGVIGLPLPMEKIREGTLSIATNLDNSAEAVESFARAIMTTDTHPKWRNARSGHASLLGVAKGSGMVEPNMATMLSYLVTDAEIDHSKLQEMLKRAVDSSFNRISIDTDTSTSDMVVLMANGMAGRVNEDEFEKNLNGLCQDLAKDLVRDGEGVTKLIELKISGADSPQMAQKIGKSIINSPLIKTAVHGADPNWGRFVMAVGKVFEHPVRLEELEIRFGLGEKMQAVNSQLLKEEAVKLESISELLQKDTIPIEVVVGHGDHAEIFWGC

SEQ ID NO: 113492 - protein, 304 aa, Unknown
  Bacterial polypetide isolated from the Sargasso Sea
IRKNFIKALLVNTKNANTFSGPNGQEGLQTISKTLAKNLTLKEAQKEDGTTNVIKPNEILFASTGVIGEKFPTQKIKGSIPNLVEKLRDKQNKFVWFKAASSIMTTDTRPKLAYEECRLWNKDIRLSAIAKGSGMIAPNMATMLAFVFTDADIPSVYLKGLLKRTVNNSFNAITVDSDTSTNDMVAIFSTNKVKTGKIYNQLDPKLKDFENALQRLLLNLAKQIVSDGEGAKKFITVKVLNARSQQMAKTIAFSIANSPLFKTAMAGEDPNWGRIIMAIGKSGEKVSPEKIENKFGELKVAEKG

SEQ ID NO: 113493 - protein, 237 aa, Unknown
  Bacterial polypetide isolated from the Sargasso Sea
MPVPGVRLAAVEAGIKKANRKDLVLLELAEGSRVSGVFTLNRFCAAPVQVAKARLATTTPRYLMINTGYANAGTGKKGLENCLASCELLAKAAGCQADEILPYSTGVIGEQFPLTAFASGLPKALAALDPHHWGRASEGIMTTDTYPKLTSRRVEMNGVPVTVTGMSKGSGMIKPNMATMLGFIATDAPIAKPLLDQWVKALADKSFNRVTVDGDTSTNDACMLISTAQAEMDQITA

SEQ ID NO: 113494 - protein, 281 aa, Unknown
  Bacterial polypetide isolated from the Sargasso Sea
RKIKDKKIYGILINTRNANALTGNDGYNSLKKISLNISKLLTAKQIEDEDKPREIKPNQILFACTGTIGEKFPINAILNNTKNLVDKIKYNQNKLIWIKAALGIMTTDTKPKLSMAECKIGGSNVKIYGVAKGSGMIFPNMATTLGFIFTDANISSSILKQILNLNIKTTFNAITCDGDTSTNDMVSIFSTGSANNKEIKSFKDPKLKQFINSVHQVMLNLAKRVASDGEGATKFVTIKCLNSKTEKDAKNICFSIANSPLVKTAIFGEDPNWGRIAMQSE

SEQ ID NO: 113495 - protein, 278 aa, Unknown
  Bacterial polypetide isolated from the Sargasso Sea
AEAVAEASSKLTPGEWERAATAIMTTDTRPKIVSSQVKIAGQLVTITGVAKGSGMIKPDMATMLAFIASDIPIERTLLKELLTEICDKSFNRITVDGDTSTNDCFMLACTSVVDMPVISSQDDPRYDQVKDIFLDHAKVLAQSIIRDGEGATKFISILVEGGVNEEECLAVAYSVAESPLVKTALFAGDPNWGRFCMAIGKAPVDQIDVNLVELWLDDVLVAKQGMLSSSYSEDQGVKVLAKDEFTVRICLGRGESSAEIWTTDLSYDYIKINAEYRT

SEQ ID NO: 113496 - protein, 306 aa, Unknown
  Bacterial polypetide isolated from the Sargasso Sea
GAQGLKEVANAVSKALTLKSSQTPKGVSDVVKITDLLFASTGVIGEEFPYIKIKNRVPELVKKLRIEQNKFVWFKTASAIMTTDTRPKLAYEECKIGNKVIKISGIAKGSGMIHPNMATMLSFIFTDANIPSVFLKSILKKVAATTFNSITVDGDTSTNDMVGIFSTGKAKNSKIYNVLDPKLQDFEKALHRLCLNLAKQIVVDGEGAKKFITIKVIGARTNAMAKNIGFSVANSPLFKTAIAGEDPNWGRIVMAIGKSGENVIANKIQIKIGDFLVAEQSKVAKDYDEEKLKEYIEMGFYRHRDK

SEQ ID NO: 113497 - protein, 274 aa, Unknown
  Bacterial polypetide isolated from the Sargasso Sea
LPDVARKLGKARWADAAAAIMTTDTFPKAAMRKVTIGKSSVTLVGIAKGSGMIAPDMATMLSFIFTDAKIPAPVLQRLLKDTTDRSFNSITVDSDTSTSDTVLLVATGQAKHAQVSGIGDKHLKAFRAALREIAIDLATQVVRDGEGAQKFVTIDITGAESASAARRIGLAVANSPLVKTAIAGSDPNWGRIVMAVGKAGEKADRDLMSIGMGGVPITVNGQLVDGYDETVTENHMMGRDITISIDVGVGRGRARVWTCDLTHGYIEINADYRT

SEQ ID NO: 113498 - protein, 300 aa, Unknown
  Bacterial polypetide isolated from the Sargasso Sea
KKIKDKKIFGILINTRNANALTGKDGYNSLKKISLTLSKLLTSKQISDDDKPREIKANQILFACTGTIGEKFPENVILNNTKNLVEKLKYTQNKLIWIKAALGIMTTDTKPKLSMAECKIGSSEVKVYGIAKGSGMIFPNMATTLGFIFTDANIPSSILKQILNLNIRTTFNAITCDGDTSTNDMVSIFSTGKANNKEIKSFKDPKLKQFINSVHQVMLNLAKRVASDGEGATKFVTIKCLNSKTEKDAKNICFSIANSPLVKTAIFGQDPNWGRIAMAIGKRGATVKHEKLSISMGSNI

SEQ ID NO: 113499 - protein, 261 aa, Unknown
  Bacterial polypetide isolated from the Sargasso Sea
MKAALGIMTTDTKAKLAMEECQIAGKKVKIYGIAKGSGMIFPNMATTLGYLFTDADLSSSVLKQLLKKNIETTFNAISCDGDTSTNDMVSIFSTKKVKNPYIKNIHDKRIREFDQSLNRILLNLAKRVAGDGEGATKFITINVKNCKKDKDAKKIAFSIANSPLVKTAIAGEDPNWGRIIMAIGKSGIKIQLNKLSMKFGNIKIIDKGEISDNYSEESAANYMKENKIDLTIDFGIGIKNFTAYTMDLTKKYIEINADYRT

SEQ ID NO: 113500 - protein, 265 aa, Unknown
  Bacterial polypetide isolated from the Sargasso Sea
KFIWFKAASSIMTTDTRPKLAFETCRVWNKDIRLSAIAKGSGMIAPNMATMLSFVFTDADIPSVYLKSLLKKAVTNTFNAITVDSDTSTNDMVAIFATGKVKTGKFYNVLDPKLKDFESALQRLLLNLAKQIVSDGEGAKKFITVKVINARSINMAKNIAFSVSNSPLFKTAMAAGDPNWGRIVMGIGKSGEKVSPEKIEIKIGEFKVAEKGRVAENIDEKKIKEYMEWDSITVEINLRMGQAYYECYTSDLTKDYIDINADYRS

SEQ ID NO: 113501 - protein, 261 aa, Unknown
  Bacterial polypetide isolated from the Sargasso Sea
MKAALGIMTTDTQPKMAMEICQIGNTEIKIFGVAKGSGMIQPNMATTLGYIFTDANLSNEILKKLLKKNIATTFNAITCDGDTSTNDMVSIFSTGKAKHSKIKNVNDDKIKDFELALNNVLLNLAKRVVADGEGASKFITINVENCKNENDAKKIAFSIANSPLVKTAIAGEDPNWGRVVMAIGKSGVILNLDKLSIRFGDIYIVQNGKLFTNYNESEVSSYMEGDNIDINVSISSGSKKFTAYTMDLTKKYLEINSDYRS

SEQ ID NO: 113502 - protein, 307 aa, Unknown
  Bacterial polypetide isolated from the Sargasso Sea
LKNYKQKYNFLVAQVLLGEIFPYEKISNNIPNLVKKIRYTQNKFIWMKAALAIMTTDTKPKLAMEECLIGNEKVKIYGIAKGSGMIYPNMATTLAYIFTDATLSNDILSKLLKKNITNTFNAISCDGDTSTNDMVTIFATNEVKNSQVKSINENKIKNFDNALNNVLLNLAKRVVSDGEGASKFITINVSKCKSETDAKKIAFSVANSPLVKTAIAGQDPNWGRVIMAIGKAGPKINLKKLLIKFGSMIIVESGKLNKNYDEKQTENYMKGENIEINIETFTGNKNFTAYSMDLTKKYIEINADYRS

SEQ ID NO: 113503 - protein, 244 aa, Unknown
  Bacterial polypetide isolated from the Sargasso Sea
FTKNYFCAAPIKVSKDNLIKEKPRYCLINAGNANAGTGETGLSNAKATCKELSRITNCSEYEVLPFSTGVIGENLPVEKICKVLPRLVKDLSDNSWLDVAKSIMTTDTIPKAFSTQVNLNGSMASVTGIAKGSGMIKPNMATMLAFIATDANVTKDTLDKIKANVLSKSFNRITVDGDTSTNDSFILISTCQLGNKVIDQQNSSEYKALENKIEKICCELAQAIVRDGEGATKFISIKVNEGNS

SEQ ID NO: 113504 - protein, 314 aa, Unknown
  Bacterial polypetide isolated from the Sargasso Sea
IFSLIINTRNANSFTGEQGYKSMQHLADLISKQLTEKQKEDDNHPILIKPKNIIFGCTGTIGEKFPEEKIKLKIPELIKKIKYTQNKYIWMKVALAIMTTDTQPKIAMEECKIGNTTVKIYGIAKGSGMIQPNMATTLAYIFTDADISNDVLKKLLKKNIENTFNAISCDGDTSTNDMISIFSTGKAKNTLIKTINDKKVKSFDESLNKLLLNLAKRVVADGEGASKFVTINVLNSKSEQDAKKIGFSIANSPLVKTAIAGEDPNWGRVIMAIGKSKVNINLNKLSIKFGDLIIVNKGKIHNQYDENEAAKYMK

SEQ ID NO: 113505 - protein, 264 aa, Unknown
  Bacterial polypetide isolated from the Sargasso Sea
EILFASTGVIGEKFPTQQIKGSIPNLVEKLRDRQNKFVWFKAASSIMTTDTRPKLAYEECRLWNKDIRLSAIAKGSGMIAPNMATMLAFVFTDADIPSVYLKGLLKRAVTNSFNAITVDSDTSTNDMVAIFSTSKVKTGKIYNVLDPKLKDFENALQRLLLNLAKQIVSDGEGAKKFIVVKVINARSQQMAKSIAFSIANSPLFKTAMAGEDPNWGRIIMAIGKSGEKISPGKVEIKFGDLKVAEKGKISEEYDEEKLKEYMKW

SEQ ID NO: 113506 - protein, 298 aa, Unknown
  Bacterial polypetide isolated from the Sargasso Sea
LTGKQGYSSISQLADELSKKLKFKKNEILFSSTGVIGEKFPLDTIKNKIQELTENLGSMNKLKWIKSARAIMTTDTTPKMTYSQLKINKQIYSISGIAKGSGMVFPNMGTMLGFIFTDIKISQKLLSNALKENLNSTFNAISVDGDTSTNDMVIVFSTQKAKNKIIDKTNSKEFIDFKKNLHEVMLNLSKQIVMDGEGAKKFIEINVNNAKSENSAKKIAFAIANSQLVKTAIAGEDPNWGRILMAAGKSGENINVNKINLKIGNYIIFSSGIINKNYNEENVKKYMKNKFLNIEISI

SEQ ID NO: 113507 - protein, 441 aa, Unknown
  Bacterial polypetide isolated from the Sargasso Sea
MRRPARAAAGSSNRCRRMPAFSIRQVCPMAVNFPSIDPAQLHPVAGVTLGWAEANIRKPNRKDVLVISVDEGATVAGVFTENRFCAAPVTVCREHLAKVRAGGAGIRALVVNTGNANAGTGEPGLVNARETCTELARLAGIEPAQVLPFSTGVILEPLPIDRLKAGLPAALANRTAANWFDAAQAIMTTDTLPKATSRQVTIDGHTVTLTGISKGAGMIKPNMATMLGFLAFDANVAQPVLDTLVKEVADRSFNCITIDGDTSTNDSFILIASGKSTLPAITSTDSPAYAALRDAVTEVAQVLSQLIVRDGEGATKFMTVQVEGGKSVAECRQIAYAIGHSPLVKTAFYASDPNLGRILAAIGYAGVADLDVDKIDLYLDDVLVAKAGGRNPAYQEEDGQRVMKQSEITIRVLLGRGDAQATIWTCDLSHDYVSINADYRS

SEQ ID NO: 113508 - protein, 446 aa, Unknown
  Bacterial polypetide isolated from the Sargasso Sea
MVISRWFGNALEPSVSVSIDAGACRHFLRQVATMAVNFPSIDPAQLHPVAGVTLGWAEANIRKPNRKDVLVISVGDGATVGGVFTQNRFCAAPVTVCRENLERVRQGGKPIRALVINTGNANAGTGEPGLVAARETCAELARLADIAPEQVLPFSTGVILEPLPVDRLKAGLPAALANRKEANWYDAAQAIMTTDTLPKAVSRQVTIEGHTVTLTGISKGAGMIKPNMATMLGFLAFDAAVAQPVLDALVKHVADRSFNCITIDGDTSTNDSFILIASGKSSLPAITSTDSPAYAALRDAVTEVAQTLAQLIVRDGEGATKFMTVHVEGGSSAGECRQIAYAIGHSPLVKTAFYASDPNLGRILAAIGYAGVDDLDVGKIDLYLDDVLVATAGGRNPAYREEDGQRVMKKSEIGIRVVLGRGNAQATIWTCDLSHDYVSINADYRS

SEQ ID NO: 113509 - protein, 268 aa, Unknown
  Bacterial polypetide isolated from the Sargasso Sea
NQNKLIWIKAALGIMTTDTKPKLSMAECKIGGSEVKIYGIAKGSGMIFPNMATTLGFIFTDANISSSILKQILNLNIKTTFNAITCDGDTSTNDMVSIFSTGKANNKEIKSFKDPKLKQFINSVHQVMLNLAKRVASDGEGATKFVTIKCLNSKSEKDAKNICFSIANSPLVKTAIFGEDPNWGRIAMAIGKSGATVKHEKLSILMGSNMILKDGKLVKDYNESILSDYMKNENIEITIDLSIGNKEFTAYTMDLSKEYIEINSDYRS

SEQ ID NO: 113510 - protein, 433 aa, Unknown
  Bacterial polypetide isolated from the Sargasso Sea
MGINITNFLSSKSKNAKMIDYQDLDHIDGLSISVVSANLYKDNRDDLSMFYFRDGANYASVYTQSKILSENIKWNLKQNNKKIYSLIVNTRNANAFTGKQGYESLKKIADIVSKKLTEKQNEDETTFRKIEPKEIMFGCTGTIGELFPYDKIASKIPDLINKIRYTQNKFIWMKAALGIMTTDTKPKLSMEECKIGNEKIKIYGIAKGAGMIHPNMATTLAYIFTDATLSNDIIKKLLNKNIATTFNAITCDGDTSTNDMITIFATGKVKNSTVKSLNDKKIASFDNALNKVLLNLAKRVVSDGEGSSKFITINVKKCKTETDAKKIAFSIANSPLVKTAVAGEDPNWGRIVMAIGKAGCEINLKKLSINFGKIKILENGNLHQSYDERETANYMKNENIDFDIEISTGSRNFTAYTMDLTKEYIKINADYRS

SEQ ID NO: 113511 - protein, 261 aa, Unknown
  Bacterial polypetide isolated from the Sargasso Sea
MKAALGIMTTDTQPKLAMEECNIGNTLVKIYGIAKGSGMIHPNMATTLGYVFTDANISNEILKKLLKKNISNTFNAISCDGDTSTNDMLTIFSTGKANHAKLNGINDTKIKEFDEALNRVLLNLAKRVVADGEGASKFVTINVKNCKTENDAKKIGFSIANSPLVKTAIAGEDPNWGRIIMAIGKSEVLLNLKRLSIKFGNLNIVQKGKVNVNYNEKEAANYMKNMNIDINVDVACGSKDFTVYTMDLTKKYVEINSDYRS

SEQ ID NO: 113512 - protein, 415 aa, Unknown
  Bacterial polypetide isolated from the Sargasso Sea
MDFGINNFFDKKYKDSKIGHFQDLEHIDGVSISTISCGLYEKKRDDLVLFYFREGASYANAYTQSSLVSENIKWNKKIKEKKIFGILINTRNANALTGNDGYNSLKKISLKLSKLLVSKQSADEEKPREIKPNQILFACTGTIGEKFPENVILNNIENLVDKIKYNQNKLVWIKAALGIMTTDTKPKLSMAECKIGGSNVKIYGVAKGSGMIFPNMATTLGFIFTDANISSSILKQILNLNIKTTFNAISCDGDTSTNDMVSIFSTGKANNKEIKSFKDPKLKEFINNVHQVMLNLAKRVASDGEGATKFVTIKCLNSKTEKDAKNICFSIANSPLVKTAIFGEDPNWGRIAMAIGKSGAKVKNEKLSILMGSNIILKHGKLDKNYNENILSDYMKNENIEITIDLSIGNKKFTA

SEQ ID NO: 113513 - protein, 413 aa, Unknown
  Bacterial polypetide isolated from the Sargasso Sea
MKLKKSPLAPTKFPTLPSVKGVNIGTSVSNSKYKRRQDILTITFNNPASVAGVFTLSQMPAAPVQFCKKNIVNGYANALVVNAGIANSFTGKKGIENNRLIASYFSKLINSRQKDVYICSTGVIGEQLPVAKIKKALKSSFLGRKKDFKSAAKAIMTTDTFPKASGKKIKIGDEEISIVGISKGSGMIAPNMATMLAFIFTDALIEPKLFQALLNLGVRDSFNSISVDSDTSTNDTVLGFATGEAMAGKNVKPMSKIGDKRLAKFREALEDVMKDLAIQIVRDGEGATKLIQINVRNATSISSAKKVAISIANSPLIKTAIAGSDPNWGRIIMAIGKTKENFSHENLKIKIGNNIVIKNGELARRYSERKTKKYMKNEKILIDVDLGVGTGFSSFWTCDLTEEYVRINTDYRS

SEQ ID NO: 113514 - protein, 413 aa, Unknown
  Bacterial polypetide isolated from the Sargasso Sea
MKLKKSPLAPEKFPILPSIRGVNIGTSVSNSKYKSRQDILTITFDKPASVAGVFTLSQMPAAPVEFCKKNIVNGYANALIVNAGIANSFTGKKGTENNRIIANYFSKLINSRQKDIYICSTGVIGEQLPVPKIKKALKKSLFGKNKDFKNAAKAIMTTDTFPKGSAKTITIDNEKISIVGIAKGSGMIAPNMATMLSFIFTDALIEPKLLQTLLNLGVRDSFNSISVDSDTSTNDTVLAFATGQGMLGKNTKPISKIGDKRLIKFRKALDDVMKDLAIQIVKDGEGATKLVQVNVRNAISISSAKKVAMSIANSPLIKTAIAGSDPNWGRIIMAIGKTKEQFSHEKLLIKIGNNIVIKDGELAKRYSERKTQKYMKNDNILIDVDLGIGTGFSSFWTCDLTEEYVRINTDYRS

SEQ ID NO: 113515 - protein, 433 aa, Unknown
  Bacterial polypetide isolated from the Sargasso Sea
MDFGINNFFDKKHKDSKIGHFQDLEHIDGLSISTISCGLYNKKRDDLVLFYFRDGASYANVYTKSSLVSENIKWNKKIKDKKIYGILINTRNANALTGNDGYNSLKKISLNLSKLLTSKQIEDEEKPREIKPNQLLFACTGTIGEKFPENEILSNTKNLVDKIKYNQNKLIWIKAALGIMTTDTKPKLSMAECKIAGSDVKIYGVAKGSGMIFPNMATTLGFIFTDANISSSILKQILNLNIKTTFNAITCDGDTSTNDMVSIFSTSKANNKEIKSFKDPKLKQFISSVHQVMLNLAKRVASDGEGATKFVTIKCINSKTEKDAKNICFSIANSPLVKTAIFGEDPNWGRIAMAIGKSGVTVKQEKLSILMGSNLILKDGKLDKNYNENILSDYMKNENIEITIDLSIGSKKFTAYTMDLSKEYIEINSDYRS

SEQ ID NO: 113516 - protein, 410 aa, Unknown
  Bacterial polypetide isolated from the Sargasso Sea
LDHIDGVSVSTTSANLYNNERDDLVLFYFRHGAEHASVYTQSQVISENIKWNKKIKTKKIRALLVNTRNANSLTGKKGYEALEEISEEISTNLTKKQKDDEDHPKKIKPNEVLFGCTGTIGEIFPKEKIKSSIKDLVNKIKYTQNKYLWIKAAMGILTTDLKPKLAMEECNIGNTKVKIYGLAKGSGMIFPNMGTTLAYIFTDADLSSNVLKKILKKNIHNTFNAISCDGDTSTNDMVTIFSTGKAKNKSINNINDIKLKDFDLALNSVLLNLAKRVVSDGEGASKFIKINSFKCSSESDAKKISFSIANSPLVKTAITGEDPNWGRILMAAGKAGVEFEIDRVNLFIGEHKILEKGQLNKNYNEKDVADYMKQDNLEITIEINNGNKSFTCYTMDFTQKYISINSDYRS

SEQ ID NO: 113517 - protein, 433 aa, Unknown
  Bacterial polypetide isolated from the Sargasso Sea
MDFGINNFFDRKHKDSKIGHFQDLEHIDGLSISTISCGLYNKKRDDLVLFYFRDGANYANVYTKSSLVSENIKWNKKIKDKKIYGILINTRNANALTGNDGYNSLKKISLNLSKLLSSKQIEDEEKPREIKPNQILFACTGTIGEKFPENEILSSTKNLVDKIKYNQNKLIWIKAALGIMTTDTKPKLSMAECKIAGSDVKIYGVAKGSGMIFPNMATTLGFIFTDANISSPILKQILNLNIKTTFNAITCDGDTSTNDMVSIFSTGKAKNKEIKSFKDPKLKQFISSVHQVMLNLAKRVASDGEGATKFVTIKCINSKTEKDAKNICFSIANSPLVKTAIFGEDPNWGRIAMAIGKSGVTVKQEKLSILMGSNMILKDGKLDKNYNENLLSDYMKNENIEITIDLSIGSKKFTAYTMDLSKEYIEINSDYRS

SEQ ID NO: 113518 - protein, 402 aa, Unknown
  Bacterial polypetide isolated from the Sargasso Sea
IVDFQDLDHLDGVSISAVSADLYDKKRDDLVLFYFRDGANYASVFTQSKIVSENIKWNKKIKAKKIKALFVNTRNANALTGTAGYQSLKELSLDISKKLSDKQNIDEEIPKIINPKEIMFACTGTIGEKFPIEKIKKSIPDLIKKIKYTQNKLVWIKAALGIMTTDTKPKLSMAECKIGNTEVKIYGIAKGSGMIYPNMATTLGFIFTDADLSSSLLKQILKKNIDTTFNAISCDGDTSTNDMVSFFSTNKAKNPIIKNINDPKLKKFNYSVHEVLLNLAKRVVADGEGASKFVTIICKNCKTEKDAKAISFSVANSSLVKTAIAGEDPNWGRIVMAIGKSGVKVDIKKLSIFIGPFKVLIKGNLVRDYNEISVSDYMKNESIDINIDLGLGNKKFTAYTAD

SEQ ID NO: 113519 - protein, 433 aa, Unknown
  Bacterial polypetide isolated from the Sargasso Sea
MGINLTNFLSSQSKNTKMIDFQDLDHLDGLSISVVSANLYNDIRDDLTMFYFREGANYASVYTQSKIVSENIKWNINQRPKKIFSLIVNTRNANAFTGKQGYESLKKIADLTSKQLNKKQEEDEANPKKISSKNIIFGCTGTIGEVFPYEKISNNISNLIDKIRYTQNKFIWMKAALAIMTTDTKPKLAMEECHIGSEKVKIYGIAKGSGMIYPNMATTLAYIFTDATLSNDILGKLLKKNITNTFNAISCDGDTSTNDMATIFATNEVKNYQVKSTNENKIKNFDKALNNVLLNLAKRVVSDGEGASKFITINVSKCKNEIDAKKIAFSVANSPLVKTAIAGEDPNWGRIIMAIGKAGPKINLKKLLIKFGNITIVEGGKLNPSYDEKQTANYMKSENIEINIETFAGKKNFTAYTMDLTKKYIEINADYRS

SEQ ID NO: 113520 - protein, 396 aa, Unknown
  Bacterial polypetide isolated from the Sargasso Sea
MKPNLTPPIPVQGFLWMGRNIGIKDQSLDFGVLAAVHPCSAAAVFTRSNLPGAPVIVGREHAAKGTLQAIVVNSKCANVGLGEQGLLDARKMCQWTAEALKIQPELVLPASTGVIGLPLPMDKIREGTLSIATNLDNSAEAVESFARAIMTTDTHPKWRNARSGHASLLGVAKGSGMIEPNMATMLSYLVTDAEIDHSKLQEMLKRAVDSSFNRISIDTDTSTSDMVVLMANGMAGGVNEDEFEKNLTGLCQDLAKDLVRDGEGVTKLIELKISGADSLQMAQKIGKSIINSPLIKTAVHGADPNWGRFVMAVGKVFEHPVRLEELEIRFGLGEKMQAVNSQLLKEEAVKLESISELLQKDTIPIEVVVGHGDHCETFWGCDLSKGYIDENAFYTT

SEQ ID NO: 113521 - protein, 355 aa, Unknown
  Bacterial polypetide isolated from the Sargasso Sea
KKNIKAIMNNTKNANTFTGTQGAEALESLSKNLAKNLTLREAQKKGGTSQVIKPNEILFASTGVIGEKFPIQQIKNSTPQLVEKLREKQNKFVWFKAASSIMTTDTRPKLAYEECRIWNKDIRLSAIAKGSGMISPNMATMLAFVFTDAEIPSVFLKSLLKRAMTNTFNAITVDSDTSTNDMVAIFSSNKVKTGKFYNVLDPKLKDFEMALQRLLLNLAKQIVSDGEGAKKFITIKVINARSQQMARTVAFSIANSPLFKTAMAGEDPNWGRIIMAIGKSGEKITPEKIEIKFGELKVAEKGKISEEYNEEKLKEYMKWDDLLVEVNLKIGQGSFECYTCDLTNEYININADYRN

SEQ ID NO: 113522 - protein, 367 aa, Unknown
  Bacterial polypetide isolated from the Sargasso Sea
MGINLTNFLSSQSKNTKMIDFQDLDHLDGLSISVVSANLYKDIRDDLTMFYFREGANYASVYTQSKIVSENIKWNISQKPKKIYSLIVNTRNANAFTGRQGYESLKKIADLTAKQLNKKQEEDEDNPKKISTKNIIFGCTGTIGEIFPYEKISKNIPNLINKIRYTQNKFIWMKAALAIMTTDTKPKLAMEECHIGSEKVKIYGIAKGSGMIYPNMATTLAYIFTDATLSNDILGKLLKKNITNTFNAISCDGDTSTNDMATIFATNEVKNYQVKSINENKIKNFDKALNNVLLNLAKRVVSDGEGSSKFISINVSKCKNEIDAKKIAFSVANSPLVKTAIAGEDPNWGRVIMAIGKAGPKVNLNKY

SEQ ID NO: 113523 - protein, 261 aa, Unknown
  Bacterial polypetide isolated from the Sargasso Sea
MKAALGIMTTDTKPKLAMEQCKIGDKEVKIYGVAKGSGMIFPNMGTTLAYIFTDANLSNDILSKLLKKNITNTFNAISCDGDTSTNDMVSIFATNKANNLNIKSINDMKLKKFDKALNNVLLNLAKRVVSDGEGASKFVTININKSKSEKDAKTIAFSIANSALVKTAIAGEDPNWGRIVMAIGKAGPKINLNKLGLKFGNYQIIQDGKLHNNYDEKLVGEYMKGENIDITVYLFTGAKSFTAFTMDFTKNYIEINADYRS

SEQ ID NO: 113524 - protein, 330 aa, Unknown
  Bacterial polypetide isolated from the Sargasso Sea
MPIGLEQPKSLLNIKGIRLSACSAGIYDKKRDDLALIEICKDSIVTTAFTKNIFCAAPVKISKNNLTKTSPLYCLINSGNANAGTGKTGLSNAKAICKELANIVSCSEDEILPFSTGVIGEDLPVEKIKKTIPDLIKKLSDHSWLSAAKAIMTTDTIPKAISDQIKIGGTTINITGITKGSGMIKPNMATMLSFIATDARVTKDVLERIKLNALSKSFNRITVDGDTSTNDSFILIATSKAKTPIIDKLDSNEFLILENAIMSICKKLAQAIVRDGEGANKFISIKVDGGANESECLSAAYTIAESPLVKTAIYSIRSKLGQNNSCIRQC

SEQ ID NO: 113525 - protein, 349 aa, Unknown
  Bacterial polypetide isolated from the Sargasso Sea
MLVNTQNANTFTGKQGLESLDEIAKNLSKTLTIKESKSADGVDEAVKIKDILFASTGVIGEKFPVDKINGSIQTLVDKLKEEQNKLIWMKIGSAIMTTDTKPKLAYEQFTAGNKIIRIAGIAKGSGMIAPNLATMLSFIFTDVDLPSNILRSLLKRSVSNSFNAITVDGDQSTNDMVGIFSTKRVKIGQNRNIADPIIQKFEMALKKLTLNLAKQVVVDGEGAKKFVTVKVINAQSILSGKKIAFSVANSPLVKTAIAGEDPNWGRVIMGIGKSGENIDKNKLTVKFGEFLVCEKGQISESYDEQKIKEYMQWDSVLIEINLNQGNDSFECYTCDFNKDYIDINVNYRN

SEQ ID NO: 113526 - protein, 416 aa, Unknown
  Bacterial polypetide isolated from the Sargasso Sea
MGINLRNFLSSQSKNTKMIDFQDLDHLDGLSISVVSANLYKDIRDDLTMFYFREGANYSSVYTQSKIVSENIKWNINQRPKKIYSLIVNTRNANAFTGKQGYESLKKIADLTAKQLNKKQEEDEDNPKKISSKNIIFGCTGTIGEIFPYEKISNNIQNLIKKISYTQNKFIWMKAALAIMTTDTKPKLAMEECYIGSEKVKIYGIAKGSGMIHPNMATTLAYIFTDATLSNDILGKLLKKNITNTFNAISCDGDTSTNDMATIFATNEVKNYQVKSINENKIKNFDKGLNNVLLNLAKRVVSDGEGASKFITINVSKCKNEIDAKKIAFSVANSPLVKTAIAGEDPNWGRIIMAIGKAGPKVNLNKLLIKFGDMTIVESGKLNQGYDEKQAANYMKGENIEISIETFTGKKNFIAY

SEQ ID NO: 113527 - protein, 434 aa, Unknown
  Bacterial polypetide isolated from the Sargasso Sea
MTINVKNFLKDKPKLSKMGEFQELQPIEGMEISAISADLYGTGRDDLCLFYFKDGANYGAVYTNNTICSESITWNRHIRKKNIKAIMINTKNANTFTGTQGAEALDSLSKNLAKNLTLREAQKKGGTSQVIKPNEILFASTGVIGEKFPIQQIKNNTSQLVEKLREKQNKFVWFKAASSIMTTDTRPKLAYEECRIWNKDIRLSAIAKGSGMISPNMATMLAFVFTDAEIPSVFLKSLLKRAMTNTFNAITVDSDTSTNDMVAIFSSNKVKTGKFYNVLDPKLKDFEMALQRLLLNLAKQIVSDGEGAKKFITVKVINARSQQMARTVAFSIANSPLFKTAMAGEDPNWGRIIMAIGKSGEKITPEKIEIKFGELKVAEKGKISDEYDEAKLKEYMKWDDLKIEVNLKLGQGSFECYTCDLTNDYININADYRN

SEQ ID NO: 113528 - protein, 433 aa, Unknown
  Bacterial polypetide isolated from the Sargasso Sea
MGINLTNFLSSQSKNTKMIDFQDLDHIDGLSISVLSANLYKNDRDDLSMFYFRDGANHASLYTQSKIISENIKWNLNQKTKKVFSLIVNTRNANAFTGKQGYESLKKLADLVSKNLTEKQKQDEEIPKKINPKEILFGCTGTIGEEFPFEKISHQIPNLINKIRYTQNKFIWMKAALAIMTTDTKPKIAMEECKIGSEKVKIYGISKGSGMIHPNMATTLAYIFTDASLSNDILSKLLKKNIFNTFNAISCDGDTSTNDMVSIFATNKINNSQVKNINENKIKNFDRALNNVLLNLAKRVVSDGEGASKFISINVSKCKNELDAKKIAFSIANSPLVKTAIAGGDPNWGRIIMAIGKAGPKINLKKLCIKLGNLKIVQEGKLYQNYSEEVASKYMKKENIEISVEVYTGTKDFTAYTMDLTKKYIDINADYRS

SEQ ID NO: 113529 - protein, 98 aa, Unknown
  Bacterial polypetide isolated from the Sargasso Sea
MNYSEKFKASINKLKFEGRYRHFNEIERHAGLHPIASWKVNYKKSDIVVWCSNDYLGMSQNDLTINSMINAVKKMGISSGGTRNISGNSSAIVNLEKE

SEQ ID NO: 113530 - protein, 72 aa, Unknown
  Bacterial polypetide isolated from the Sargasso Sea
MNYSDIFKSSINKLKIEGRYRYFNEIERKVGKHPSALWISDTKKNDIIVWCSNDYLGMSQNKVVINSMINSV

SEQ ID NO: 113531 - protein, 177 aa, Unknown
  Bacterial polypetide isolated from the Sargasso Sea
MDYKKFFSNSIDTLKKSGEYRIFRDIVRKAGSFPNAKFNDQIKKENIIVWCSNDYLGMGQHPFVFEAIERTMKEVGAGSGGTRNISGTNRFHIALENEISEIHQKEASLVFTSGYVANDASLSILGSKLKDCIIFSDEKNHASIINGIRNSKAEKFIFKHNDAKHLESLLKTVNIDR

SEQ ID NO: 113532 - protein, 171 aa, Unknown
  Bacterial polypetide isolated from the Sargasso Sea
MTSFKNQIKKINSLGYLRTRSIINFEKSTKVNLDNKIVTSFLSNDYLGMSKNRTIINELKKSANTHGIGSGSSPLISGYSKSHHYLEKEIAEYLNAESCLVVNSGYMANLCLLNIFDQEMNVVQDRQSHNSIIESSKINKIKINRYKHLDNSQLEKHLRNGKQDIIFSESI

SEQ ID NO: 113533 - protein, 133 aa, Unknown
  Bacterial polypetide isolated from the Sargasso Sea
MNYSDKFKASISKLKFEGRYRHFNEIERHAGLHPKAFRKGNFKKSDIIVWCSNDYLGMSQNDLIISSMIDAVKNMGTSSGGTRNISGNSSAIVDLEKELAVLHGKEKAIVFSSGYVANESSISTLLGLLDDDV

SEQ ID NO: 113534 - protein, 210 aa, Unknown
  Bacterial polypetide isolated from the Sargasso Sea
EGIRSPIVKIVELAEKYNCMTYLDEVHSVGLYGEEGKGIAVEMGVEDKIDIINGTLAKAYGQMGGYIAASSEIIDYIRSFAPGFIFTTSICPSIAAGAAKAIDIVSLAEQLRIRIKENAALIRENLDSLAIPYLDTNSHIVAVLINDPFLCKKVSKDLIDDHGIYAQPIFYPTVPKGLERLRITVTPKHRKEHIEKMIKALDIVWSKNNL

SEQ ID NO: 113535 - protein, 161 aa, Unknown
  Bacterial polypetide isolated from the Sargasso Sea
MTSFKNQIKKINSSGYLRTRSVINFENSTKVNLKNKIVTSFLSNDYLGMSKNQTIITELKKSANAHGIGSGSSPLISGYSKSHHYLEKEITEYLNAESCLVVNSGYMANLCLLNIFDQEMNVVQDRQSHNSIIESSKINKIKINRYKHLDNAHLEKHLRNG

SEQ ID NO: 113536 - protein, 118 aa, Unknown
  Bacterial polypetide isolated from the Sargasso Sea
MGKAYGVVGGYITGSKGLCDFIRSFASGFIFTTALPPAAAAGALASIKHLKESEIERAAQKRQVNLLRGKLDAAGIPHLENPSHIVPVMIKDPIKCKKISDWLLEDYGIYVQPINYPT

SEQ ID NO: 113537 - protein, 174 aa, Unknown
  Bacterial polypetide isolated from the Sargasso Sea
VSEELGFQKDIDILQGTLAKAYGNIGGYIASNKLICDYIRSTASGFIFTTSLPPSVTEAAKNAIQYLKLHDNERNLQKENVKFLKNKLTEYKINFFQNKTHIVPVMINDADKCTKVSQFLLNNYGHYIQPINYPTVPKGTERLRITPGPLHTKKMITDLVKSLRETIDKINLTI

SEQ ID NO: 113538 - protein, 80 aa, Unknown
  Bacterial polypetide isolated from the Sargasso Sea
MNKNFEKKLQDLKKENLFRQRVLKESGSSSEIIIDGKKYLSFASNDYLGMSNNYELQEALSESCKKNGLGSGSSPLISGY

SEQ ID NO: 113539 - protein, 158 aa, Unknown
  Bacterial polypetide isolated from the Sargasso Sea
MTSFKNQIKKINSSGYLRTRSVINVEKSTKVNLNNKIVTSFLSNDYLGMSKNRIIINELKKSANTHGVGSGSSPLISGYSESHHYLEKEIAEYLNAESCLVVNSGYMANLCLLNIFDQEMNVVQDRQSHNSIIESSKINKIKINRYKHLDNAHLENIC

SEQ ID NO: 113540 - protein, 191 aa, Unknown
  Bacterial polypetide isolated from the Sargasso Sea
GNYVELAKKYNAMTYLDEVHAVGLYGKRGEGVAGECGFSDQIDVINGTLAKAVGQIGGYITGDRDIIEFIRNQAPGFIFTTSIMPAVAAAAKTSLNIIENADDLRQDIFKKANYIKSKLSEKNISHIDSKSHIIPVLIGSADRSKEISKKLMEDYNIYVQPIFYPTVPKDSSRLKITVTPKHTYQDIDYLI

SEQ ID NO: 113541 - protein, 184 aa, Unknown
  Bacterial polypetide isolated from the Sargasso Sea
TGAGISEKFNLQNDIDIIQGTLAKAFGTMGGYIASDDLVCDAVRSTASGFIFTTSLPPLVAESARASIKYLNSNSELRIKQQENVKFLKNELLKHDIEILKNTTHIIPVMIRDAELCNEISKHLLDNHGHYIQPINYPTVKKGEERLRITPGPFHNKKMMLDLVDSLEKTFRKFNFTKTSINAA

SEQ ID NO: 113542 - protein, 72 aa, Unknown
  Bacterial polypetide isolated from the Sargasso Sea
MTYDTAIHNSIIELHKTGKYRTFANLKRQVGRFPRATYHPEEGPAFEVEVMCSNDYLGMGHHQVVRDACKAA

SEQ ID NO: 113543 - protein, 235 aa, Unknown
  Bacterial polypetide isolated from the Sargasso Sea
MTSFKNQIKKINSLGYLRTRSVINVEKSTKVNLDNKIVTSFLSNDYLGMSKSRAIITELKKSANTHGIGSGSSPLISGYSESHHYLEKEIAEYLNAESCLVVNSGYMANLCLLNIFDQEINVIQDRQSHNSIIESSKINKIKINRYKHLDNSHLEKHLRNGKQDIIFSESVFSMSGDATNIKEHYKLKKKYKSFLFVDDAHGFGIAKCKIKNNSIENSCSSFNIRISNIDAYMGT

SEQ ID NO: 113544 - protein, 151 aa, Unknown
  Bacterial polypetide isolated from the Sargasso Sea
MNYSDIFKSSLNKLKIEGRYRHFNEIERKVGKHPNAFWISDSKKNDIIVWCSNDYLGMSQNKLVINSMINSVKRMGTGSGGTRNISGNSNAIVQLENILADFHLKEKAVVFSSGYVANESTISTLLNLLKDVIVFSDEKNHASIISGIKKS

SEQ ID NO: 113545 - protein, 168 aa, Unknown
  Bacterial polypetide isolated from the Sargasso Sea
MATFKDKLKSIESEGYLRKRDIISLTTSSRTQIGTKLVTSFSSNDYLGMSSHRDVINELKQSASQYGVGSGSSPLITGYTKSHQFLEKEICEYLDAESCVVVNSGYMANLCLLSVYDKEVNVIQDKESHNSIIESSRLNKIKINRYSHLDDSQITKHISKNNDILFSE

SEQ ID NO: 113546 - protein, 103 aa, Unknown
  Bacterial polypetide isolated from the Sargasso Sea
MTSFKNQIKKINSSGYLRTRSVINVEKHTKINLNNRIVTSFLSNDYLGMSKNRSIISELKKSANTYGIGSGSSPLISGYSESHHYLEKEIAEYLNAESCLVVN

SEQ ID NO: 113547 - protein, 141 aa, Unknown
  Bacterial polypetide isolated from the Sargasso Sea
DFVRSSQSGFILQTALPPSIAAGALASIKHLKSSEIERADQKRKVKYLREKLDHHNIPHLHNASHIVPVMIKDPVKCKMISDILMENYGIYVQPINYPTVPKGTERLRITPSPVHSFSDIDCLVNAMNELWSQCALSRVVA

SEQ ID NO: 113548 - protein, 356 aa, Unknown
  Bacterial polypetide isolated from the Sargasso Sea
MATFKDKLKSIESEGYLRKRDVISLTTSSHTQIRDKTVTSFSSNDYLGMSTHRDVISELKKSANQYGIGSGSSPLITGYTQSHQYLEKEICEYLDTESCIVLNSGYMANLCLLSIYDREVNVIQDKESHNSIIESSRLNKIKINRYSHLDDSQITKHISKDNDILFSEAVFSMTGDMTNLKNHLNIKRKFNAQLYIDDAHGFAIAQKSSNNTTIETSCELFGMKPSDADAYMGTFGKAVGTIGAFICGNKDLIEMIIQKGRPYIYSTSQPRCMIDATRKSLNILSLDKSRYKKLHENITYFNDVCKIKKIPTNLNQVPIKTVLLGNPHLALKVKELLLEKTYSDTSYQISNSTKKQ

SEQ ID NO: 113549 - protein, 213 aa, Unknown
  Bacterial polypetide isolated from the Sargasso Sea
VRLAKKYNALTYLDEVHAVGLYGKKGRGVAQECGVSDQIDIINGTLAKGFGQIGGYITGDEILIDFIKSFAPGFIFTTSMMPAIAAAASKSIEIVQTLDEERKLVFSKANYIKNQLKKVGIDFIDSDSHIIPVLAYDESKVKDYSNTLLNKHNTYLQPIFYPTVPKGSARLRITVTPKHSITDINDLISSLRMTWGKHSQRVISAPLQPAMAL

SEQ ID NO: 113550 - protein, 308 aa, Unknown
  Bacterial polypetide isolated from the Sargasso Sea
MPLIELEKEIALLHQKENALAFTSGYVANESTISSLIKLFPSCVVFSDQQNHASIISGLKKSYTNKIIFPHNDISALEKKISSIDYHVPKIIIFESIYSMDGTLGKIREIVSIAKKYNALTYIDEVHAVGMYGQTGGGISEELGIQKDIDILQGTLAKAYGNIGGYIASNKLICDYIRSTASGFIFTTSLPPSVAVAAKNAIQYLKLHDNERNLQKENVKFLKNKLTEYKINFLQNKTHIVPVMINDADKCTKVSQFLLNNYGHYIQPINYPTVPKGTERLRITPGPLHTKKMITDLVKSLKETIDKI

SEQ ID NO: 113551 - protein, 62 aa, Unknown
  Bacterial polypetide isolated from the Sargasso Sea
MEKNNTSYPFANLVNDNNKKEIIIWCSNDYLGMSQKKSIIDAAKKSLSDYGTGSGGTRNIFW

SEQ ID NO: 113552 - protein, 278 aa, Unknown
  Bacterial polypetide isolated from the Sargasso Sea
MEKLNYKIFFRDLIKTFRLKGFFRRFTPIVRERESFPFSKVSYGNNVKLQPYEGDLKIWCTNDYLNMSHNQEVVDEMVSVINKVGTGSGGTRNISGTTPYHQILEQALAEFHGREAALVFNSAYLANQTTIWTLCKALENVCVFSDSLNHASLIQGIKNSNSECKIFDHNDLKHLEGLLINTDIDRPKLIVFESLYSMDGTIVPVDKYVDLAKKYNALTYLDEVHAVGLYGEQGRGIAEKLGVAKDVDIINGTLAKAFGQIGGYIVANNEIIDYVKSY

SEQ ID NO: 113553 - protein, 245 aa, Unknown
  Bacterial polypetide isolated from the Sargasso Sea
KETDIKRPKLIVFESLYSMDGTIVEVDRYVALAKKYNALTYLDEVHAVGLYGDKGRGIAAKLGVADQVDIINGTLAKSFGQIGGYIVADNYLIEYIRSFAPGFIFTTSIMPSVAAAATKSIGIVKEADHKRSHVMKHAEYLRDKLTSYGIPFIDSDSHIVPVMAYESKLAKSYSKDLNEKFGIYVQPIFYPTVPKDSARLRITITPKHSTHDIDDLVDALVTVTGKIIPKSQSAESSHQFSGTFV

SEQ ID NO: 113554 - protein, 156 aa, Unknown
  Bacterial polypetide isolated from the Sargasso Sea
MNYDKIFSNKLNRLKSESRYRTFVELERQVGRHPYAQWNSPDGPKDVVVWCSNDYLGMGQNPKVIEALTAAIDSHGTGAGGTRNISGNSAAIVALEAELADLHGKERALVLTSGYVANEASISAIAKSLDDALILSDEMNHASIISGIQHARCDKA

SEQ ID NO: 113555 - protein, 269 aa, Unknown
  Bacterial polypetide isolated from the Sargasso Sea
MSQHPEVVNEIVKTLLEYGSGSGGTRNISGTSTYHTELEKKLANVHNKEAALVFASAYTANQSTLWTLGKKIKDIEIFSDELNHASLIQGIKNSGAKCHIFKHNDIDHLEQLLKESNVNNPKLIVFESLYSMEGIRSPIVKIVELAKKYNCMTYLDEVHSVGLYGEEGKGIAVEMGVEDKIDIINGTLAKAYGQMGGYIAASSEIIDYIRSFAPGFIFTTSICPSIAAGAAKAIDIVSLAEQLRIRIKENAALIRENLDSLAIPYLDTN

SEQ ID NO: 113556 - protein, 299 aa, Unknown
  Bacterial polypetide isolated from the Sargasso Sea
KSFPNADESFKNKEREVEVWCSNDYLNMSQHPEVVNEIVKTLLEYGSGSGGTRNISGTSTYHTELEKKLANVHNKEAALVFASAYTANQSTLWTLGKKIKNIEIFSDELNHASLIQGIKNSGAKCHIFKHNDIDHLEQLLKESNVDNPKLIVFESLYSMEGIRSPIVKIVELAKKYNCMTYLDEVHSVGLYGEEGKGIAVEMGVEDKIDIINGTLAKAYGQMGGYIAASSEIIDYVRSFAPGFIFTTSICPSIAAGAAKAIDIVSLAEQLRIRIKENAALIRENLDSLAIPYLDTNSHM

SEQ ID NO: 113557 - protein, 296 aa, Unknown
  Bacterial polypetide isolated from the Sargasso Sea
NKEREVEVWCSNDYLNMSQHPEVVNEIVKTLLEYGSGSGGTRNISGTSTYHTELEKKLANVHNKEAALVFASAYTANQSTLWTLGKKIKDIEIFSDELNHASLIQGIKNSGAKCRIFKHNDIDHLEQLLKETNVDNPKLIVFESLYSMEGIRSPIVKIVELAKKYNCMTYLDEVHSVGLYGEEGKGIAVEMGVEDKIDIINGTLAKAYGQMGGYIAASSEIIDYIRSFAPGFIFTTSICPSIAAGAAKAIDIVSLAEQLRIRIKENAAFIRENLDSLAIPYLDTNSHIIAVLINDP

SEQ ID NO: 113558 - protein, 278 aa, Unknown
  Bacterial polypetide isolated from the Sargasso Sea
MGMGQHSYVLDSMKTALDTAGAGAGGTRNISGTTHYHVALETELAKLHNKESALLFTSAYNANQTTLETIPKVLGDVLYISDEMNHSSIIQGIRHSKARKEIFKHNDVKDLEGILMSNTGTKIVVFESVYSMDGDIAPVKEIVELCKKYKAISYIDEVHAVGMYGKNGAGICERDNVDVDIINGTLAKAFGVQGGYIAGKQIFIDAIRSLASAFIFTTSLSPVICAGALTSIKYVRDHPELREKLHERSQATKKILKEHNIPVMDNDSHIVPVMINDA

SEQ ID NO: 113559 - protein, 135 aa, Unknown
  Bacterial polypetide isolated from the Sargasso Sea
MDYNAIFKKKIENLKQEGNYRIFADLERYQGSFPRARNYSGNTERDVTVWCSNDYLGMGQNEAVINSMKDAIDKCGAGAGGTRNISGTNHYHVLLEKELAELHGKEAALLFTSGYVSNWASLSVLGANLENCVIL

SEQ ID NO: 113560 - protein, 220 aa, Unknown
  Bacterial polypetide isolated from the Sargasso Sea
YSMDGDFGDIENIVNIAKKYSALTYLDEVHAVGMYGNTGAGIAEMMNLQNSIDIIQGTLGKAYGTMGGYISSSQEICDAIRSYASGFIFTTAMPPALAKTATESIKYLKKSNYERILQKQKTNKLKNYLSKENINYLDHNSHIVPVMVNNPIRCSEISNILLNDFGHYIQPINYPTVPKGTERLRITPGPLHTDKMISDLTIALKHAFNKTDNIVYKKYA

SEQ ID NO: 113561 - protein, 99 aa, Unknown
  Bacterial polypetide isolated from the Sargasso Sea
LRNHLSNLDPSVPKIIAFESVYSMDGDISPISDICDVADEFGALTYLDEVHAVGLYGKRGGGVSERDGVADRVSIIEGTLGKAFGVLGGYIRGSKEVCD

SEQ ID NO: 113562 - protein, 141 aa, Unknown
  Bacterial polypetide isolated from the Sargasso Sea
MTWTRPELCNATTVGKLRDTAKRQAKEKSMNYNTFFKDALAGLKAEGRYRVFANLERIVGKFPKALYHPDNGEAPREITVWCSNDYLGMGQHPKVLEAMQNAITGQGGGAGGTRNISGSNHLHVALERELADLHSKEAALL

SEQ ID NO: 113563 - protein, 300 aa, Unknown
  Bacterial polypetide isolated from the Sargasso Sea
GKTKEIDVWCSNDYLIMSQNEDVMSAMKNAVDQLGAGSGGTRNISGTTRFHVELEEKIAKLHGKERALAFNSGYSANDSALTSILSAIDNCLVLSDELNHASLIEGIRASKKEKVIYKHNDVDHLRGVLKGIPFSRPKMIVLESVYSMEADFAPLQNIVEIAHESGALIYLDEVHAVGLYGSNAAGVAEQEGVSDQIDIINGTLAKAFGLAGGYIASTHSVIDFVRSFSKGFIFTTSMCPAVAAGTLKSVETVQNKPEIRSKFFDNIKLVKSELETAGIPFLDSGSHIIPVIIGESKLCK

SEQ ID NO: 113564 - protein, 295 aa, Unknown
  Bacterial polypetide isolated from the Sargasso Sea
MDYTEKFKSSLNRLKFDGRYRFFNEIERKAGSHPIAFWNNNLSKSEIIVWCSNDYLGMSQNRLVTNSMIQAVENMGTGSGGTRNISGNSSAIVNLEEELANLHSKERGIVFSSGYIANEATISTLLEILTDAIVFSDEKNHASIISGIKKSKSKKEIFKHNDMNDLEFLIKKYPHDKPKLIVFESIYSMDGDFGNIEGIVNIAKKHNAMTYIDEVHAVGMYGKTGAGLSEQFSLNNSIDIIQGTLGKAYGTMGGYITASDIICDAIRSYASGFIFTTAMPPALATAANESIKYLK

SEQ ID NO: 113565 - protein, 322 aa, Unknown
  Bacterial polypetide isolated from the Sargasso Sea
GEYVSTAKWDTQDYTAKFQSTVDEIRHAGRYRTFADLERKKNEFPQAQYHGTKPHGELEVEKEVTGWCANDYLCMGQHPKVLDAMHGAIEKSGAGSGGTRNISGTNHFHVLLEEELADLHGQESALLFTSCYVANDSTLETLGKIFPDLVVFSDSENHASMIQGVRHGRSKKHIYRHNDTAHLIELLEATPANVPKMILFESVNSMEGTVAPMEEICDIAERYGALTFCDEVHAVGLYGERGGGVGERDGVMSRIDITSGTLAKGYGVMGGYIAGNHALVDAIRSTASGFIFTTSLPPSLAAGALASVQHLKESKGSARSAR

SEQ ID NO: 113566 - protein, 268 aa, Unknown
  Bacterial polypetide isolated from the Sargasso Sea
PDILFISDAQNHSSIIQGIRHSKAKKEIFKHNDVNDLESILMSNTGPKCVIFESVYSMDGDIAPVKDIVDVCKKYNAITFIDEVHAVGLYGPTGAGICERDNIDVDIINGTLAKAFGVQGGYIAGKREFIDAIRSLASAFIFTTSLSPVLCAGALTSIKYVKDHPELRDKIQERAKKTKEEIERQGIEVLKNDSHIVPVIIGDAKKCKAVSDELLYKDGIYVQPINYPTVAVGTERLRFTPTPFHTDAHIFDMVVKLKSAMKRCGKKK

SEQ ID NO: 113567 - protein, 276 aa, Unknown
  Bacterial polypetide isolated from the Sargasso Sea
TKFPKADETNIDNSRDVEVWCTNDYLNMSQHPEVVNKTVKTLLELGTGSGGTRNISGTTSYHVALEKRLADVHNKEAALLFASAYTTNQSTLWLLGKKIKDLQIFSDELNHASLIQGIKNSNSDCHIFHHNDVEHLEELLKSVDPQLPKLIVFESLYSMEGIRAPIKKIVELAKKYNALTYLDEVHSVGLYGKNGKGIAVEMNVDQDIDIINGTLAKAYGQMGGYIAANHEIIDYVRSFAPGFIFTTSICPSIAAGTLKAINIVSMAEQLRIKIHQ

SEQ ID NO: 113568 - protein, 411 aa, Unknown
  Bacterial polypetide isolated from the Sargasso Sea
MDYSKFFNTELEKLKKEGLYRKFREIDRPIKKFPKADEIQGEEDRDVEVWCSNDYLNMSQHPEVVNETVKTLLEIGSGSGGTRNISGTSSYHTALERKLAAVHNKENALIFASAYTANQSTLWTLGKKIKNLEIFSDELNHASLIQGIKNSSANCHIFQHNDVDHLEQLLRNTDQNHPKLIVFESLYSMEGIRSPILKIVELAKKYNAMTYLDEVHSVGLYGDKGKGIAVEMKVDQKIDIINGTLAKAYGQMGGYIAANKEIIDYIRSFAPGFIFTTSICPSIAAGASKAIDIVSLADQLRIKIHENASTIRQLLESIAIPYIDTNSHIISVLINDPFLCKKVSEKLIDDHGIYAQPIFYPTVPKGLERLRITVTPKHRKDHIEKMIKSLDKVWSDLSLPRKNSAKIHINN

SEQ ID NO: 113569 - protein, 407 aa, Unknown
  Bacterial polypetide isolated from the Sargasso Sea
KTKASGFYREFVPIIRERKTFPFSYIAHEASSDDQFNNETKIWCTNDYLNMSQNEVVIEEMIDVIRKVGASSGGTRNISGTTPYHIELENKIAQFHSREKALVFNSAYLANQTSLWTLCKKIPNIQIFSDELNHASLIQGIKNAGANCHIFAHNDTMQLEKLLSQFDKSTPKLIVFESLYSMDGTKAKIGNYVELAKKYNAMTYLDEVHAVGLYGKEGKGVASECGFSDQIDIINGTLAKAVGQIGGYITGDYDIIEFIRNQAPGFIFTTSIMPAVAAAAKTSLNIIENADDLRQDIFKKANYIKSKLSEKNISYIDSESHIIPVLIGSANRSKEISKKLMEDYNIYVQPIFYPTVPKDSSRLRITVTPKHTYQDIDYLIFAINETINARKTKRDSFNIKVKSPSYA

SEQ ID NO: 113570 - protein, 381 aa, Unknown
  Bacterial polypetide isolated from the Sargasso Sea
KIFPMAEESFKNKEREVEVWCSNDYLNMSQHPEVVNEIVKTLLEYGSGSGGTRNISGTSTYHTNLEKKLANIHNKESALLFASAYTANQSTLWTLGKKIKNIEIFSDELNHASLIQGIKNCGAKCHIFKHNDIDHLELLLKETDINNPKLIVFESLYSMEGIRSPIVKIVELAKKYNCMTYLDEVHSVGLYGEEGKGIAVEMGVDDKIDIINGTLAKAYGQMGGYVAANLEIIDYIRSFSPGFIFTTSICPSIAAGASKAIDIVSLAEQLRIRIKENAALIREHLDSIAIPYIDTNSHIVAVLINDPFLCKKVSQDLIDEHGIYAQPIFYPTVPKGLERLRITVTPKHRKEHISKMINALDKVWSKNNLPRKNINQVSSKI

SEQ ID NO: 113571 - protein, 444 aa, Unknown
  Bacterial polypetide isolated from the Sargasso Sea
MSARAEQGLLRQRHCQQYEKDNIICINGEHYLNFSSNDYLGMRQHEGVLQSWVEGLAQFGGGSGASPLVTGHTQAHLALEAYIADGLNREAALLFNSGFAANQALCMALFPHMSHSNKSVRAGHIIADKLMHASFLEGAQCVSDSAKLRRFKHNDLSHLESLLSSVCQSQVPDAVGNSGANQQDTLIASEGVFSMDGDVAPCEDIAELAAKYNAWFMLDDAHGMGVLGENGFGTAEALNLNQQQAPIVMGTFGKAVGTAGAFIAGSQTLIDYLVNFSKHYVYSTAMPPAQAVATLYSLTHIASDTARRETLHNNIAYFRDSFQKRFGQTLNTSEKGDASIEITLGQSQSAIQPIIVGSPERAVALSEGLKQRGIWATAIRQPTVPKNQDRLRITLTSNHSSQDIDVLLDALELSLNNLVLSETSEKRGPESAMCASDSVSKQEM

SEQ ID NO: 113572 - protein, 309 aa, Unknown
  Bacterial polypetide isolated from the Sargasso Sea
MTKEIDKSFYEQKLNAALESLHLEGRYRTFIEIERARGSFPNARWIAKDNIERSVTVWCGNDYLGMGESDVVLKAMQDALSSAGAGSGGTRNISGTTVHHKKLEHELASLHDKEACLLFTSAYVANDSALSTLSKLLPNLIIYSDELNHASMIEGIRRNGGERRIFRHNDVEHLRILLKADDPKAPKLIAFESIYSMDGDFAPIKEICDLAEEFSALTYIDEVHAVGMYGKTGGGLAEQENLLSRIDIINGTLAKAFGVMGGYIASSEKLCDALRSYAPGFIFTTSLPPAIAAGAAASVEHLKANHLLR

SEQ ID NO: 113573 - protein, 200 aa, Unknown
  Bacterial polypetide isolated from the Sargasso Sea
MDKNLYDQKLNAALESLHLEGRYRTFIEIERSRGNFPNARWVSENKIERPVTVWCSNDYLGMGQSSIVLEAMQDALKRTGAGSGGTRNISGTTVYHKELEHELAGLHQKESCLLFTSAYVANDAALSTLTKLFPGLIIYSDELNHASIIEGIRRNGSERRIFRHNDVEHLRELLETDDPKAPKLIAFESIYSMDGDFAHD

SEQ ID NO: 113574 - protein, 294 aa, Unknown
  Bacterial polypetide isolated from the Sargasso Sea
RVFADLKRYQGFFPKAKSFKKDGNADVTVWCSNDYLGMGQHPSVLGAMGGAIEECGAGAGGTRNISGTNHYHVLLEEELADLHNKESALLFTSGYVSNWAALSTLGSRLRNCVILSDELNHASMIEGIRHSRAEKVIWKHNDVRDLEKKLSLIEKDVPKLIAFESVYSMDGDIAPIKEICDLAEAYGAMTYLDEVHAVGLYGQRGGGISEQAGVSHRISIIEGTLGKAFGVMGGYIAASNTICDFIRSFASGFIFTTALPPAIAAGAQASVKHLKVSELERKGKEFKLKNFDLN

SEQ ID NO: 113575 - protein, 282 aa, Unknown
  Bacterial polypetide isolated from the Sargasso Sea
MDFDALFSDQLDLLKKEGNYRIFAELERQCGAFPKAKSYDKDSPENVTVWCSNDYLGMGQSQIVKDAMKSVIDTNGCGAGGTRNISGTNHHHVLLEKELADLHRKEAALLFTSGYVSNWASLGTLGSKLPNAVILSDAANHASMIEGIRHSRADKVIWKHNDPEDLDRKLKAIGPNRPKIVAFESVYSMDGDISPMQEIVEVAESHNAMTYLDEVHAVGLYGPRGGGISEELGLAERITLIEGTLGKAYGVMGGYITGSKLLCDFIRSFASGFIFTTALPSA

SEQ ID NO: 113576 - protein, 282 aa, Unknown
  Bacterial polypetide isolated from the Sargasso Sea
LLFTSGYVANDAAISTIAKLIPNCVILSDEWNHASMIAGIRNSGCEKHIYRHCDMTHLEELLQEIDSDRPKLIVFESVYSMDGDISPIGEICDLADKYDAMTYIDEVHAVGLYGETGGGISECDGLADRLTVIEGTLAKGFGMVGGYIAASTALVDAIRSNAPGFIFTTTLPPPVIGGAIASVRFVREHSELRIKHQERAATLKRMVGDAGLPLMDTATHIVPVMVGDPVLCKRATDMLLEDYNIYIQPINYPTVPKGTERLRITPTPFHSDELMEDLVRAL

SEQ ID NO: 113577 - protein, 218 aa, Unknown
  Bacterial polypetide isolated from the Sargasso Sea
MTKKIDKSFYEQKLGAALDRLHSEGRYRTFIEIERARGNFPNARWIAKDNTERSVTVWCGNDYLGMGQSDIVLAAMQDALSSAGAGSGGTRNISGTTVHHKKLEHELASLHQKEACLLFTSAYVANDSALSTLTKLLPNLIIYSDELNHASMIEGIRRNGGERRIFRHNDVEHLRKLMEADEAKAPKLIAFESIYSMDGDFAPIKEICNVAEEFSALT

SEQ ID NO: 113578 - protein, 301 aa, Unknown
  Bacterial polypetide isolated from the Sargasso Sea
HRKEAALLFTSGYVSNWASLGTLGSKLPNAVILSDAANHASMIEGIRHSRADKVIWKHNDPEDLDRKLKAIGPNRPKIVAFESVYSMDGDICPMQEIVEVAESHNAMTYLDEVHAVGLYGPRGGGISEELGLSERITLIEGTLGKAYGVMGGYITGSKLLCDFIRSFASGFIFTTALPPAVASGAKASIAHLKSSQLERKRQQKQVQKLRNDLDRAGIPHMHNSSHIVPVIIKDPVKCKMLSDILMRDFGIYVQPINYPTVPKGTERLRFTPSPLHSDKDIDHLVNALNVLWKQCAIARVV

SEQ ID NO: 113579 - protein, 220 aa, Unknown
  Bacterial polypetide isolated from the Sargasso Sea
MDYEKFYKEKIDSLKDEGRYRVFAELSRQKDNFPVATHFHDNAKNDVVVWCSNDYLGMGQNKNVIQAMENALHECGAGAGGTRNISGTNYYHVLLEKEIASWHNKEAALIFTSGYISNEATLTTLAGLIPECVIFSDENNHASMIAGIKASKSEKKIFRHNDINHLEELLRQTDINKPKIIAFESVYSMDGDIAPIKEICDLADKYNAITYLDEVHAVGL

SEQ ID NO: 113580 - protein, 300 aa, Unknown
  Bacterial polypetide isolated from the Sargasso Sea
YDDNAPEEVTVWCSNDYLGMGQNPIVQNAMKDVIDSCGCGAGGTRNISGTNHHHLLLEKELADLHNKEAALLFTSGYVSNWAALSTLGSRLPKAVILSDASNHASMIEGIRQSRAEKVIWRHNDPEDLDRKLAALDRDRPKIVAFESVYSMDGDICPMQEIVEVSEKHGAMTYLDEVHAVGLYGPRGGGVSEQLGLSDRITLIEGTLGKAFGVLGGYITGSHHLCDFIRSFASGFIFTTALPPAIAAGARASVAHLKVSEKERLRQREQVAKLRAGLDKAGIPHLENSSHIIPVMIKDPI

SEQ ID NO: 113581 - protein, 276 aa, Unknown
  Bacterial polypetide isolated from the Sargasso Sea
LEKQIAALHQKEAALVFSSGYNANEATLSTLGKQLPNSVLLSDACNHASMIHGIRNSRMEKHVFRHNDTVHLEEVLSSIDINRPKVVAFESVYSMDGDVGLIREFCEIAKKYDAITYIDEVHAVGLYGPHGAGIAERDGLMGELDIIQGTLGKAFGVMGGYIAGSAALIDMIRSYAPGFIFTTTMPPAQAAGALASIRYLMESNKEREQHQANVQKVRQMLLQEGITVMPTETHILPLLIGDPQRCKQASDLLLKKYDIYVQPINFPTVPRGTERL

SEQ ID NO: 113582 - protein, 185 aa, Unknown
  Bacterial polypetide isolated from the Sargasso Sea
NHYHVLLEEEIASWHRKEAALIFTSGYISNEATLSTLAGLIPDCVIFSDENNHASMISGIKASKSEKKIFRHNDVQHLEELLKQTDKNKPKIIAFESVYSMDGDIAPIKEFCDLADKYNAITYLDEVHAVGLYGEKGGGISERDGLTDRITVIEGTLGKAVGVMGGYIAASKNIVDVVRSYAAPI

SEQ ID NO: 113583 - protein, 241 aa, Unknown
  Bacterial polypetide isolated from the Sargasso Sea
MDYEKFFAERISDLRAEGRYRVFADLERQAGFFPRATSHGADGADEVTVWCSNDYLGMGQNEVIRAAMKEAIDKVGAGAGGTRNISGTTHYHVLLEEELADLHGTEAALVFTSGYVANEAALSTIGAHIPDCVLLSDADNHASMIAGIRHSLTDKVVFAHNDLADLECKLQGIDRDRPKVIVFESVYSMDGDISPINAICDLADKHNAMTYLDEVHAVGMYGPRGAGIAERDGAMARLTVI

SEQ ID NO: 113584 - protein, 190 aa, Unknown
  Bacterial polypetide isolated from the Sargasso Sea
MDYDHLFNSQLQKLKDEGNYRIFAELERCQGNFPKAKNYFKSNKTSEVTVWCSNDYLGMGQNPSVLSSIKNALNECGAGAGGTRNISGTNHYHVLLEKELADLHKKESALLFTSGYISNWATLSTLGARLPGCTILSDEKNHASMIEGIRHSRAGKLIWKHNDPEDLRNKLSSLPNDAPKIVAFESVYSM

SEQ ID NO: 113585 - protein, 259 aa, Unknown
  Bacterial polypetide isolated from the Sargasso Sea
MDYDAIFATQLNQLKEEGNYRIFAELERQSGAFPKAKSYDDNAPDEVTVWCSNDYLGMGQNPIVQNAMKDVIDSCGCGAGGTRNISGTNHHHLLLEKELADLHNKEAALLFTSGYVSNWAALSTLGSRLPKAVILSDASNHASMIEGIRHSRAEKVIWRHNDPEDLDRKLAAIDHDRPKIVAFESVYSMDGDICPMQEIVEVSEKHGAMTYLDEVHAVGLYGPRGGGVSEQLGLSDRITLIEGTLGKAFGVLGGYITGS

SEQ ID NO: 113586 - protein, 285 aa, Unknown
  Bacterial polypetide isolated from the Sargasso Sea
MDFDALFSDQLDLLKKEGNYRIFAELERQCGAFPKAKSYDKNSPENVTVWCSNDYLGMGQSQIVKDAMKSVIDTNGCGAGGTRNISGTNHHHVLLERELADLHRKEAALLFTSGYVSNWASLGTLGSKLPNAVILSDAANHASMIEGIRHSRADKVIWKHNDPEDLDRKLKAIGPNRPKIVAFESVYSMDGDISPMQEIVEVAESHNAMTYLDEVHAVGLYGPRGGGISEELGLAERITLIEGTLGKAYGVMGGYITGSKLLCDFIRSFASGFIFTTALPPAVAA

SEQ ID NO: 113587 - protein, 416 aa, Unknown
  Bacterial polypetide isolated from the Sargasso Sea
FQRPSGREIMNYEDHIEAAINRLHEEGRYRTFIDIERECGNFPYAAWKSPNGDLDKITVWCGNDYLGMGQNNLVLEAMHEALDEAGAGSGGTRNISGTTVYHNELERELADLHSKESSLLFTSAYIANDATLSTLAKLLPNLVIYSDELNHASMIEGIRRHGGEKRVFKHNDMKHLRRLLQEDNSSNPKLIAFESIYSMDGDFAPIKEICDLAEEFSAMTYIDEVHAVGMYGATGAGVAQQEELMGRIDIINGTLAKAYGVMGGYIAASAKVCDAIRSYAPGFIFTTSLSPALVAGALASVRYLREHQEVRDKHQLNAKILKMRLKSLGLPIIDHGSHIVPVIVGDPVHTKKLSDLLLVNHKIYVQPINFPTVPRGTERLRFTPSPMHGTQEIDYLVRVMDELWSHCALNRTELTA

SEQ ID NO: 113588 - protein, 234 aa, Unknown
  Bacterial polypetide isolated from the Sargasso Sea
MDYDHLFNLQLQKLKDEGNYRVFAELERCRGNFPKAKNYIESNQTSEVTVWCSNDYLGMGQNQNVLNAIKKALNECGAGAGGTRNISGTNHYHVLLEKELADLHQKESALLFTSGYISNWATLSTLGARLPGCTILSDEKNHASMIEGIRHSRAGKMIWRHNDPEDLRNKLSSLPAGAPKIVAFESVYSMDGDIAPIDEICEVAKEFGAMTYLDEVHAVGLYGKNGWGYIATKR

SEQ ID NO: 113589 - protein, 245 aa, Unknown
  Bacterial polypetide isolated from the Sargasso Sea
MNYNKFFSNALDSLKSEGRYRVFNDIKRTLGKFPNAIHYSNSEEREVSVWCSNDYLGMGQNKKVLNAMHEAIDSSGAGSGGTRNISGTSHYHVLLEKELADLHNKESALLFTSGYISNEASLSTIASILPDCVVLSDELNHASMIQGMKNSKAERFIFKHNNPKHLEEILQNIHPDRPKLVAFESVYSMDGDIAPIKELCEVAKANNALTYLDEVHAVGMYGPRGGGIAEREGLMDELDIIEGTL

SEQ ID NO: 113590 - protein, 203 aa, Unknown
  Bacterial polypetide isolated from the Sargasso Sea
MFSVIFPGQGSQIVGMGKLLYEKYDIVKKLFNKADNVLGIEISKIILDGPKEELDLTINTQPAIYLISYSIFNIITKEFNINLNKAKYFAGHSLGEYSALSCAGYLNFEETIKILRARGDAMQNAMPKGQGGMIAVLGSKIDLIEKILNDNKNNFFAQIANDNSEGQLVLSGKNEDLQKLTEELKKNSIKHIKLPVSAPSTVV

SEQ ID NO: 113591 - protein, 312 aa, Unknown
  Bacterial polypetide isolated from the Sargasso Sea
MSASLAFVFPGQGSQALTMLADHGAQQKLVLDTFGEASEALGYDLWALTQQGPEEQLNQTDKTQPAILTASIALWRLWQAEGGAKPAFVAGHSLGEYSALVAAGSIAFVDAVKLVERRGQLMQQAVPAGQGGMAAILGLEDADVLAACAEAAQGDVVSAVNFNAPGQVVIAGSAAAVERAIEACKARGAKRAMALPVSVPSHCALMKPAAERFAESVEALSWQAPQIPLVQNVSAAVVSDLVTLKADLLAQLYSPVRWVESMVRLSEQGVTDLIECGPGKVLSGLNKRCVKGINTHNLDTPDAFAAARAALA

SEQ ID NO: 113592 - protein, 308 aa, Unknown
  Bacterial polypetide isolated from the Sargasso Sea
MAQKIALLFPGQGSQSVGMLQALLETSDIVKSTFAEASTALGYDLAALVLNGPEEKLNETHRTQPALLTASVAIYRDWLAKNPDADVVMAGHSLGEYSALVCSNVISLSEAVKLVENRGLYMQEAVPAGVGSMAAIIGLGDDEIKAACAASAQGEVVSPVNYNSPGQVVIAGHKAAVDRASVACKEAGAKRALPLSVSVPSHCELMKPAAEKLANDLAALTFNTPKCDVINNVDVKAESSADAIKDALVRQLYSPVRWTETVQALVAQGVTQSYEFGPGKVLTGLAKRIDKAMVCGSVNDAASIDTAK

SEQ ID NO: 113593 - protein, 110 aa, Unknown
  Bacterial polypetide isolated from the Sargasso Sea
MDNISFVFPGQGSQKLGMLSDLAESFPVIKSTFQEASEVIGEDLWEVIQTDSKGILSKTEITQPVLLTASVAIWRAWTALTEVKPDVLAGHSLGEYSAFVCSDALSFEEA

SEQ ID NO: 113594 - protein, 276 aa, Unknown
  Bacterial polypetide isolated from the Sargasso Sea
APGMLAELAAVQPIVGQTFVEASEVLGYDLWALVQDGPVETLNETDKTQPALLAASVAIWRAYVASGKAMPAMLAGHSLGEYSALVCAGVIDFKDAIKLVELRGQLMQQAVPAGTGAMYAIIGLDNDGIANACIEAAQGEVVSPVNFNSPGQVVIAGQKDAVERAAAACKAAGAKMAVALPVSVPSHCALMKPAADKLALALNDVQFNAPSITVINNVDVASPTAVADIKDALVRQLYCPVRWSETVELMAEKGITQLVECGPGKVLTGLAKRINK

SEQ ID NO: 113595 - protein, 308 aa, Unknown
  Bacterial polypetide isolated from the Sargasso Sea
MENVAFVFPGQGSQALGMLAELAGAQPIVGQTFAEASEVLGYDLWALVQDGPVETLNETDKTQPALLAASVAIWRAYVASGKAMPAMLAGHSLGEYSALVCAGVIDFKDAIKLVELRGQLMQQAVPAGTGAMYAIIGLDNDGIANACIEAAQGEVVSPVNFNSPGQVVIAGQKEAVERAAAACKAAGAKMAVALPVSVPSHCALMKPAADKLALALNDVQFNAPSISVINNVDVASPTAVADIKDALVRQLYCPVRWSETVELMAEKGITQLVECGPGKVLTGLAKRINKSLSAQAVNDVASLAALTE

SEQ ID NO: 113596 - protein, 112 aa, Unknown
  Bacterial polypetide isolated from the Sargasso Sea
IDYINAHATSTPLGDLAECNAVKSIFDAPPPISSTKSMTGHTLGAAGAVESIFSILSIVNNISPPTINLNNPDEGCDLDFTPKEARDMKIDVSLNNSFGFGGTNSTLIFKSV

SEQ ID NO: 113597 - protein, 88 aa, Unknown
  Bacterial polypetide isolated from the Sargasso Sea
HARALTISSNKSMIGHLLGASGSAEAIISVLTIADQVVPPTINLENPEEGCDLDYVPHTARTQSINVVLSNSFGFGGTNGSLIFSKFS

SEQ ID NO: 113598 - protein, 135 aa, Unknown
  Bacterial polypetide isolated from the Sargasso Sea
HANALNDAKINSEKIDYINAHGTSTPSGDKVEVLAIERMFEECKKKINVSSTKSQIGHLLGAAGGVEAAYSILCINNKKLPYTLNLENVIDANNINFIREKAMDSDVNFVLSNSFGFGGTNVSLILKKFNESKLQ

SEQ ID NO: 113599 - protein, 184 aa, Unknown
  Bacterial polypetide isolated from the Sargasso Sea
YDKTRDGFVISGGGGVLVMEEYEHAKARGAKIYAEITGYGATSDGYDMVAPSGEGAVRCMNMALSTAKNKIDYINTHGTSTPVGDITELKAVGEVFSKYKPKISSTKSLSGHSLGATSVHEAIYSLIMMKNNFISASANIIDMDDEAKKFPIVTKVEKDVALNAIMSNSFGFGGTNATLVFEKV

SEQ ID NO: 113600 - protein, 93 aa, Unknown
  Bacterial polypetide isolated from the Sargasso Sea
MGDGIANYSSVSSTKSMTGHLLGAAAAIEAVFCVKALHHSYIPPTININELDPECDFDVTPNEGRSREIDVAMSNSFGFGGTNASVIFRKMYS

SEQ ID NO: 113601 - protein, 239 aa, Unknown
  Bacterial polypetide isolated from the Sargasso Sea
HCIGNAVEQIQLGKQDVVFAGGGEEEHWTLSCLFDAMGALSSKYNDTPEQASRAYDATRDGFVIAGGGGMVVVEELEHAKARGATIYAEVLGYGATSDGHDMVAPNGEGAARCMRQALATVDGSIDYINAHGTSTPVGDVAELKAIREVFADQCPSIGSTKSLSGHSLGAAGVQEAIYCMLMMQNDFTAVSANIQTLDEQAEGMPVLVKGKDSGPTTVLSNSFGFGGTNASLVLRKWQD

SEQ ID NO: 113602 - protein, 154 aa, Unknown
  Bacterial polypetide isolated from the Sargasso Sea
FGWEDEILRSDGIGAEWLKIKAGGSLYPTSKETFEKKWHYITQDGKTVFKSAVSEMANATEQIIIRNNLDPDEIKYLLPHQANKRIIDATAEKINLDKNKVLMNIEEYGNTTAATIPLLMHDYENNFKKGDKIILAAFGAGLTWGAAYLTWAYN

SEQ ID NO: 113603 - protein, 208 aa, Unknown
  Bacterial polypetide isolated from the Sargasso Sea
MKRVVITGMGIVSSIGNNKIEVLDSLKNSKSGIQHSPEYAELEFRSHVHGSIDIDLNALIDRKQKRFMGDSAAYCYVAMQEAIDDANLNEAKISNERTGLIVGQGGSSNENMLDVIDTLRSRGARKVGPTMVPRIMTSSNSACLSVAYKIKGVNYSISSACATSAHCIGNAYEIIQSNKQDLIFAGGGEEIHWTSTLLFDSHGSFVVK

SEQ ID NO: 113604 - protein, 118 aa, Unknown
  Bacterial polypetide isolated from the Sargasso Sea
EKVDYINAHGTSTSANDKNETSAIKSIFRDRSYLIPVSSTKSMTGHLLGGSGGIEAVACILSLTHNFIPPTINYVNPDPECDLDYVPNNAREAQVRVALSNSFGFGGHNVCLAFSKMN

SEQ ID NO: 113605 - protein, 232 aa, Unknown
  Bacterial polypetide isolated from the Sargasso Sea
AADLIKSGQQDVVIAGGSDDEHWSSSCLFDAMGALSSNFNTSPTSASRPYDVNRDGFVISGGAGMIILEEEEHAKKRGAKILAKLSGYFANSDGYDMVAPSGEGAIRCMDGAIKQSKVEIDYINTHGTSTPVGDLAELNAIKKLFKVDIPMISSTKSMTGHSLGATGAHEAIYSIMMINEDFIAPSINIESLCDEAKGINIITETKETEVKNILSNSFGFGGTNASLVISKY

SEQ ID NO: 113606 - protein, 257 aa, Unknown
  Bacterial polypetide isolated from the Sargasso Sea
TGMIMGSGGPSIENVILAADKTREKSPKRMGPFVVPRTMSSTASATLAVPFKIKGVNYTISSACATSGHCIGNAMELIQLGKQKIIFAGGSDEVHFAMTAMFDAMTALSSKYNDTPEKASRPYDKTRDGFVISGGGGVLVLEDYEHAKSRGAKIYAELTGYGATSDGYDMVAPSGEGAVRCMKMALSTAKNKIDYINTHGTSTPVGDITELKAVGEVFSSYKPKISSTKSLAGHSLGATSVHEAVYSLIMMKNNFIK

SEQ ID NO: 113607 - protein, 315 aa, Unknown
  Bacterial polypetide isolated from the Sargasso Sea
PNIKLEDHVDRKFIRFMGPGSAYNYISMMEAVKDAGLEEKDVSNISSGMIMGSGGPSIENVILAADKTREKNPKRMGPFVVPRTMSSTASATLAVPFKIKGVNYTISSACATSGHCIGNGMELIQLGKQKIIFAGGSDEVHFAMTAMFDAMTALSSKYNDTPEKASRPYDKTRDGFVISGGGGVLVLEEYEHAKARGAKIYAELTGYGATSDGYDMVAPSGEGAERCMKMALSNTKNKIDYINTHGTSTPVGDITELNAVGKVFTDYKPKISSTKSLAGHSLGATSVHEAVYSLIMMKNNFISASVNITDMDDEA

SEQ ID NO: 113608 - protein, 330 aa, Unknown
  Bacterial polypetide isolated from the Sargasso Sea
GAAYNYIAMKDAIDDSGLEDNDISNEMTGIIVGSGGPSTQNLFKSSEIGKSSGSKKIGPFMVPRAMSSTNSATLATPFKIKGVNYSITSACSTSSHCIGNAYELIQMGKQNIVFAGGGEELHWTLSILFDAMGALSSKYNSTPNKSSRAYDADRDGFVIAGGGGTLVLEELEHAKARGAKIYGEITGYGATSDGYDMVQPSGEGAERCMKQALKNIDGEIDYINTHGTSTPIGDVKELEAIKYVFGSNIPKMSSTKSLTGHSLGATGVHEAIYSLLMMKNNFISGSANIENLDNSAKDCNILLKTENDVQIEHVMSNSFGFGGTNATLVF

SEQ ID NO: 113609 - protein, 261 aa, Unknown
  Bacterial polypetide isolated from the Sargasso Sea
YQSLLNSKSGISFSEEYKEYNLKSHVHGLPNIQLEDHVDRKIIRFMGEGSAYNYVAMNEAVKDSGLEEKDISNINTGMVMGSGGPSIKNVILAADKTREKNPKKMGPFVVPRTMASTASATLAVPFKIKGVNYTISSACATSGHCIGNAMELIQLGKQNIIFAGGSDEVHFALTAMFDAMTALSSKYNDKPETASRPYDKTRDGFVISGGGGVLVMEEYEHAKARGAKIYAEITGYGATSDGYDMVAPSRGRRCKMHEYGL

SEQ ID NO: 113610 - protein, 283 aa, Unknown
  Bacterial polypetide isolated from the Sargasso Sea
KEHNLKSHIHGKPNIKLEDHVDRKTIRFMGSGSAYNYIAMKEAIEDSGLEESEVSNFKTGIVMGSGGPSIENVILAADKTRAKTPKLMGPFIVPRTMASTASATLAVPFKIKGTNYTMSSACATSGHCIGNSMELIQMGKQDIVFAGGSEEIHWAMTAMFDAMTALSSKYNDTPEKASRAYDKTRDGFVIAGGAGVLVLEEYEHAKARGAKIYAELTGYGATSDGYDMVAPSGEGAVRCMQMAMATSKNKVDYINTHGTSTPVGDITELNAVKEAFGNEIPKN

SEQ ID NO: 113611 - protein, 290 aa, Unknown
  Bacterial polypetide isolated from the Sargasso Sea
EIDRRTLRFMGDGAAYNYVSMKNAIEDSDLNENQVSNEMTGIIVGSGGPSTFNLMKSFDLAKNGGSKKVGPFMVPRSMSSTNSATLATPFKIKGVNYSITSACSTSSHCIGNAYELIQMGKQNIIFAGGGEELHWTMSILFDAMGALSSKYNNDPKKSSRAYDANRDGFVISGGGGTIVLEELEHAKSRGAKIYAEITGYGATSDGHDMVQPSGEGAIRCMKLALKKINGKIDYINSHGTSTPIGDIKELEAISEVFNEDKPYISSTKSLTGHSLGATGVHEAIYSLLML

SEQ ID NO: 113612 - protein, 182 aa, Unknown
  Bacterial polypetide isolated from the Sargasso Sea
EGAAVLILEELNHALKRNAKVICEIKGYGMSSDAFHYTLPDSSGDGAYRAMKNSLQDANLISNEIQYINAHGTSTPAGDEAEAIAIDRLFSDSKEKVYVSSTKSQIGHLLGAAGAVEAIYAIMSLNNGLIPINLNLKDELETKKIIFIKNEPFKVSLANVMSNSFGFGGTNVSLVFSKFDEK

SEQ ID NO: 113613 - protein, 128 aa, Unknown
  Bacterial polypetide isolated from the Sargasso Sea
GARRCMSEAIEAFGSDVDYINAHGTSTPVGDLAELVAIKEVFGKSAPIIGSTKSMTGHSLGATGAQEAIYSILMMQNNFIAPSINIDTLVEEAEGLKIAQSMLKHELNAVMSNSFGFGGTNASLIFSK

SEQ ID NO: 113614 - protein, 250 aa, Unknown
  Bacterial polypetide isolated from the Sargasso Sea
MKATITATAHHVPEKILTNHDIEKMVQTSDEWIQNRTGIKQRHIVSEGEASSDLSTHVANKLLVTRGIDASEIDVIIVGTVTPDHLTPSTAAIVQNNIKAVNAWAFDLSAACSGFLFGLETGSKLIESGDYNRVMVIGVDTMTSILDFDDRETCVIFGDGAGGVILEPTKLDNGIISSILKTDGSGASSLNVEAGGSRKPASEETIANREHFIRQDGKKVFKFAVKRMADVSEKILKKNGLDGNDIKLFI

SEQ ID NO: 113615 - protein, 274 aa, Unknown
  Bacterial polypetide isolated from the Sargasso Sea
MRRVVVTGMGLLTSIGNDAKSSWQNLINSKSGIKKINHFEVSDLPAKIAGYLNNDPEANDYFNKTLSLEAKDIKRNDRFIQYGLVAAKMAIEDAGLENLTDNEKLRVGVSVGSGIGGLETIYEGSLTINNEKPKKLSPFFIPSSLVNLLSGQISIKYGFKGPNHSVVTACATGAHSIGDSGEMIKRGAADVMIAGGSEAAVCRLGIAGFCAARSLSTSFNDEPHLASRPWDKDRDGFVMGEGSGIIVLEEFEYAKKRGANIYAELVGYGMSGDA

SEQ ID NO: 113616 - protein, 268 aa, Unknown
  Bacterial polypetide isolated from the Sargasso Sea
KLIPDIAPGMISIRHGFTGPNFATVSACASSANALIDSLNYIRLGYSDVVVCGGSEAGVTIAGIGGFNAVQALSKRNDDPKTASRPFDFDRDGFVLGEGGGCLILEEYDHAVARGVTIYAEVIGAGLSADAYHMTAPHPDGNGAIAVMKNCLKDAGIKPEDVDAINMHGTSTPLGDKAEAKAIKQVFGEHSYNININSTKSMTGHLLGAAGAIEAISCILSMKNSVVPPTINHFTDDPEIDPKMNFTFNKAQNREVNFALSNTFGFGG

SEQ ID NO: 113617 - protein, 126 aa, Unknown
  Bacterial polypetide isolated from the Sargasso Sea
DAMSQAIKEYGSDVDYINAHGTSTPVGDLAELNAIKEVFGKSAPVIGSTKSMTGHSLGATGAQEAIYSILMMQNDFIAPSININTLVEEAEGLNISQLMIKQKLNAVMSNSFGFGGTNASLIFSKP

SEQ ID NO: 113618 - protein, 117 aa, Unknown
  Bacterial polypetide isolated from the Sargasso Sea
EDVDYVNAHGTSTPAGDKAETDAIKKSFAEHAYKVAISSTKSMTGHLLGAAGGVEAIFTILALKNNIIPPTINLNNPDPECDLDYVPKTAREKVINYALSNSFGFGGTNGTLVFKKS

SEQ ID NO: 113619 - protein, 155 aa, Unknown
  Bacterial polypetide isolated from the Sargasso Sea
SGYGMSADAYHMTLPSETGEGAQRSMSNAISDANLSVEDINYINAHGTSTPAGDIVEAKAVESLLGSHSKNIVVNSTKSMIGHLLGAAGGVEAIATVLSLKDQRVHQTINVDNQDPECNLDFNIDSSRQMDIQHALTNSFGFGGTNGSLIFSKYD

SEQ ID NO: 113620 - protein, 158 aa, Unknown
  Bacterial polypetide isolated from the Sargasso Sea
KIYAEVIGFGTSSDAHHVTAPPEDGRGAVLSMTNAINDAEIHPSEIDYINAHGTSTPLGDIAETTALKKVFGDNVPQISSTKSMTGHTLGAAGAIESIFCIQAINHGIIPPTINLDKPDPLCDLNYTPLVSAEKNVRVAMNNSFGFGGTNSTLVFKQI

SEQ ID NO: 113621 - protein, 256 aa, Unknown
  Bacterial polypetide isolated from the Sargasso Sea
SSVSTACAAGSNAICDSFRLLQLGKADAMICGGAEASITPLGVAGFASAKALSFRNESPQTASRPFDAERDGFVIGEGSGILVLETLENAQKRNARIYAEIIGYGTTCDAHHITAPSPGGVGGAEAIKLAIEDASLSLERVDYINAHGTSTSANDKNETSAIKSIFKDRSYLIPVSSTKSMTGHLLGGSGGIEAVACILSLTHNFIPPTINYVNPDPECDLDYVPNNAREAQIRVALSNSFGFGGHNVCLAFRKMN

SEQ ID NO: 113622 - protein, 259 aa, Unknown
  Bacterial polypetide isolated from the Sargasso Sea
CLGNNQEEVHQSLLKTKSGISFCEEYREHNLKSHVHGKPNIKLEDHIDRKTIRFMGSGSAYNYIAMKEAIEDSGLEESEVSNFKTGIIMGSGGPSIENVILAADKTRAKTPKLMGPFIVPRTMASTASATLAVPFKIKGTNYTMSSACATSGHCIGNSMELIQMGKQDIVFAGGSEEIHWAMTAMFDAMTALSSKYNDVPESASRAYDKTRDGFVIAGGGGVLVLEEYEHAKARGAKIYAELTGYGATSDGYDMVAPSG

SEQ ID NO: 113623 - protein, 97 aa, Unknown
  Bacterial polypetide isolated from the Sargasso Sea
AETIALKKVFGESVPQISSTKSMTGHTLGAAGAIESIFCIKAINDGIIPPTINLDNPDSLCDLNYTPLVSTEKKVNVAMNNSFGFGGTNSTLVFKKI

SEQ ID NO: 113624 - protein, 111 aa, Unknown
  Bacterial polypetide isolated from the Sargasso Sea
MNGNFVFKNAVLRFEEVINEALSYSNLKSEDISLLIPHQANLRISQYIQKRLNLSNTKVYNNIMKYGNTTAASIPIALKEALDEEKLKKGDILCLAAFGSGFTWASALIKW

SEQ ID NO: 113625 - protein, 316 aa, Unknown
  Bacterial polypetide isolated from the Sargasso Sea
LLINSKSGITFCNEYKEYNLKSNIHGKPNIKLEDYIDRKVIRFMGEGSAYNYIAMSEAVKDSGLQEKDISNISSGMIMGSGGPSIKNVILAADKTREKNPKKMGPFVVPRTMASTASATLAVPFKIKGVNYTISSACATSGHCIGNAMELIQLGKQKIIFAGGSDEVHFALTAMFDAMTALSSKYNDTPEKASRPYDKNRDGFVISGGGGVLVLEEYDHAKARGAKIYAEITGYGATSDGYDMVAPSGEGAARCMKLALSTTKNKIDYINTHGTSTPVGDITELKAVHEVFKDSIPKISSTKSLSGHSLGATSVHE

SEQ ID NO: 113626 - protein, 274 aa, Unknown
  Bacterial polypetide isolated from the Sargasso Sea
ELGIDVGVFLASGIGGFGTIEREHRALLKGGPRKISPFFIPSAIINLAAGQVSIRFGAKGPNSATATACAASAHAIGDALQIIRRGGAEVMIAGGSEAAITPMGVGGFASMRALSTRNDDPQRASRPFDRDRDGFIIGEGAGVVILEELEHAQARGAQIYCELVGYGMSADAHHMTAPAEDGAGAVRVMENAIKDAGIVPSEIQYVNAHGTSTPYNDKIETLAIKKCFGEHAQKLAISSTKSMTGHLLGAAGGLEAGISALAIQHQIVPPTINL

SEQ ID NO: 113627 - protein, 284 aa, Unknown
  Bacterial polypetide isolated from the Sargasso Sea
VSPFTVPMMIPNMATGLAAIALGAKGPSSSVSTACAAGSNAIGDSFRLLQLGKADAMICGGAEASITPLGVAGFASAKALSFRNESPQTASRPFDAERDGFVIGEGSGILVLETLENAQKRNARIYAEIVGYGTTCDAHHITAPSPGGVGGAEAIKLAIEDSNLSIEKIDYINAHGTSTSANDKNETSAIKSIFRDRSYLIPVSSTKSMTGHLLGGSGGIEAVACILSLTHNFIPPTINYVNPDPDCDLDYVPNNAREAQVKVALSNSFGFGGHNVCLAFSKMN

SEQ ID NO: 113628 - protein, 291 aa, Unknown
  Bacterial polypetide isolated from the Sargasso Sea
NGEEISYDCLVLASGAKARNLPSQILQNNKQFVLRNFNDALKLQNALTEEKEVMIIGGGYIGLEIASSLRKKGHKIRVLEVAGRLLARVASPELSNYFLNLHKENEVKISFGESINNIKEFDKKISIETSSHNNYIADLIIVGIGVSPEIDLAYEAGLDCDNGIVVDANYRSSYSNIFAIGDCALNKDEYGIRIESVHHAQFSASRVSSCILGLEMPKYEEPWFWSDQYNVKLQSVGIIKDIKNTISRNGRREGSKSWWSFSSDGLVAVEAVNDPQSYVVAKHILQNKIKV

SEQ ID NO: 113629 - protein, 277 aa, Unknown
  Bacterial polypetide isolated from the Sargasso Sea
IINMPSGYVSIKYNLKGPSYSTVSACASGAHAIGESFRLIQHGQADIMVAGGTESTICPTAIEGFTSCRALSLKFNDQPEKSSRPFDKERDGFVMGEGAGTIILEELEHAKKRNAEILCEIKGYGMSSDAFHYTLPEPTGDGAYRAMANCINDAKISFEEINYINAHGTSTPAGDKVEVLAIEKIFKNNPKKINVSSTKSQIGHLLGAAGAVEAIYSMKSIKESILPQTNNLDNPMPSSNINFIKKEPMELSVNNVLSNSFGFGGTNVSLIFSKFNG

SEQ ID NO: 113630 - protein, 215 aa, Unknown
  Bacterial polypetide isolated from the Sargasso Sea
GVAGFASAKALSSRNESPQTASRPFDAERDGFVIGEGSGILVLETLENAQKRNARIYAEIIGYGTTCDAHHITAPSPGGIGGAEAIKLAIEDACLSPEKVDYINAHGTSTSANDKNETSAIKSIFKDRSYLIPVSSTKSMTGHLLGGSGGIEAVACILSLTHNFIPPTINYVNRDPECDLDYVPNNAREAQIGVALSNSFGFGGHNVCLAFSKMN

SEQ ID NO: 113631 - protein, 67 aa, Unknown
  Bacterial polypetide isolated from the Sargasso Sea
EKLNFEPNKVISTVSNHGNTSAASIPLALDFALTSNKIKEGDLLAFQAIGGGLSWGSIIVKFGKPKK

SEQ ID NO: 113632 - protein, 216 aa, Unknown
  Bacterial polypetide isolated from the Sargasso Sea
MAGFAAARALSTKFNNDPISSSRPWDQDRDGFVMGEGSGVVVLEEREHAIARGAKIYAEIKGYGMSGDAHHITAPAENGDGGFRAMKLALNDAKINSSELDYINAHGTSTPLGDVIELKAIGRLLNQKIENVSISSTKSATGHLLGAAGAIEAIYSILSIINQTVPPTNNLISPDKEATGFDLVPIHSKKRNIKNVLSNSFGFGGTNASLVISCSD

SEQ ID NO: 113633 - protein, 284 aa, Unknown
  Bacterial polypetide isolated from the Sargasso Sea
GIVMGSGGPSIENVILAADKTRAKTPKLMGPFIVPRTMASTASATLAVPFKIKGTNYTMSSACATSGHCIGNSMELIQMGKQDIVFAGGSEEIHWAMTAMFDAMTALSSKYNDMPEKASRAYDKTRDGFVIAGGAGVLVLEEYEHAKARGAKIYAELTGYGATSDGYDMVAPSGEGAVRCMKMAMSTSKNKIDYINTHGTSTPVGDITELNAVKDAFGNEIPKISSTKSLSGHPLGAASVHEAIYCLIMMKNNFIAASANISEMDEEAQKFPIVAKTEIGATLN

SEQ ID NO: 113634 - protein, 281 aa, Unknown
  Bacterial polypetide isolated from the Sargasso Sea
MSKPIPKAGIMDIDAYVGGLHTVDGVGEVVVLASNEGPLGASPLAMEAYEREARRLHLYPDGGAKELRDAIGQRFGLAPARIVCGAGSDEIISLLIRAYAGVGDEVLYSAHGFLMYQINAKSAGATPVAAPETNLTANVDALLDAVTHRTKMLFLANPNNPTGSYLPADELRRLREGLPDHVLMVVDAAYAEYVSRNDYVSGAELVEKHDNVVMTRTFSKAFGLAAVRLGWAYCPAEVADVLNRVRNPFNVTAPAQAAGIAAVSDLSHTDAAIAHNDEWLL

SEQ ID NO: 113635 - protein, 84 aa, Unknown
  Bacterial polypetide isolated from the Sargasso Sea
MKGIRLCGSGAAVPRIRVSNDDLSGRVETSDEWIRTRTGIAARRVADEQESLTSLAAAAGQQALERAGWDASSVDLILLATSSP

SEQ ID NO: 113636 - protein, 161 aa, Unknown
  Bacterial polypetide isolated from the Sargasso Sea
HAKSRGAKIYAELTGYGATSDGYDMVAPSGEGAVRCMNMALSTAKNKIDYINTHGTSTPVGDITELNAVGKVFTDYKPKISSTKSLAGHSLGATSVHEAVYSLIMMKNNFIAASANITDMDEEAKKYPIVTKVEKDVSLNSIMSNSFGFGGTNATLVFEKV

SEQ ID NO: 113637 - protein, 144 aa, Unknown
  Bacterial polypetide isolated from the Sargasso Sea
GKFLKDLWCEAPGTSNNPRLSKDILDKGKHLPYMNGREVFKNAVRRFPEVIKEAMDANELTIDDISQIIPHQANHRISEAVAKRMGVGMDKVFSNIKYYGNTTAASIPIAMCEARDKGLFSDGDIIILAAFGAGFTWASAAIRW

SEQ ID NO: 113638 - protein, 127 aa, Unknown
  Bacterial polypetide isolated from the Sargasso Sea
ALADGGIDPSEIDYVNAHGTSTPANDKNETSAIKSALGDRALQIPVSSTKSMTGHLLGGSGGIEAVACVLALQHGVVPPTINHTNPDPDCDLDVVPNQARDQTLGTVLSNSFGFGGHNVCLAFKRAS

SEQ ID NO: 113639 - protein, 268 aa, Unknown
  Bacterial polypetide isolated from the Sargasso Sea
SGHISIKYNLKGPNSSPVTACATGTHAIGDSFSIIKNDKADIMICGGAEAAICPLGISGFSAARALCDTFNETPEKGSRPWDRDRSGFVMGEGAGVLVLEEYEHAKKRNAMIYGEVKGYGMSGDAFHITKPSEDGNGGFRAMEMALRESKLNTDEIGYVNAHGTSTPVGDTIELKAVEKLFKSNDNLFMSSNKSAIGHLLGAAGAVEAVFSFMSLKTKNLPPTLNLDNPDVTTSINLIPHESISKSVKNIISNSFGFGGTNASIILGV

SEQ ID NO: 113640 - protein, 241 aa, Unknown
  Bacterial polypetide isolated from the Sargasso Sea
MFKNELYRYKFYLILIPTLLNFHSLFSQGNPNPSALIDSLILNEMTDKNLPGVSTVIVKNGKIVWVESYGYADVENLVPVEDSTVFMLASVSKLFTGTVAMMLHENNVININENINNYLPWNIEIPGFNSDTITFHQLMTHTSSIKDNWATMGNYYNSPDPTITLGDCMYRYFNANGVDYNSSNNFLAYSPGTFYKYSNMASALNGYLVELATSTPFDQYCNDNLFSPLCMDKTSWFFADF

SEQ ID NO: 113641 - protein, 131 aa, Unknown
  Bacterial polypetide isolated from the Sargasso Sea
MKSRITSIGSYTPNNIVTNKDLEKRVDTTDEWIVSRTGIKERPIADDSQATSDLAFEAAKIAIERADIDKNEIDLIIVGTCTPDVATPNVGTIVQKRLELKNFPAFSIEAACSGFIYALNIAKRFIKSGES

SEQ ID NO: 113642 - protein, 236 aa, Unknown
  Bacterial polypetide isolated from the Sargasso Sea
IQYGDADVMFAGGTESVITPLCVAGFNAAKALSHRNNDPQGASRPFDMDRDGFVIGEGCGVLILEELEFAKKRQAPILGEIIGYSLNGDAHHITATAPGGEGAARCINLALKNAGINKEDVDYINAHGTSTAADATETQAIKTVFKDHAKQLPVSSTKSMTGHLLGAAGGVEAIYSLMAIKNGTLPPTINYTTPDPECDLDYVPNQAREAKIDICISNSFGFGGTNGVLVFKKFSG

SEQ ID NO: 113643 - protein, 209 aa, Unknown
  Bacterial polypetide isolated from the Sargasso Sea
MNRVVVTGLGIVSCIGNDQKTVTDNLKNLKSGITYAPEYEEFSFRSLVHGKPEIDLEKKIDRRLLRFMGDGAAYNYISMKDAIDDSGLEQNEISNEMTGIIVGSGGPSTKNMHQAFKIGSQQGSKKVGPFMVPRTMSSTNSATLATPFGIKGVNYSISSACSTSSHCIGNAYELIQMGKQNIMFAGGGEELDWTMSILFDAMGSLIFKV

SEQ ID NO: 113644 - protein, 200 aa, Unknown
  Bacterial polypetide isolated from the Sargasso Sea
NETPSEACSPFDKNRDGFVMAEGSTVLVLESEESAKKRGVDIYGYIDGYGSTSDAHHITAPSEGGEGAFRAMEKAIEDADLQLTEIDYINAHGTSTPINDKNETNAIKTLFSDKAYDLQISSTKSMTGHLLGGAGAFESMVCLLSIKYNKIAPTINLNVPDDECDLNYTPNSALEKEVQTAMSNSFGFGGHNAVLVFSSI

SEQ ID NO: 113645 - protein, 202 aa, Unknown
  Bacterial polypetide isolated from the Sargasso Sea
SSKYNHEPKKASRAFDADRDGFVIAGGGGVIVLEELEHAKSRGAKIYAEVIGYGATSDGFDMVAPSGEGAERAMKLAISSCRHRQIDYINAHGTSTPAGDVTEVQAVRQVFSERKFPLISSTKSLTGHSLGAAGVQEAIYSILMISNNFVAGSANIFNLDPDLKNEEIALEAIEEIELDAVLSNSFGFGGTNASLALARYLD

SEQ ID NO: 113646 - protein, 265 aa, Unknown
  Bacterial polypetide isolated from the Sargasso Sea
QSLLTTKSGITFSEEYKEHNLKSHVHGKPNIKLEDHIDRKTIRFMGSGSAYNYIAMKEAIKDSGLEESEVSNFKTGIVMGSGGPSIENVILAADKTRAKTPKLMGPFIVPRTMASTASATLAVPFKIKGTNYTMSSACATSGHCIGNSMELIQMGKQDVVFAGGSEEIHWAMTAMFDAMTALSSKYNDTPDTASRAYDKTRDGFVIAGGGGVLVLEEYEHAKARGAKIYAELTGYGATSDGYDMVAPSGEGAVRCMKMAMATSKK

SEQ ID NO: 113647 - protein, 280 aa, Unknown
  Bacterial polypetide isolated from the Sargasso Sea
DASDLSCRIGGEIPTGPYSEGKLDLNEWLNIKEQRKLDRFIMLGLIAAEEAIKDSNIEISNEEVSKKTGVIVGSGIGGLKTISETSILLEEKGPRRISPFFIPSSLINLISGQISIKYGFKGPNHSVVTACSTGSHAIGDAYRIISTCDADIMIAGGAEAAICKLGVAGFAAARALSTSFNDNPKEASRPWDKNRDGFVMGEGAGILVLEEFEHAKKRGAKIYAEIIGYGMSGDAYHITAPEPSGAGALSAMTNALKNAKLNSEKIDYINAHGTSTPLGD

SEQ ID NO: 113648 - protein, 272 aa, Unknown
  Bacterial polypetide isolated from the Sargasso Sea
TVPMMIPNMATGLAAIALGTKGPSSAVATACAAGSNAIGDAFRLLQLGKADAMVCGGAESAITPLGVAGFASAKALSFRNNDPATASRPFDKERDGFVIGEGAGILVLETLEHAQARGATILGEILGYGMTCDAHHITSPTPGGVGGAEAMRLALADGGIDPSAIDYVNAHGTSTPANDKNETSAIKSALGDRALQIPVSSTKSMTGHLLGGSGGIEAVACVLALQHGVVPPTINHTNPDPDCDLDVVPNQARDQTLGTVLSNSFGFGGHNV

SEQ ID NO: 113649 - protein, 177 aa, Unknown
  Bacterial polypetide isolated from the Sargasso Sea
DGAGSLVLEDFDHAKARDAKIYAEVIGFGTSSDAHHVTAPPEDGRGAVLSMTNALNDAEIHPSEIDYVNAHGTSTPLGDIAETTALKKVFGDYVPQISSTKSMTGHTLGAAGAIESIFCIQAINHGIIPPTINLDKPDPLCDLNYTPLVSVEKNVRVAMNNSFGFGGTNSTLVFKKI

SEQ ID NO: 113650 - protein, 242 aa, Unknown
  Bacterial polypetide isolated from the Sargasso Sea
TSLMGTYAAEKAISDSGLDKNDIDFIIFSTLSPDYYFPGSGVLLQKNLGIKEVGALDVRNQCSGFIYGLSIADQYIKSGMYKNILVVGSEIHSGGLDKSSRGRSVSVIFGDGAGAAVVSATDSDSCILSTHLHSEGKFAEELAVIKPATTFWIDKIVKNDDDKSYFPYMNGNFVFKNAVVRFEQVIFEALNYSNLKTEDINMLITHQANLRISQYIQKRLKLTDSQVFNNIMKYGNTTAASI

SEQ ID NO: 113651 - protein, 160 aa, Unknown
  Bacterial polypetide isolated from the Sargasso Sea
AKSRGAKIYAEITGYGATSDGYDMVAPSGEGAVRCMNMALSTSKNKIDYINTHGTSTPVGDITELNAVGEVFKEKVPKISSTKSLAGHSLGATSVHEAIYSLIMMKNNFISASININEMDEGAKKFPIVTSVEKDVTLNSIMSNSFGFGGTNATLVFEKV

SEQ ID NO: 113652 - protein, 166 aa, Unknown
  Bacterial polypetide isolated from the Sargasso Sea
KQRGARIYCELVGYGASSDAFHITAPSTEGPAHAVKIAVKDAEVDSEKIDYINTHGTSTPAGDINELKALKLALGDAIANHTSVSSTKSMTGHLLGAAAAIEAVFCVKALHHSYIPPTININELDPECDFDVTPNEGRSREIDVAMSNSFGFGGTNASVIFRKMHS

SEQ ID NO: 113653 - protein, 321 aa, Unknown
  Bacterial polypetide isolated from the Sargasso Sea
FKKPHFHGKPNIKLADHVDRKALRFMGNGSAYNYVAMKEAISDSGLEDKDVSNINSGMVMGSGGPSIENVILAADKTREKNPKKMGPFIVPRTMASTASATLAVPFKIKGVNYTISSACATSGHCIGNAMELIQFGKQKIIFAGGSDEIHFAMTAMFDAMTALSSKYNDNPQKASRPYDKTRDGFVIAGGAGVLVLEELEHAKSRGAKIYAELTGYGATSDGYDMVAPSGEGATRCMNLALKTTRNKVDYINAHGTSTPVGDITELKAIKDAFKDNVPKISSTKSLSGHPLGAASVHEAIYSLIMMKNNFIAASANVNEMD

SEQ ID NO: 113654 - protein, 297 aa, Unknown
  Bacterial polypetide isolated from the Sargasso Sea
KEHNLKSHIHGKPNIKLQDHIDRKTIRFMGSGSAYNYIAMKEAIRDSGLEEKDVSNFKTGIVMGSGGPSIENVILAADKTRAKTPKLMGPFIVPRTMASTASATLAVPFKIKGTNYTMSSACATSGHCIGNSMELIQMGKQDIVFAGGSEELHWAMTAMFDAMTALSSKYNDKPETASRAYDKTRDGFVIAGGGGVLVLEEYEHAKARGAKIYAELTGYGASSDGYDMVAPSGEGAIRCMRIALSTSKNKIDYINTHGTSTPVGDITELNAVAETFGKDIPKISSTKSLSGHPLGAA

SEQ ID NO: 113655 - protein, 87 aa, Unknown
  Bacterial polypetide isolated from the Sargasso Sea
MRQLHRRVVVTGLGILSPIGNTLAEAWDSCINGVSGISRIEIDLKNNPVEVGGRLKNFNPEDFLDSKEIRRIDPFIQYGIIAANQSI

SEQ ID NO: 113656 - protein, 286 aa, Unknown
  Bacterial polypetide isolated from the Sargasso Sea
KTQFACELKGYDPMDFFDRKEGRKLDKFSQYAIVSSDEAINDSGLNSEGIDKGRVGVIWGSGIGGLKTFQEEVTNFVNGDGTPRYNPFFIPKMIPDIAAGVISIRHGFKGPNFATVSACASSANALIDGVNYIRLGYADAIVSGGSEAGIIKSGIGGFNAVQALSKRNDDPKTASRPFDLDRDGFVLGEGGGCVILEELNHAISRGAKIYAEVVGIGLSSDAYHMTAPHPDGEGAISVMNNCIKDSGLTYKDVDVVNMHGTSTPLGDKAEAKALGAVFKDHLYSMN

SEQ ID NO: 113657 - protein, 191 aa, Unknown
  Bacterial polypetide isolated from the Sargasso Sea
WDKDRDGFVMSEGSGILVLEELEHAKLRSANIYAEVLGYGLSGDGYHPTAPDPRGAGGTRAMKMAIKDSKLNIDDINYINAHGTSTPLGDEIEFNSVSEIFGKSKEKLFMSSTKSSTGHLLGASGAVESIFSILTIKNNIIPPTLNLENPSIQSKKINLVPNSSLNENIDCVLTNSFGFGGTNASLIFKRF

SEQ ID NO: 113658 - protein, 299 aa, Unknown
  Bacterial polypetide isolated from the Sargasso Sea
MKRVVITGLGIVSCLGNNQQEVFESLINSKSGITFAEEYKEYNLKSHVHGIPNIKLEDYVDRKVIRFMGKGSAYNYIAMNEALKDSGLEEKDISNIKTGMVMGSGGPSIENVILAADKTREKNPKKMGPFVVPRTMASTASATLAVPFKIKGVNYTISSACATSGHCIGNAMELIQLGKQNIVFAGGSDEVHFAMTAMFDAMTALSSKYNDTPEKASRPYDKTRDGFVISGGGGVLVVEEYEHAKARGAKIYAELTGYGATSDGYDMVAPSGEGAVRCMQMAMSTGKNKIDYINTHGTS

SEQ ID NO: 113659 - protein, 159 aa, Unknown
  Bacterial polypetide isolated from the Sargasso Sea
KARGAKIYAELTGYGATSDGYDMVAPSGEGAVRCMQMALNTSKNKIDYINTHGTSTPVGDITELKAVGEVFKDNIPKISSTKSLSGHSLGATSVHEAVYSLIMMKNNFISASINITDMDEEAKKYPIVTKVEKDVTLNSIMSNSFGFGGTNATLVFEKV

SEQ ID NO: 113660 - protein, 288 aa, Unknown
  Bacterial polypetide isolated from the Sargasso Sea
EEVHQSLLNSKSGITFSEEYKEHNLKSHVHGKPNIKLEDHVDRKTIRFMGSGSAYNYIAMKEAIKDSGLEENEVSNFKTGIVMGSGGPSIENVILAADKTRAKTPKLMGPFIVPRTMASTASATLAVPFKIKGTNYTMSSACATSGHCIGNSMELIQMGKQNVVFAGGSEEIHWAMTAMFDAMTALSSKYNDTPETASRAYDKTRDGFVIAGGGGVLVLEEYEHAKARGAKIYAELTGYGATSDGYDMVAPSGEGAVRCMQMAMATAKNKIDYINTHGTSTPSWRYHQ

SEQ ID NO: 113661 - protein, 161 aa, Unknown
  Bacterial polypetide isolated from the Sargasso Sea
MQKLRGAKIYAELTGYGATSDGYDMVAPSGEGAVRCMKMAMATAKNKIDYINTHGTSTPVGDITELNAVKETFGTEIPKISSTKSLSGHPLGAASVHEAIYCLIMMKNNFIAGSANINEMDEEAEKFPIIAKTETGVTLNTVMSNSFGFGGTNAALIFEKV

SEQ ID NO: 113662 - protein, 297 aa, Unknown
  Bacterial polypetide isolated from the Sargasso Sea
HGKPKMKLEDYIDRKTIRFMGSGSAYNFIAMKEAIKDSGLEDKDVSNFKTGIVMGSGGPSIENVILAADKTRAKTPKLMGPFIVPRTMASTASATLAVPFKIKGTNYTMSSACATSGHCIGNSMELIQMGKQDIVFAGGSEEIHWAMTAMFDAMTALSSKYNDTPEKASRAYDKARDGFVIAGGGGVLVLEEYEHAKARGAKIYAELTGYGATSDGYDMVAPSGEGAVRCMKMAMATSKNKIDYINTHGTSTPVGDITELNAVKEAFGTEIPKISSTKSLSGHPLGAASVHEAIYCL

SEQ ID NO: 113663 - protein, 106 aa, Unknown
  Bacterial polypetide isolated from the Sargasso Sea
MYNSKIAGLGKYLPDNVVTNDDLSKIMDTTDEWIIERTGIKERRHIKKGDGDTTASMGVKAAKIAIERAGIDKNDIELILFATLSPDYYFPGSGVLVQELLDIPTC

SEQ ID NO: 113664 - protein, 250 aa, Unknown
  Bacterial polypetide isolated from the Sargasso Sea
CAAGSNAIGDAFRLLQLGKADAMVAGGAESAITPLGVAGFASAKALSFRNDDPATASRPFDAERDGFVIGEGAGVLVLETLEHAEARGASILAEVVGYGMTCDAYHITSPTPGGVGGAEAMRLALSDGGLDPSEIDYVNAHGTSTPANDKNETSAIKSALGARAFEIPVSSTKSMTGHLLGGSGGIEAVACVLAIQNNMVPPTINHANPDPDCDLDVVPNTARERKLVTVLSNSFGFGGHNVCLAIRRMT

SEQ ID NO: 113665 - protein, 90 aa, Unknown
  Bacterial polypetide isolated from the Sargasso Sea
MAKAGIEAKEVDWVVPHQANVRIIQGTARKMGIPDEKVIKTVQDHGNTSAASIPLALSVASKSGKIKQNDLIVTEAIGGGLAWGAIVLRW

SEQ ID NO: 113666 - protein, 146 aa, Unknown
  Bacterial polypetide isolated from the Sargasso Sea
EDRGILSVDLNSDGSFRDILYVDGGVSQKTTGYLRMEGKEVFKHAIDKLAKTSETAMIKAGIEASEVDWVVPHQANVRIIQGTARKMGIPDEKVIKTVQDHGNTSAASIPLALSVASKSGQIEKNDLIVTEAIGGGLAWGAIVLRW

SEQ ID NO: 113667 - protein, 307 aa, Unknown
  Bacterial polypetide isolated from the Sargasso Sea
MKRVVVTGIGIVSCLGNNQKEVYESLVNSKSGISFAEEYKTHNLKSNVHGKPNIKLGDHVDRKALRFMGNGSAYNYVAMKEAVKDSGLKENEVSNVSTGMVMGSGGPSIENVILAADKTREKNPKKMGPFIVPRTMASTASATLAVPFKIKGVNYTISSACATSGHCIGNAMELIQFGKQKIIFAGGSDELHFAMTAMFDAMTALSSKYNDNPDKASRPYDKTRDGFVIAGGAGVLVLEEMEYAKARGAKIYAELTGYGATSDGFDMVAPSGEGATRCMNLALKTTRNKVDYINAHGTSTPVETLQN

SEQ ID NO: 113668 - protein, 171 aa, Unknown
  Bacterial polypetide isolated from the Sargasso Sea
MKRVVVTGIGVLSCLGNNQKEVYESLINSKSGITFCQEYKDYNLKSNVHGKPNIKLEDHIDRKIIRFMGEGSAYNYIAMNEAVKDSGLEEKDISNDLTGMIMGSGGPSIKNVILAADKTREKNPKKMGPFVVPRTMASTASATLAVPFKIKGVNYTISSACATSAHCIGNA

SEQ ID NO: 113669 - protein, 206 aa, Unknown
  Bacterial polypetide isolated from the Sargasso Sea
MFDAMTALSSKYNNTPEKASRAYDKTRDGFVIAGGGGVLVLEEYEYAKARGAKIYAEITGYGATSDGYDMVAPSGEGAVRCMQIALKSSKNKIDYINTHGTSTPVGDITELKAIGETFKEKVPKISSTKSLSGHPLGAASVHEAIYCLIMMKNNFITGSANINEMDEEAKKFPIVIKTEKEVNLDAVMSNSFGFGGTNATLIFEKV

SEQ ID NO: 113670 - protein, 254 aa, Unknown
  Bacterial polypetide isolated from the Sargasso Sea
MRRVVITGLGIVSCLGNNREEVHQSLLNTKSGISFSEEYKEHNLKSHIHGKPNIKLEDHIDRKTIRFMGSGSAYNYIAMKEAIEDSGLEDGEVSNFKTGIVMGSGGPSIENVILAADKTRAKTPKLMGPFIVPRTMASTASATLAVPFKIKGTNYTMSSACATSGHCIGNSMELIQMGKQDVVFAGGSEEIHWAMTAMFDAMTALSSKYNDTPEKASRAYDKTRDGFVIAGGAGVLVLEEYEHAKARGAKIYAE

SEQ ID NO: 113671 - protein, 320 aa, Unknown
  Bacterial polypetide isolated from the Sargasso Sea
RGGSSVIAKFKIRNSFSQEYKEHNLKSHIHGKPNIKLEDHIDRKTIRFMGSGSAYNYIAMKEAIEDSGLEEKDVSNFKTGIVMGSGGPSIENVILAADKTRAKTPKLMGPFVVPRTMASTASATLAVPFKIKGTNYTMSSACATSGHCIGNSMELIQMGKQDIVFAGGSEEIHWAMTAMFDAMTALSSKYNDTPETASRAYDKTRDGFVIAGGGGVLVLEEYEHAKARGAKIYAELTGYGATSDGYDMVAPSGEGAVRCMQMAMATAKNKIDYINTHGTSTPVGDITELNAVKETFGEEIPKISSTKSLSGHPLGAASVH

SEQ ID NO: 113672 - protein, 111 aa, Unknown
  Bacterial polypetide isolated from the Sargasso Sea
MNGQLVFKNAVVRFSEVIMEGLNHNDLKPDQIDMLIPHQANLRISQFVQKKFGLSDNQVYNNIQKYGNTTAGSIPIALTEAFQEGKIKSGHIVVLAAFGSGFTWGSTIIKW

SEQ ID NO: 113673 - protein, 205 aa, Unknown
  Bacterial polypetide isolated from the Sargasso Sea
MKRVVVTGLGVVSCLGNNQDEVYQSLVNTKSGITFSEEYKEHNLKSHVHGKPNIKLEDYIDRKVIRFMGAGSAYNYVAMSEAVKDSGLEENEVSNISTGMVMGSGGPSIENVILASDKTREKNPKKMGPFIVPRTMASTASATLAVPFKIKGTNYTISSACATSGHCIGNAMELIQLGKQNIIFAGGSDEVHFAMTAMFDAMTAL

SEQ ID NO: 113674 - protein, 160 aa, Unknown
  Bacterial polypetide isolated from the Sargasso Sea
RSDDESQILSTHLHSQGKDLKNLWMEAPGTCKGSWFKENKFDKKKFTPKMNGREVFKNAVKRFPEVIHEAIDYNNLDFNDIKLIIPHQANYRISEAVAKRLGVGMDKVYSNIHKYGNTTAASIPIALTEAVNSKKINKKDIIILVAFGAGYTWASAAIKW

SEQ ID NO: 113675 - protein, 300 aa, Unknown
  Bacterial polypetide isolated from the Sargasso Sea
MRRAVISGMGIVSCIGNNKTEVTDSLKQGRSGIKHNESYAEVGMRSHVSGSVEIDTKTLIDRKFLRFMGDASAYSFIAMNEAIEDSGLNQNQVSNTRTGLVAGSGGGSPEDQLNSTDIVREKGVRRVGAYRVPRTMSSSVSACLATPFQIKGVNYSISSACATSAHCIGHAAELIQLGKQDVIFAGGGESEHWTLSHMFDAMGALSTDYNETPEKASRAFDADRDGFVIAGGGGMVVVEELNHALQRGAKIYAEITGYAATSDGYDMVAPSGEGGARAMKSALGKNNKSVDYINTHGTST

SEQ ID NO: 113676 - protein, 105 aa, Unknown
  Bacterial polypetide isolated from the Sargasso Sea
VHDRLETLAIKRCFGEHAHKLAISSTKSMTGHLLGAAGGLEAGIAALTVRDQVIPPTINLDNPDPDCDLDYVPKVARPATINYALSNSFGFGGTNASLLFKRYEG

SEQ ID NO: 113677 - protein, 289 aa, Unknown
  Bacterial polypetide isolated from the Sargasso Sea
MESLISNLEDHIDRKTIRFMGSGSAYNYIAMKEAIEDSGLEESEVSNFKTGIVMGSGGPSIENVILAADKTRAKTPKLMGPFIVPRTMASTASATLAVPFKIKGTNYTMSSACATSGHCIGNSMELIQMGKQDIVFAGGSEEIHWAMTAMFDAMTALSSKYNDTPEKASRAYDKTRDGFVIAGGAGVLVLEEYEHAKARGAKIYAELTGYGATSDGYDMVAPSGEGAVRCMQMAMATSKNKVDYINTHGTSTPVGDITELNAVKEAFGNEIPKISSTKSLSGHPLGAAS

SEQ ID NO: 113678 - protein, 242 aa, Unknown
  Bacterial polypetide isolated from the Sargasso Sea
PLYRHAVEQIQLNKQDIVFAGGGEELDWTLSCLFDAMGAMSSKYNDTPENASRAFDRDRDGFVIAGGGGVVVVEELHHAIARGAKIYAEVTGYGATSDGYDMVAPSGEGAERSMRLALASLNGRKVDYINAHGTSTPAGDVTEIQAVRNVFSEEKQPLVASTKSLTGHSLGAAGVQEAIYSLIMMENNFISASANVFNLDEEISSNEVATGLIEGIELDTVLSNSFGFGGTNASLALSKFTG

SEQ ID NO: 113679 - protein, 81 aa, Unknown
  Bacterial polypetide isolated from the Sargasso Sea
IGSTKSMTGHSLGATGAQEAIYSILMMQNDFIAPSINIDTLVEEAEGLNISQSMMEHKLNAVMSNSFGFGGTNASLIFSKI

SEQ ID NO: 113680 - protein, 179 aa, Unknown
  Bacterial polypetide isolated from the Sargasso Sea
MGEGAGVLVLEEYEHAKKRNAKIYGEVKGYGMSGDAFHITKPSEDGNGGFRAMEMALRESNLNAEEIEYVNAHGTSTQVGDMIELSAVEKLFELNSNLFMSSNKSAIGHLLGAAGAVEAVFSFKSLETKTLPPTLNLDNPSTNTSINLIPHEAISKSVSNIISNSFGFGGTNASIIIGD

SEQ ID NO: 113681 - protein, 175 aa, Unknown
  Bacterial polypetide isolated from the Sargasso Sea
LVLETLENAQKRNARIYAEIVGYGTTCDAHHITAPSPGGIGGAEAIKLAIEDACLSLEKVDYINAHGTSTSANDKNETSAIKSIFRDRSYLIPVSSTKSMTGHLLGGSGGIEAVACILSLTHNFIPPTINYVNRDPECDLDYVPNIAREAQVGVALSNSFGFGGHNVCLAFSKIN

SEQ ID NO: 113682 - protein, 174 aa, Unknown
  Bacterial polypetide isolated from the Sargasso Sea
MKRVVVTGLGIISCIGNDAHTVTNNLKHLNSGISSAPEYEEFSFRSLVHGKPKINLEENIDRRLLRFMGDGAAFNYIAMKNAIKDSGLEEKNISNEMTGIIVGSGGPSTMNLYKASELGKNSGSKKVGPFMVPRSMSSTNSATLATPFKIKGVNYSITSACSTSSHCIGNAYEL

SEQ ID NO: 113683 - protein, 259 aa, Unknown
  Bacterial polypetide isolated from the Sargasso Sea
NDCNIAGGHLSIIWGLRGPNQTVTSACASATDAIGMAMRLILSGDADAMVTGGTEASVTALTIAGFANMKALSQSNEIPERASRPFDKDRDGFVLGEGSGMLVIERESHAKNRGAHILAELAGYGSTDDAFHITQPSKGGSGALKAMERAIKDAGLNIDDIDYINAHGTSTPYNDKNESAAITELFKNHCEKLKVSSTKSMTGHLLGAAGGIEAVASVKSVLEQTLPPTINYDTPDPECALDYVPNIAQSSNVNSVLSN

SEQ ID NO: 113684 - protein, 199 aa, Unknown
  Bacterial polypetide isolated from the Sargasso Sea
SPQTASRPFDAERDGFVIGEGSGILVLETLENAQKRNARIYAEIVGYGTTCDAHHITAPSPGGIGGAEAIKLAIEDACLSLEKVDYINAHGTSTSANDKNETSAIKSIFRDRSYLIPVSSTKSMTGHLLGGSGGIEAVACILSLTHNFIPPTINYVNRDPECDLDYVPNNARDTQVGVALSNSFGFGGHNVCLAFSKMN

SEQ ID NO: 113685 - protein, 89 aa, Unknown
  Bacterial polypetide isolated from the Sargasso Sea
DRSYLIPVSSTKSMTGHLLGGSGGIEAVACILSLTHNFIPPTINYVNRDPECDLDYVPNNAREAQIGVALSNSFGFGGHNVCLAFSKMN

SEQ ID NO: 113686 - protein, 287 aa, Unknown
  Bacterial polypetide isolated from the Sargasso Sea
IGIVSCLGNNQEEVYQSLLNSKSGITFSEEYKEYNLKSNIHGKPNIKLEDHVDRKFIRFMGPGSAYNYISMMEAVKDAGLEEKDVSNISSGMIMGSGGPSIENVILAADKTREKNPKRMGPFVVPRTMSSTASATLAVPFKIKGVNYTISSACATSGHCIGNGMELIQLGKQKIIFAGGSDEVHFAMTAMFDAMTALSSKYNDTPEKASRPYDKTRDGFVISGGGGVLVLEEYEHAKARGAKIYAELTGYGATSDGYDMVAPSGEGAERCMKMALSTSKNKIDYINT

SEQ ID NO: 113687 - protein, 308 aa, Unknown
  Bacterial polypetide isolated from the Sargasso Sea
MGMLSPVGNDVSTSWSAVCAGRSGIGQIDRFDASEYGTRIGGAVKDLDIEPWLSSKEARKLDAFIHYGLIAAQQAVDDSGLEQFDKLDKERVGIAIGSGIGGLEYIEKNIIQMEKAGPRKVSPFFVPASVINMISGNAAIRFGYKGPNIAIVTACTTGTHNIGYAARTIAYGDADVMLAGGAEMATTRSGIAAFSSARALSTRNDEPEKASRPWDKERDGFVLSDGAGVLVLEGLEHAKARGATIYGEVVGFGMSDDAHHITAPPADGDGAARSMANALRDAGLKPEEVDYINAHGTSTLVGDVAEVA

SEQ ID NO: 113688 - protein, 56 aa, Unknown
  Bacterial polypetide isolated from the Sargasso Sea
EDKIIMTVDKHGNTSAASIPLALDYGVSSGMVKKDHLIIFEAFGAGFTWGSTLLKF

SEQ ID NO: 113689 - protein, 277 aa, Unknown
  Bacterial polypetide isolated from the Sargasso Sea
MKRVVITGIGVVSCLGNNQKEVYNSLINSKSGITFSEEYKEYNLKSNIHGKPNIKLEDYVDRKFIRFMGPGSAYNYISMAEAVKDSGLEEKEVSNISTGMIMGSGGPSIENVILAADKTREKSPKRMGPFVVPRTMSSTASATLAVPFKIKGVNYTISSACATSGHCIGNAMELIQLGKQNIIFAGGSDEVHFAMTAMFDAMTALSSKYNDTPEKASRPYDKTRDGFVISGGGGVLVLEEFEHAKARGAKIYAEITGYGATSDGYDMVAPSGEGAVR

SEQ ID NO: 113690 - protein, 265 aa, Unknown
  Bacterial polypetide isolated from the Sargasso Sea
MKRVVITGLGVVSCLGNNQDEVYHSLLNSKSGISFSKEYKEHNLKSHIHGKPNIKLEDFIDRKTIRFMGSGSAYNYIAMKEAIADSGLEENEVSNFKTGIVMGSGGPSIENVILAADKTRAKTPKLMGPFIVPRTMASTASATLAVPFKIKGTNYTMSSACATSGHCIGNSMELIQMGKQDIVFAGGSEEIHWAMTAMFDAMTALSSKYNDTPETASRAYDKTRDGFVIAGGGGVLVLEEYEHAKARGAKIYAELTGYGATSDGY

SEQ ID NO: 113691 - protein, 96 aa, Unknown
  Bacterial polypetide isolated from the Sargasso Sea
MKGINLNQIGVSFKGSGSFVPNQILTNEDISKKVDTSDEWIKSRTGISKRRVSGLKEDVSQMGYKAALAAIKMTKWDLDTVDLIILATSTPNDLFG

SEQ ID NO: 113692 - protein, 152 aa, Unknown
  Bacterial polypetide isolated from the Sargasso Sea
MSADAYHMTLPSETGEGASRCMTLALEDANLDPSNIDYINAHGTSTPAGDILELEAVKKTFKAHSKNLIINSTKSMIGHLLGAAGGVEAIVCILSILNGKIHQTINIENLDENCDLNVNHESSIDCDINFALSNSFGFGGTNGSLIFSKFKD

SEQ ID NO: 113693 - protein, 239 aa, Unknown
  Bacterial polypetide isolated from the Sargasso Sea
MGEGSAYNYIAMNEAVKDSGLEEKDISNISTGMIMGSGGPSIKNVILAADKTREKNPKKMGPFVVPRTMASTASATLAVPFKIKGVNYTISSACATSGHCIGNAMELIQLGKQKIIFAGGSDEVHFALTAMFDAMTALSSKYNDTPEKASRPYDKTRDGFVISGGGGVLVVEEYDHAKARGAKIYAEITGYGATSDGYDMVAPSGEGAVRCMNIALSTSKNKIDYINTHGTSTPVGDIT

SEQ ID NO: 113694 - protein, 253 aa, Unknown
  Bacterial polypetide isolated from the Sargasso Sea
SACASSANAIIDGLNYIRMGYSDIIVAGGSEAPITISGIAGFNAMHALSTRNDDPLTASRPFDRDRDGFVLGEGGGALILEEYEHAKTRGAKMYAEVSGFGLSSDAYHMTAPHPDGKGAIKVMKHCLDDAKLNSSEIDLINMHGTSTSLGDIAETKAVKEVFQEDVYNLNINSTKSMTGHLLGAAGAIEGISCILSMNNSMVPPTINHFNRDENIDPKLNLTFSKPQKKEVNASLSNTFGFGGHNACVIFKKL

SEQ ID NO: 113695 - protein, 298 aa, Unknown
  Bacterial polypetide isolated from the Sargasso Sea
MRRVVITGIGVVSCLGNNQEEVHQSLLNSKSGISFCEEYKEHNLKSHVHGKPKIKLEDHIDRKTIRFMGSGSAYNYIAMKEAIEDSGLEEKEVSNFKTGIVMGSGGPSIENVILAADKTRAKTPKLMGPFIVPRTMASTASATLAVPFKIKGTNYTMSSACATSGHCIGNSMELIQMGKQDVVFAGGSEEIHWAMTAMFDAMTALSSKYNDTPETASRAYDKTRDGFVIAGGGGVLVLEEYEHAKARGAKIYAELTGYGATSDGYDMVAPSGEGAVRCMKMAMGTSKNKIDYINTHGT

SEQ ID NO: 113696 - protein, 190 aa, Unknown
  Bacterial polypetide isolated from the Sargasso Sea
EVQSTALDLSDEGRNISVLFADGAGAAVLQATENNKGILSTHLHSDGKFLKDLWCEAPGTSNNPRLSKDILDKGKHLPYMNGREVFKNAVRRFPEVIKEAMDSNELTIDDISQIIPHQANHRISEAVAKRMGVGMDKVFSNIKYYGNTTAASIPIAMCEAREKGLFSDGDIIILAAFGAGFTWASAAIRW

SEQ ID NO: 113697 - protein, 256 aa, Unknown
  Bacterial polypetide isolated from the Sargasso Sea
QSLLNTKSGISFSEEYKEHNLKSHIHGKPNIKLEDHIDRKTIRFMGSGSAYNYIAMKEAIEDSGLEESEVSNFKTGIVMGSGGPSIENVILAADKTRAKTPKLMGPFIVPRTMASTASATLAVPFKIKGTNYTMSSACATSGHCIGNSMELIQMGKQDVVFAGGSEEIHWAMTAMFDAMTALSSKYNDTPEKASRAYDKTRDGFVIAGGAGVLVLEEYEHAKARGAKIYAELTGYGATSDGYDMVAPSGEGAVRCM

SEQ ID NO: 113698 - protein, 276 aa, Unknown
  Bacterial polypetide isolated from the Sargasso Sea
LINLASGHISIKYTLKGPNHSVVTACASGAHAIGDSFRIISYGDADVMIAGGTEAACTRFGISGFCAMRALSTKFNDNPEKASRPWDKGRDGFVLSEGSGMLVLEELEHAKKRSANIYAEIVGYGLTGDAYHPTAPASDGSGGFRAMKMALNNANIPTDQVDYINAHGTSTPLGDEIELNAVKRIFENSKKNLFMSSTKSSTGHLLGASGAIESIFSILSLKDGVIPPTLNLTNPSSDCEGINLVPKESINNTNRFSLSNSFGFGGTNVSLVFKKK

SEQ ID NO: 113699 - protein, 305 aa, Unknown
  Bacterial polypetide isolated from the Sargasso Sea
SHAEEYKEHNLKSHVHGKPNIKLEDHIDRKTIRFMGSGSAYNYIAMKEAIEDSGLEESEVSNFKTGIVMGSGGPSIENVILAADKTRAKTPKLMGPFIVPRTMASTASATLAVPFKIKGTNYTMSSACATSGHCIGNSMELIQMGKQNIVFAGGSEEIHWAMTAMFDAMTALSSKYNDTPQSASRAYDKTRDGFVIAGGAGVLVLEEYEHAKARGAKIYAELTGYGATSDGYDMVAPSGEGAVRCMKMAMATAKNKIDYINTHGTSTPVGDITELNAIQETFGEDIPKISSTKSLSGHPLGAASV

SEQ ID NO: 113700 - protein, 171 aa, Unknown
  Bacterial polypetide isolated from the Sargasso Sea
GGVLVLEEYEHARARGAKIYAEITGYGATSDGYDMVAPSGEGAVRCMNMALNTSKNKIDYINTHGTSTPVGDITELKAVGEVFKDYKPKISSTKSLSGHSLGATSVHEAIYSLIMMKNNFISASANITDIDDEAKNYSIITQVEKDVTLNAIMSNSFGFGGTNATLVFEKV

SEQ ID NO: 113701 - protein, 244 aa, Unknown
  Bacterial polypetide isolated from the Sargasso Sea
DLGLRACESLFQSNPKIKNLIDGLIFCTQSSDYIMPPNSTILHGALGLSEQVFAYDFNLACSGFVYGLSMAHGLICGGIAKEILLINADTYSKYIHEKDRSTKVLFGDAASVSYLKKSTSNEGIMRYLSSTSGKNHKKFIIPAGGNRNPKSEKTSKIIANNSGVQRTAEHIHMDGMGIFAFVNTKVPKQIKDILSQQNLKIDEIDLFVFHQASKLAIESLTKILKIEKSKVYTNIDKVGNTVSA

SEQ ID NO: 113702 - protein, 203 aa, Unknown
  Bacterial polypetide isolated from the Sargasso Sea
MPLNSGGVLLRGCGSATPSRSISNTELGQRVETSDTWIRSRTGISARRIVGTDESLTDLNVAAAEAALAMAGWSADSLDLILLATSTPEDLFGSAPQLQSRLGASHAAAFDLTAACSGFLFALITAAQYLRTGAMRRILVVGADQLSRWVDWDDRRSCVLFGDAAGAVVLEAGPAEHDDLGGFLLRSDGSRGEVLQLPQVQEH

SEQ ID NO: 113703 - protein, 114 aa, Unknown
  Bacterial polypetide isolated from the Sargasso Sea
YINSHGTSTPIGDIKELEAIKNVFGDSIPNISSTKSLTGHSLGATGVHEAIYCLLMLNNNFLCGSANISNLDVSAHNHNILLETKNNTKIENILSNSFGFGGTNATLLMSKYND

SEQ ID NO: 113704 - protein, 96 aa, Unknown
  Bacterial polypetide isolated from the Sargasso Sea
AIKSIFRDRSYLIPVSSTKSMTGHLLGGSGGIEAVACILSLTQNFIPPTINYVNQDPECDLDYVPNNARESQVGVALSNSFGFGGHNVCLAFSKMN

SEQ ID NO: 113705 - protein, 210 aa, Unknown
  Bacterial polypetide isolated from the Sargasso Sea
MTAMFDAMTALSSKYNDTPEKASRPYDKTRDGFVISGGGGVLVLEEYEHATSRGAKIYAELTGYGATSDGYDMVAPSGEGAVRCMKMALSTAKNKIDYINTHGTSTPVGDITELKAVGEVFRDNKPKISSTKSLAGHSLGATSVHEAIYSLIMMKNNFIAASANIKDMDEEAKKYPIVTKVEKEVNLNSVMSNSFGFGGTNATLVFEKVK

SEQ ID NO: 113706 - protein, 281 aa, Unknown
  Bacterial polypetide isolated from the Sargasso Sea
MGESAGYSYLAALDALEMANLEEKDLDSPRIGIVAGSGGASTRIMVQNGDITREKGPKRIGPYGVTKSMSSSISAILATALKLKGINYSISSACATSAHCIGHAAELIKSGQQDIVIAGGSDDEHWTSSALFDAMGALSSNFNSSPSEASRPYDSDRDGFVISGGSGIVILEDEEHAKKRNANILAKLSGYFANSDGYDMVAPSGEGAIRCMQGAIENSKCKIDYINTHGTSTPVGDIAELNAIKEVFGDDSPLISSTKSMTGHSLGATGAHEVIYSTMMI

SEQ ID NO: 113707 - protein, 269 aa, Unknown
  Bacterial polypetide isolated from the Sargasso Sea
KKYNFRSQVIGNVKNLNFKDHIDRKQLRFMGDGSAYNYIALKEAIEESGLQEKDVSNEKTGIVMGSGGPSIKNVYFAVDTIRKSSPKKMGPYIVPRTMASTCSATLAVPFKIRGINYSISSACATSGHCIGNGMELIQFGKQDIMFVGGGEELDWALSGMFDAMPALSSKYNNNPEKASRPYDANRDGFVIAGGAGALVLEEYEHAKARGAKIYAELTGYGATSDGYDMVAPSGEGAIRCMKMALKTKRNEIDYINTHGTSTPVGDITE

SEQ ID NO: 113708 - protein, 240 aa, Unknown
  Bacterial polypetide isolated from the Sargasso Sea
LERSNTDPNEVDVIIIATVTPDMPTPATASLVQNRIGANNAWGFDLSGACTGFIYALDTGSRLIESGKYKKVIVIGSDTMSSILDYTDRNTCVLFGDGGGGVMLERAKDSDSGVIDSILRTDGSGSDYLKIPGGGSLHPASYETVDKHLHYIRQDGQVVFKYAIKGMADISEEILKKNNIDSNSISLYVPHQANKRIIDGAAQRCGFKDDQVYININKYGNTTAGTIPICLDEAKELGRI

SEQ ID NO: 113709 - protein, 335 aa, Unknown
  Bacterial polypetide isolated from the Sargasso Sea
AEEYKEHNLKSHVHGRPNIKLKDHIDRKTIRFMGSGSAYNYIAMKEAIKDSGLEENEVSNFKTGIVMGSGGPSIENVILAADKTRAKTPKLMGPFIVPRTMASTASATLAVPFKIKGTNYTMSSACATSGHCIGNSMELIQMGKQDVVFAGGSEEIHWAMTAMFDAMTALSSKYNDSPESASRAYDKTRDGFVIAGGAGVLVLEEYEHAKARGAKIYAELTGYGATSDGYDMVAPSGEGAVRCMKMAMGAVKNKIDYINTHGTSTPVGDITELNAIRETFGEEIPKISSTKSLSGHPLGAASVHEAIYCLIMMKNNFIAGSANITEMDDDAKKFQ

SEQ ID NO: 113710 - protein, 161 aa, Unknown
  Bacterial polypetide isolated from the Sargasso Sea
HAKARGAKIYAEITGYGATSDGFDMVAPSGEGAVRCMNMALKTSKNKIDYINTHGTSTPVGDITELKAVGEVFKNSIPKISSTKSLAGHSLGATSVHEAIYSLIMMKNNFISASININEIDEEAKKYPIVTNVEKDVTLNSIMSNSFGFGGTNATLVFEKI

SEQ ID NO: 113711 - protein, 187 aa, Unknown
  Bacterial polypetide isolated from the Sargasso Sea
VRPYDKTRDGFVISGGGGVLVLEEYDHAKARGAKIYAEITGYGATSDGHDMVAPSGEGAVRCMQMALNTAKNKIDYINTHGTSTPVGDITELKAVGEVFKDYKPRISSTKSLAGHSLGATSVHEAVYSLIMMKNNFIAASANITDMDDEAKKYPIVTKVENDAKVNSVMSNSFGFGGTNATLVFEKV

SEQ ID NO: 113712 - protein, 154 aa, Unknown
  Bacterial polypetide isolated from the Sargasso Sea
YQLTYILRVKYAEELALIKPATTFWIDKIIDDENEDGTGYSPVMNGNFVFKNAVIRFEEVIYEALKHSSLKPDDISLLIPHQANLRISQYIQKRLKLSNSQVYNNIMKYGNTTAASIPIALKEALDENKLNKGDILCLAAFGSGFTWASALIKW

SEQ ID NO: 113713 - protein, 289 aa, Unknown
  Bacterial polypetide isolated from the Sargasso Sea
RVVITGLGIVSCLGNDKATVTENLRNSRPGIRYNPEYKEMGLRSQVSGSIDLNLEELIDRKVYRFVGHAAAYAYLAMQDAIKDAGLTEEQVSSPRTGLVAGSGGASTLNQMEALDTLREKGVKRVGPYRVTRTMGSTVSACLATPFKIKGINYSISSACATSAHCIGTALEQIQWGKQDIVFAGGGEEEHWSQSFLFDAMGALSTKRNETPELASRAYDADRDGFVIAGGGGMVVVEELEHALARGAKIYAEIVGYGATSDGYDMVAPSGEGAIRCMQQALSTVDTPID

SEQ ID NO: 113714 - protein, 81 aa, Unknown
  Bacterial polypetide isolated from the Sargasso Sea
QIDMLIPHQANLRISQFVQKKFGLSDDQVYNNIQKYGNTTAGSIPIALTEAWQEGKIKSGDLIVLAAFGSGFTWGSTIIRW

SEQ ID NO: 113715 - protein, 253 aa, Unknown
  Bacterial polypetide isolated from the Sargasso Sea
MVDGLHRVVVTGLGAVTPIGNTVQDYWNGLTSGRNGVDAITLFDASSHACRFAAEVKDFDPAGLIEPKEAKRWDRFCKFGVVAAKQAITHAGLTISEANADRIGTIIGSGVGGLLTMETQAHVLEGKGPGRVSPFTVPMMIPNMATGLAAIALGTKGPSSAVATACAAGSNAIGDAFRLLQLGKADAMVCGGAESAITPLGVAGFASAKALSFRNDDPATASRPFDKDRDGFVIGEGAGVLVLETLEHAQARG

SEQ ID NO: 113716 - protein, 249 aa, Unknown
  Bacterial polypetide isolated from the Sargasso Sea
LVTPLGANAEASWSNLLRGESGIKPVQNFDVTDLPAKIAGTISQSEDDQNSFRPDDWLEPKEQRKIDRFILLGLVAATQAVNDSGWAPKTEEEQAKTGVIIGSGIGGLQQIYDNSIKLKEAGPRRISPFFIPAALINLVSGHVSIKFGFKGPNHSVVTACSTGAHAIGDAGRLVMLGDADVMVAGGAEAAVNRLGFAGFAAARALSTNFNDTPTEASRPWDKDRDGFVMGEGAGIVVVEELEHAKRRGA

SEQ ID NO: 113717 - protein, 165 aa, Unknown
  Bacterial polypetide isolated from the Sargasso Sea
MVAQPFRSAGVLLRGCGSATPSRSISNADLGQRVETSDSWIRSRTGIAARRVLGPSESLIDLCAASASSALTMAGWEPDSLDLILLATSTPEDLFGSAPRLQSRLGAHRAVAFDLTAACSGFLFAVITAAQYLRSGAMQRILVVGADQLSRWVDWDDRRSCVLFG

SEQ ID NO: 113718 - protein, 127 aa, Unknown
  Bacterial polypetide isolated from the Sargasso Sea
MRDAGINADQVQYINAHGTSTPAGDIAEAAAVKSVFGDHAYKLSVSSTKSMTGHLLGAAGAVEAIFSVLAIRDQVAPPTINLDEPDEGCDLDFVPHQAKAMPIEIALSNSFGFGGTNGSLLFRRYHG

SEQ ID NO: 113719 - protein, 262 aa, Unknown
  Bacterial polypetide isolated from the Sargasso Sea
VVVTGIGIVSSIGNNVAEVANSLHSLKSGISHNDINAELGLRSHVSGSIKNLDCKELIDRKLYRFMGDAAAYSYISTQEAINDANLKETELSNYKTGLIMGSGGASSEDQIDSADILRSKGLKRIGPYRVTKAMGSTVSACLATSFGIKGINYSISSACATSAHCIGSGMEQIQLGKQDIVIAGGGEAEHWGMTSLFDAMGALSTKYNENPEKASRAYDKDRDGFVIAGGAGTVILEEKQHALDRGAHIYAQLTGYAATSDG

SEQ ID NO: 113720 - protein, 159 aa, Unknown
  Bacterial polypetide isolated from the Sargasso Sea
KARGAKIYAELTGYGATSDGYDMVAPSGEGAVRCMKMALSTAKNKVDYINTHGTSTPVGDITELKAVGEVFKDSVPKISSTKSLAGHSLGATSVHEAVYSLIMMKNNFISASININDMDDEAKKFPIVTKVEKDVTLNSIMSNSFGFGGTNATLVFEKV

SEQ ID NO: 113721 - protein, 291 aa, Unknown
  Bacterial polypetide isolated from the Sargasso Sea
INQIPRFNPFFIPKLFPDICPGLISIKYNLNGPNFATVSACASSSNAIIDAYNYIKLGYGDIFISGGSEAPINKAALGGFNALKALSERNDSPKTASRPFDKDRDGFVLGEGSGALIIEELEHALNRNAKIYSEIIGVGMSSDAYHITAPHPEGKGAELVMKNVLKNAKISPKDIDYINVHGTSTPLGDIAEITAIENVFKENTKNINISSTKSMTGHLLGAAGAIETIASILAINYKKVPPTINHFNNDDKINKKLNFTFNKTQQREVKIAINNTFGFGGHNTSIAFKKY

SEQ ID NO: 113722 - protein, 233 aa, Unknown
  Bacterial polypetide isolated from the Sargasso Sea
MNRVVVTGLGIVSCIGNNQKEVVDNLKNLKSGISSAKEYEEFSFKSLVHGKPNINIKESIDRRLLRFMGDGAAYNYIAMKDAIEDSGLEETDISNEMTGIIVGSGGPSTQNLFKSSEIGKSLGSKKVGPFMVPRSMSSTNSATLATPFKIKGVNYSITSACSTSSHCIGNAYELIQMGKQNIVFAGGGEELHWTLSILFDAMGALSSKYNSTPELSSRAYDSNRDGFCIAGGG

SEQ ID NO: 113723 - protein, 113 aa, Unknown
  Bacterial polypetide isolated from the Sargasso Sea
FQMDGRAVWDFAVEAFPEAVNSVLEKVKMDIEDVDIIIPHQANLRIIEAGMNKLGLNMDKAYTNIERYGNTAGASIPIALKEAVDTKRVKTGNLVITVGFGGGLSWGANAIIW

SEQ ID NO: 113724 - protein, 114 aa, Unknown
  Bacterial polypetide isolated from the Sargasso Sea
YINAHGTSTPAGDIAETLAIKSVFKNSAQDLIVSSTKSMTGHLLGAAGAIEAIFSILAIRDNICPPTINLENPDEGCDLNYSANQATHKDINYSLSNSFGFGGTNASLIFTDVE

SEQ ID NO: 113725 - protein, 331 aa, Unknown
  Bacterial polypetide isolated from the Sargasso Sea
VHQSLVNSNSGISYAEEYKEHNLKSHVHGKPNIKLEDHIDRKTIRFMGSGSAYNYIAMKEAIEDSGLEESEVSNFKTGIVMGSGGPSIENVILAADKTRAKTPKLMGPFIVPRTMASTASATLAVPFKIKGTNYTMSSACATSGHCIGNSMELIQMGKQDVVFAGGSEEVHWAMTAMFDAMTALSSKYNDAPETASRAYDKTRDGFVIAGGAGVLVLEEYEHAKARGAKIYAELTGYGATSDGYDMVAPSGEGAVRCMQMAMSTAKNKIDYINTHGTSTPVGDITELNAVKNTFGDNIPKISSTKSLSGHPLGAASVHEAIYCLIMMKNNS

SEQ ID NO: 113726 - protein, 255 aa, Unknown
  Bacterial polypetide isolated from the Sargasso Sea
SIKLGFKGINYTVASACASSAHAIQVAMQEIQLGRQDAMITGGTESVLSNLTICGFANMRALSRRNDEPSKASRPFDKDRDGFVMGEGAGIIILEDYEKAQARGANIIAEVVSCGASSDANHMTAPHPEGEGAIAAMNQALELAGLKAQDIDYVNAHGTSTPLGDGIETAAIKKVFGEHASNLVVSSTKSMIGHLLGSAGGMETIFCAKAIEKGIIPPTMNLDNPSEDCDLNYSPNQATKKEIKYALNNSFGFGG

SEQ ID NO: 113727 - protein, 265 aa, Unknown
  Bacterial polypetide isolated from the Sargasso Sea
MKRVVVTGIGIVSCIGNDQKTVIKNLKELNSGISKAPEYEEYSFRSLVHGKPNIKLEDEIDRRTLRFMGDGAAYNYISMKDAIKDSGLSESQVSNEMTGIIVGSGGPSTFNLMKSFDLAKAGGSKKVGPFMVPRSMSSTNSATLATPFKIKGVNYSITSACSTSSHCIGNAYELIQMGKQNIIFAGGGEELHWTMSILFDAMGALSSKYNDNPKKSSRAYDANRDGFVISGGGGTIVLEELEHAKSRGAKIYAEITGYGATSDGH

SEQ ID NO: 113728 - protein, 260 aa, Unknown
  Bacterial polypetide isolated from the Sargasso Sea
TVSACASSAHAIGESFRLIQHGQADIMMTGGAEATISPIGIEGFTACKALSTKYNESPQKASRPFDEARDGFVMGEGSAVLILEEMEHALRRNASILAEISGYGMSSDAYHYTLPEPSGDGAYRAMKNALDDAKITSDKLDYINAHGTSTPSGDKVEALAIERIFESCKRKIKVSSTKSQIGHLLGAAGGVEAVYSILCLNNKKLPHTLNLESAIETKKIDFIAEKAIDYDTNYILSNSFGFGGTNVSLVLEKFDESKLQ

SEQ ID NO: 113729 - protein, 105 aa, Unknown
  Bacterial polypetide isolated from the Sargasso Sea
SANDKNETSAIKSIFRDRSYLIPVSSTKSMTGHLLGGSGGIEAVACILSLTHNFIPPTINYVNRDPECDLDYVPNNAREAQVGVALSNSFGFGGHNVCLAFSKMN

SEQ ID NO: 113730 - protein, 276 aa, Unknown
  Bacterial polypetide isolated from the Sargasso Sea
GVEESWKRLLNGQSGAGTITRFDPQNVATKYACEVPLGDGSDGTFNADDHMAPKERRKVDDFILYGLAAADQAVADAGWTPEDEESLMRTGVMLGSGIGGLQSIEQTTLLIRDKGVRRVSPFFIPGALINLISGQVSIRYGFKGPNHAVVTACSTGAHAIGDAARLIKYDDADVMVAGGAEAAICEIGIAGFNACKALSTKRADDPQAASRPYDADRDGFVMGEGAGVVVLEEYEHAKARGAKIYAEVLGYGLSGDAYHITAPSEDGDGGFRAMQA

SEQ ID NO: 113731 - protein, 220 aa, Unknown
  Bacterial polypetide isolated from the Sargasso Sea
FAGGCEELHRAMTAMFDAMTALSSKYNDTREKASRAYDKTRDGFVIAGGGGVLVLEEYEYAKARGAKIYAEITGYGATSDGYDMVAPSGEGAVRCMQIALKTSRNKIDYINTHGTSTPVGDITELKAIGETFKDKIPKISSTKSLSGHPLGAASVHEAIYSLIMMKNNFITGSANINEMDEEAKRFPIISKTEKEVTLNAVMSNSFGFGGTNATLIFEKV

SEQ ID NO: 113732 - protein, 120 aa, Unknown
  Bacterial polypetide isolated from the Sargasso Sea
MNARITVTSHNTPDNVMTNVDLEKLVDTSDEWIQSRTGIVQRHIVSDDEASSDISTRIAKSLIKKRDISPDQIDLIIVGTVTPDHFTPSTAALVQKNIGATNAWGFDLSAACSGFIYGLE

SEQ ID NO: 113733 - protein, 274 aa, Unknown
  Bacterial polypetide isolated from the Sargasso Sea
MNRVVITGLGIVSSIGNNAKEVLSSLRAGKSGITSNADMIEYGFRSQVAGDIKLEVTDFVDKRTLRFMGPGAAYAHIAMEQAIKDAGLEQNEISNFRTGLIAGSGGPSTSAMLAAHQIVLKSGAPKRIGPFAVPKCMSSTISANLSTAFKIKGLNYSITSACSTSLHCIGNATEQIMMGKQDIMFAGGGEELDWTLSCLFDAMGAMSSKYNETPEKASRAFDVDRDGFVIGGGGAILVLENLEHAKARGAKIYAEVMGFGATSDGHDMVAPSGE

SEQ ID NO: 113734 - protein, 229 aa, Unknown
  Bacterial polypetide isolated from the Sargasso Sea
MVAGGAEAAICRMGIAGFAAAKALSTGYNDTPEVASRPWDVGRDGFVMGEGAGVVVLEEFEHAKARGAKIYAEVTGYGLSGDAYHITAPASDGSGGFRAMKAALKRARLNVDAIDYINAHGTSTPLGDEIELGAVKRLFGEHAYNLSMSSTKSAIGHLLGAAGAVEAVFSIKAIETGAVPPTLNLENPSEGCDLDLVAKEAKERIVRNAMSNSFGFGGTNASLVLSSVE

SEQ ID NO: 113735 - protein, 177 aa, Unknown
  Bacterial polypetide isolated from the Sargasso Sea
VCIAGGGGVLVLEEYEHAKARGANIYAEITGYGATSDGSDMVAPSGEGAVRCMNMALKTSKNKIDYINTHGTSTPVGDITELKAVSEAFKEKIPKISSTKSLSGHPLGAASVHEAIYSLIMMKNNFIAASANVNDMDDEAKKFPIVTKVEKNVTLNSVMSNSFGFGGTNATLVFEKV

SEQ ID NO: 113736 - protein, 33 aa, Unknown
  Bacterial polypetide isolated from the Sargasso Sea
EKKLKKGDKLLLAAFGAGLTWGAAYLTWAYNKK

SEQ ID NO: 113737 - protein, 277 aa, Unknown
  Bacterial polypetide isolated from the Sargasso Sea
VVVTGLGAVTPLADGVKESWKRLINGDSGVAQITSFDVSDLPCKIAAQVPRGDGSGQFNPIKYMAAKDVRKMDDFIVYALGAASGAIEDANWYPETDEQKDRTGVMIGSGIGGLRAIEQGAILVNEKGPRRLSPFFIPSSLINLASGHVSIKHGFRGPNHAVVTACSTGAHAIGDASRLIMFDDADVMVAGGAEAGVCRLGVTGFSAARALSTSYNETPKKASRPWDKNRDGFVMGDGSGVVVLEELEHAKKRGAKIYAEITGYGMSGDAHHVTAPA

SEQ ID NO: 113738 - protein, 36 aa, Unknown
  Bacterial polypetide isolated from the Sargasso Sea
LALNEAVYNNNISKGDIVLLAAMGGGFTWGSSLIRW

SEQ ID NO: 113739 - protein, 174 aa, Unknown
  Bacterial polypetide isolated from the Sargasso Sea
GGAGVLVLEEMEHAKSRGAKIYAELTGYGATSDGFDMVAPSGEGAARCMNIALKTTRNKVDYINAHGTSTPVGDITELKAIKEAFGDKIPKISSTKSLSGHPLGAASVHEAIYSLIMMKNNFIAASANVKEIDDEAKKFPIVTKIEKGITLNSVMSNSFGFGGTNATLIFEKVS

SEQ ID NO: 113740 - protein, 84 aa, Unknown
  Bacterial polypetide isolated from the Sargasso Sea
LIVSSTKSMTGHLLGAAGAIEAIFSVLSLRDDICPPTINLENPDEGCDLNYSAKKATHKKLKYSLSNSFGFGGTNATLIFRKLD

SEQ ID NO: 113741 - protein, 293 aa, Unknown
  Bacterial polypetide isolated from the Sargasso Sea
FKSSEIGKSSGSKKIGPFMVPRAMSSTNSATLATPFKIKGVNYSITSACSTSSHCIGNAYELIQMGKQNIVFAGGGEELHWTLSILFDAMGALSSKYNSTPNKSSRAYDADRDGFVIAGGGGTLVLEELEHAIARGAKIYGEITGYGATSDGYDMVQPSGEGAERCMKQALKNIDGKIDYINTHGTSTPIGDVKELEAIKNVFGLNIPKMSSTKSLTGHSLGATGVHEAIYSLLMMKNNFISGSANIEKLDDSAKDCNILLKTENDVEIEHVMSNSFGFGGTNATLVFSKYHG

SEQ ID NO: 113742 - protein, 278 aa, Unknown
  Bacterial polypetide isolated from the Sargasso Sea
KIKLEDHVDRKVIRFMGAGSAYNYVAMSEAVKDSGLEEKEVSNVSTGMVMGSGGPSIENVILAADKTREKNPKKMGPFVVPRTMASTASATLAVPFKIKGVNYTISSACATSGHCIGNAMELIQLGKQNIIFAGGSDEVHFALTAMFDAMTALSSKYNDKPETASRPYDKTRDGFVISGGGGVLVMEEYEHAKARGAKIYAEITGYGATSDGYDMVAPSGEGAVRCMNMALSTAKNKIDYINTHGTSTPVGDITELKAVGEAFPEYKPKISSTKSLSG

SEQ ID NO: 113743 - protein, 289 aa, Unknown
  Bacterial polypetide isolated from the Sargasso Sea
AIEVTDSLRETKSGISFDQSHKDMNFRSHVSGQIKINLQELIDRKFLRFMGDGASYNYLAMLEALKDSGLDENLISNPMTGLIMGSGGPSTKNLLRAFDITRDTGPKKIGPTSVPKVMCSTNSATLSTFFKIKGMNYSISSACATSAHCIGHGAELIQMGKQDIVFAGGGEELDWSLSALFDAMTALSSKYNDTPETASRAFDSSRDGFVIAGGGGVLVLEELEHAKSRGAKIYAELVGYGATSDGYDMVQPSGEGAARCMKMAIKNLDEKVDYINAHGTSTPVGDNAE

SEQ ID NO: 113744 - protein, 136 aa, Unknown
  Bacterial polypetide isolated from the Sargasso Sea
MVAPSGEGALRCMEGAIKQSNVKIDYINTHGTSTPVGDAAELNAIKQLFNSDAPMISSTKSMTGHSLGATGAHEAIYSIIMINENFIAPSINIESLCEEAKGLDVVTETKEATIENILSNSFGFGGTNASLVISRY

SEQ ID NO: 113745 - protein, 26 aa, Unknown
  Bacterial polypetide isolated from the Sargasso Sea
RIQRGQLILMEAFGGGFTWGSVLMRY

SEQ ID NO: 113746 - protein, 298 aa, Unknown
  Bacterial polypetide isolated from the Sargasso Sea
PSTKIYLSLLKLERVRGSKKIGPFMVPRAMSSTNSATLATPFKIKGVNYSITSACSTSSHCIGNAYELIQMGKQNIVFAGGGEELHWTLSILFDAMGALSSKYNSTPNKSSRAYDADRDGFVIAGGGGTLVLEELEHAKARGAKIYGEITGYGATSDGYDMVQPSGEGAERCMNQALKNIDGKIDYINTHGTSTPIGDVKELEAIKNVFGSNIPKMSSTKSLTGHSLGATGVHEAIYSLLMMKNNFISGSANIDKLDDNAKDCNILLKTEHDVDIEHVMSNSFGFGGTNATLVFSKYH

SEQ ID NO: 113747 - protein, 239 aa, Unknown
  Bacterial polypetide isolated from the Sargasso Sea
MNGREYIYVPGEERIYRILIHPESFELDAYWQPTYRELTDIQGMAWDTCISDDYLWLMDNGDIETVRAIFNQHPNGRFTELVPSLDWRDPAPWSGQQRLIRMSLDTGEIKCITPFPASGGAIIAPPAYIPSKKLCVCWDSVNGGVAGVRSKEDSLEVVWLRPDVRPTMQPLVYEDENYFVINHFDGRSDHLLVMDIESGDMVCDVDTGSPLANGMFLTPGLNNDVLYCSTVSYARISWD

SEQ ID NO: 113748 - protein, 316 aa, Unknown
  Bacterial polypetide isolated from the Sargasso Sea
MFNRRVVVTGIGIVSPLGLGQKNNWKRLISGESGIDTIKSFEASELTCKIGGEIPFGSFEEGNLNLNEWFDIKDQRKLDRFIMLGLIASEEAIKDSNIDLSNEQILEKSGVIVGSGIGGLKTIAETSVLLEQKGPRRISPFFIPSSLINLISGQISIKYGFKGPNHSVVTACSTGSHAIGDASRIISDGDADIMIAGGAEAAICKLGVAGFAAARALSTSFNDSPEKASRPWDKDRDGFVMGEGAGILILEEYEHAKKRDANIYAEVIGYGMSGDAHHITAPEPTGLGALKSMQNALKRACIDPLDLDYINAHGTS

SEQ ID NO: 113749 - protein, 177 aa, Unknown
  Bacterial polypetide isolated from the Sargasso Sea
MKRVVVTGLGVVSCLGNNQDEVYQSLVNTKSGITFSEEYKEHNLKSHVHGKPNIKLEDYIDRKVIRFMGAGSAYNYVAMSEAVKDSGLEENEVSNISTGMVMGSGGPSIENVILASDKTREKNPKKMGPFIVPRTMASTASATLAVPFKIKGTNYTISSACATSGHCIGNAMELIQL

SEQ ID NO: 113750 - protein, 403 aa, Unknown
  Bacterial polypetide isolated from the Sargasso Sea
MRRVVITGLGIISCLGNNQDEVKQSLLNSKSGISFSEEYKEHNLKSHVHGKPKIKLEDHIDRKTIRFMGSGSAYNYIAMKEAIEDSGLQEKDISNFKTGIVMGSGGPSIENVILAADKTRAKTPKLMGPFIVPRTMASTASATLAVPFKIKGTNYTMSSACATSGHCIGNSMELIQMGKQDIVFAGGSEEIHWAMTAMFDAMTALSSKYNDTPEKASRAYDKTRDGFVIAGGAGVLVLEEYEHAKARGANIYAELTGYGATSDGYDMVAPSGEGAVRCMKMALATSKNRIDYLNTHGTSTPVGDITELNAVSDTFETNIPKISSTKSLSGHPLGAASVHEAIYCLIMMKNNFITASANINEIDEDAKKFPIVTTTEKNVELKAVMSNSFGFGGTNATLIFEKV

SEQ ID NO: 113751 - protein, 237 aa, Unknown
  Bacterial polypetide isolated from the Sargasso Sea
CIGNGMELIQYGKQKIVFAGGSDELHYAMTAMFDAMTALSSKYNEDPEKASRPYDKTRDGFVIAGGAGVLVLEEMEHAKARGAKIYAELTGYGATSDGFDMVAPSGEGAARCMNLALKTTRNKVDYINAHGTSTPVGDITELKAIKEAFKDKIPKISSTKSLSGHPLGAASVHEAIYSLIMMKNNFIAASANVNEMDEEAKKFPIVTKVEKNVTLNSVMSNSFGFGGTNATLVFEKV

SEQ ID NO: 113752 - protein, 179 aa, Unknown
  Bacterial polypetide isolated from the Sargasso Sea
GAGMLILEEYEFAKKRGARIYCELVGYGASSDAFHITAPSTEGPAHAVKIAVKDAGVDSEKIDYINTHGTSTPAGDINELKALKLALGNGIANYTSVSSTKSMTGHLLGAAAAIEAVFSVKALHHSYIPPTINIKELDQECDFDVTPNEGRSREIDVAMSNSFGFGGTNASVIFRKMHS

SEQ ID NO: 113753 - protein, 342 aa, Unknown
  Bacterial polypetide isolated from the Sargasso Sea
MRRVVITGLGIVSCLGNNQEEVYQSLLNSKSGISYAEEYKEHNLKSHVHGKPNIKLSDFVDRKTIRFMGSGSAYNYIAMKEAIKDSGLEEKEVSNFKTGIIMGSGGPSIENVILAADKTRAKTPKLMGPFIVPRTMGSTASATLAVPFKIKGTNYTMSSACATSGHCIGNSMELIQMGKQDIIFAGGSEEIHWAMTAMFDAMTALSSKYNDKPETASRAYDKTRDGFVIAGGAGVLVLEEYEHAKARGAKIYAELTGYGATSDGYDMVAPSGEGAVRCMKMAIETSKNKIDYINTHGTSTPVGDITELNAIQKTFGEEIPKISSTKSLSGHPLGAASVHEAI

SEQ ID NO: 113754 - protein, 317 aa, Unknown
  Bacterial polypetide isolated from the Sargasso Sea
QAGCLIGSALGGMQTFATATENLVTIGHRKMNPFCIPFAITNMGSALTAMDIGFMGPNYSIASACATGNFCILNSIMHIQNGEADLMLAGASDACVIPVGMAGFSAAKALSTRNDDPAAASRPWDANRDGFVMGEGAGVLVLESLESALERGAPIVAEVLGGFATCDAHHMTEPRPDGVGVNFAIDKALELTDVKAEDVNYINAHATSTPAGDLAELRVLQNKFKASGARINSTKSMIGHLLGAASAVEAVVCIKAITTGEVHPNINLETPDEGVDTSMLVGPTREKIDVKVALSNSFGFGGHNSAVLFAPYVPKRA

SEQ ID NO: 113755 - protein, 219 aa, Unknown
  Bacterial polypetide isolated from the Sargasso Sea
MNARITVTSHNTPDNVMTNVDLEKLVDTSDEWIQSRTGIVQRHIVSDDEASSDISTRIAKSLIKKRDISPDQLDLIIVGTVTPDHFTPSTAALVQKNIGATNAWGFDLSAACSGFIYGLETGANFISSGKYNKVMVIGVDTMTSILDYQDRDTCVIFGDGGGGVILEPSNNKSGIVDSILHMDGSGGEYLIVPGGGSRMPSTKASVNSRQHYIKQDGKT

SEQ ID NO: 113756 - protein, 317 aa, Unknown
  Bacterial polypetide isolated from the Sargasso Sea
MKRVVVTGIGVVSCLGNNQEEVYQSLLNSKSGITFSEEYKEYNLKSNVHGKPNIKLEDHVDRKFIRFMGPGSAYNYISMVEAVKDSGLEDKDISNVLTGMIMGSGGPSIQNVILAADKTREKNPKKMGPFVVPRTMSSTASATLAVPFKIKGVNYTISSACATSGHCIGNAMELIQLGKQNVVFAGGSDEVHYAMTAMFDAMTALSSKYNETPEKASRPYDKTRDGFVISGGGGVLVIEEYEHAKARGAKIYAELTGYGATSDGFDMVAPSGEGAVRCMQMALNTSKNKIDYINTHGTSTPVGDITELKAVGEVFKD

SEQ ID NO: 113757 - protein, 180 aa, Unknown
  Bacterial polypetide isolated from the Sargasso Sea
GFVIAGGAGVLVLEEMEKAKARGAKIYAEIVGYGATSDGHDMVQPSGEGAVRCMKMSMENIGCEIDYINPHATSTPIGDEKEVEAIRETFGSKIPNISATKSLTGHSLGAAGVQEAIYSILMMQNDFIAKSANIENIDPKFEDLPINKERIDNANIGCLLSNSFGFGGTNASLVFKNPNL

SEQ ID NO: 113758 - protein, 278 aa, Unknown
  Bacterial polypetide isolated from the Sargasso Sea
MKRVVVTGIGIVSCIGNDQKTVIKNLKELNSGISKAPEYEEYSFRSLVHGKPNIKLEDEIDRRTLRFMGDGAAYNYVSMKDAITDSGLTESQVSNEMTGIIVGSGGPSTFNLMRSFDLAKTGGSKKVGPFMVPRSMSSTNSATLATPFKIKGVNYSITSACSTSSHCIGNAYELIQIGKQNIIFAGGGEELHWTMSILFDAMGALSSKYNDDPKKSSRAYDTNRDGFVISGGGGTIVLEELEHAKSRGAKIYAEITGYGATSDGHDMVQPSGEGAIRC

SEQ ID NO: 113759 - protein, 257 aa, Unknown
  Bacterial polypetide isolated from the Sargasso Sea
MRRVVITGLGIVSCLGNNQEEVHQSLLNSKSGISYAEEYKEHNLKSHVHGKPHIKLEDHIDRKTIRFMGSGSAYNYIAMKEAIEDSGLEESEVSNFKTGIVMGSGGPSIENVILAADKTRAKTPKLMGPFIVPRTMASTASATLAVPFKIKGTNYTMSSACATSGHCIGNSMELIQMGKQDVVFAGGSEEVHWAMTAMFDAMTALSSKYNDAPETASRAYDKTRDGFVIAGGAGVLVLEEYEHAKARGAKIYAELTG

SEQ ID NO: 113760 - protein, 281 aa, Unknown
  Bacterial polypetide isolated from the Sargasso Sea
MTSRRVVVTGMGALTPIGNDLESYWNGLISGTSGCANITHFDATNFKTKFACELKGFDPADHFEKKEFRRYDRFSQYGIVAASEAINDSKLIDSSPNYDRIGVIWGAGIGGLETFQNEVLNFADGDGTPRFNPFFIPKMIPDIAPGLIAMKYGFQGPNYATVSACASSSNALIDALNYIRIGHADVIVAGGSEAPVTIAGVAGFNAMHALSTRNDDPGSASRPFDRDRDGFVLGEGAGALILEEYEHAINRGAKIYAELAGGGLSCDAYHMTAPHPDGRGA

SEQ ID NO: 113761 - protein, 405 aa, Unknown
  Bacterial polypetide isolated from the Sargasso Sea
MSNKRVVITGYGIVSCIGDNKKEVLQSLKDVKSGISHCKEYEELGMRSHVHGKPKINIEENVDRKILRFMGEGAAYNYIAMKEAIEHSGLDETLISNVNTGLVMGSGGPSTFQLQQAFDIAREKGVKKIGPYMVTRTMASGNSATLATPFKIKGVNYSISSACSTSLHCIGNAYDLIRHGQQEIVFAGGGEETHWTMSILFDAMGALSSKYNETPEVASRAYDSSRDGFVIGGGAGVLVVESLDSAKTRGANIIAEIQGFGQTSDGYDMVQPSGEGAVRCMNMATQGRPVDYINAHGTSTPVGDMIELKGIREVFGDNVPPTSSTKSLTGHSLGATGVQEAVYSLLMMENDFMVESANISNLDEKAEGMNILRENKNDVKINSILSNSFGFGGTNASIYLTSYND

SEQ ID NO: 113762 - protein, 795 aa, Unknown
  Bacterial polypetide isolated from the Sargasso Sea
MNGRELLGMGDNRGVEFDLYPTEIISNILVYKTPEAGMTTQNIGGSIDLQTVKPLTAESTFTVNGTFEKNAEDSPNPDFDNDGHRISVNFVDQFADDTIGLALTVASMESPRQEQHFRGWGYATVNTTPENTFDDNGNPLWNPRRYDGQDTVDVPDGTVVLGGHDSFQRSAMLERDSIAAVVQWAPTDKLNIQLDALYIDFVEDDVRRGLEEGGAEWGTSAYTITGVENGLVTSGYTDGFYSVVRNDARRQEADLTTLGINAEYQINDSWTLELDYSTGKVEKEIVDVESYSGVGRAGTEGRPITARSWEMTSSGVMFSDHPTIAPVDLTDPTLISLAGPQAWGARPLLESDAQDGFVNQPLFEEELDTLRFDVKGYVDWGVVTGLSAGVVYSDRSKSKDNNGAYLTAPSYPGNAPIPEVLGVTNLNFIGIDGVLAYDSLGLFESGYYYESDASRVQNDRLGDTYTVDEELLTLYTKLDLEMEVGDIWVRGNVGLQVVSADQQSTGFFATSNREGFTVANPVSGGADYTDVLPTLNLSAEVAEGQFVRLGLSKVISRPRMDDMRPNTQVTFSFNDNQITSTEIENGPWGGSAGNPELRPLEANQFDLAYENYFADTGYVAVSFFYKDIKNWHRSTSIVADFTEFYIPEVHQGSEGQTPVLFTGQVGSVLDGFEGFVRGYELQGSLPFDMIHDSLEGFGLFASATFMDGEVDAAPGQTETRIPGLSEESYSMTFFYENAGFEFRLAATKRDQYLTEERGVSLALVDATKAGGTLVDAQIGYDFSESGIEYLESLRV

SEQ ID NO: 113763 - protein, 413 aa, Unknown
  Bacterial polypetide isolated from the Sargasso Sea
MHKRRVVVTGLGCITPLGNSIESYWSGLLEGKSGASEITHFDASNMPVKFSCPIKDFNTDKYFDSKEMRKYDLFMQYGLAAGIDAINDSGLEDSTVDKESVGVAIGSGIGGLPNIENTHSTYTKSGARRISPFFVPASIINMISGNLSIKYGYKGPNISIVTACTTGTHNIGESFRYIQHSYADVMICGGAEMASSPLGVGGFASARALSTRNDDPTKASRPWDIDRDGFVLGDGAGVIVLEELEHAKKRNAKIYAELKGYGASADAFHMTLPSENGEGAQKCMGKALANAEINIDQVEYINAHGTSTPAGDIAETSAIKNQFGNHVDSLVVNSTKSMIGHLLGAAGGVEAIATILSIQHQIIHPTINIFNQDPACDLDYNSKESRNLKITHALSNSFGFGGTNGSLIFSKYS

SEQ ID NO: 113764 - protein, 408 aa, Unknown
  Bacterial polypetide isolated from the Sargasso Sea
MSTLKRAVITGIGAISCIGNNISEITKSLKSGTSGIRFNESYKELGMRSHISGSINLNLKDLIDRKHLRFMGEAASYAYLSTAEAIKDSGLDLSRFSSQDVGVIAGSGGASSRSQVEAADIVKSKGVKRIGPYRVTQTMGNTVSAALATFFGIKGVNFSISSACSTSAHCIGSALEQIQLGKQKIILAGGAEDEHWTMSSMFDAMGALSSSYNESPEKASRPFDKDRDGFVIAGGAGMLVIEELDHALERNADIYAEITGYGATSDGDDMVHPSGEGATNCMLKAVEMHGKDNIDYINAHGTSTPAGDPVELESIKKVFKDKIPPISSTKSQTGHTLGAAGALESIFSLLMLKNSFISKTLNLSSSIDEGEGLDLVSEVRNQDLDAVMNNSFGFGGTNVSLVFEKLKS

SEQ ID NO: 113765 - protein, 268 aa, Unknown
  Bacterial polypetide isolated from the Sargasso Sea
MSSTTSACLATPFKIKGVNYTISSACATSAHCIGHALELIQLGKQDIVFAGGGEELDWSSTIQFDAMGALSTKYNDTPEKASRTYDADRDGFVISGGGGILVVEELEHALARGAHIYAEITGYGATSDGYDMVAPSGEGAVRCMKMAMQGVGKVDYINTHGTSTPVGDTKELEAIQTLFGSNAPKLSATKAMTGHALGAAGVHEAVYSLLMMEHGFIAPSINIETLDEKAEGLPIVRAYEEADLNTVMSNSFGFGGTNASLVFSKFKA

SEQ ID NO: 113766 - protein, 276 aa, Unknown
  Bacterial polypetide isolated from the Sargasso Sea
MRRVVITGLGVVSCLGNNQEEVHQSLVNSKSGISYAEEYKEHNLKCHVHGKPNIKLEDHIDRKTIRFMGSGSAYNYIAMKEAIEDSGLEESEVSNFKTGIVMGSGGPSIENVILAADKTRAKTPKLMGPFIVPRTMASTASATLAVPFKIKGTNYTMSSACSTSGHCIGNSMELIQMGKQDIVFAGGSEEVHWAMTAMFDAMTALTSKYNDTPETASRAYDKTRDGFVIAGGGGVLVLEEYEHAKARGAKIYAEITGYGATSDGYDMVAPSGEGAV

SEQ ID NO: 113767 - protein, 202 aa, Unknown
  Bacterial polypetide isolated from the Sargasso Sea
MGALSSNFNSTPTIASRPYDSNRDGFVISGGAGMIILEDEEHAKKRGANILAKLSGYFANSDGYDMVAPSGEGASRCMQGAIDNSKIKIDYINTHGTSTPVGDVAEINAIKTLFNSETPMISSTKSMTGHSLGATGAHEAIYSIMMINENFIAPSINIESLCDDAEGLDIVTETRNTSINNVLSNSFGFGGTNASLVISRYQ

SEQ ID NO: 113768 - protein, 92 aa, Unknown
  Bacterial polypetide isolated from the Sargasso Sea
IFKDRSYLIPVSSTKSMTGHLLGGSGGIEAVACILSLTHNFIPPTINYVNPDPDCDLDYVPNNAREAQVEVALSNSFGFGGHNVCLAFSKMN

SEQ ID NO: 113769 - protein, 84 aa, Unknown
  Bacterial polypetide isolated from the Sargasso Sea
THDDVDWFIYHQANGAMLRMVGDMVGFAPEKNLMNIDKLANTTGATIPSVFHMYVEDGTISRGDTICCVGFGGGLTSGSIVFEY

SEQ ID NO: 113770 - protein, 145 aa, Unknown
  Bacterial polypetide isolated from the Sargasso Sea
HITSPTPGGVGGAEAMRLALADGGIDASEIDYVNAHGTSTPANDKNETSAIKSALGDRALQIPVSSTKSMTGHLLGGSGGIEAVACMLALQHGVVPPTINHTNPDPDCDLDVVPNQARDQTLGTVLSNSFGFGGHNVCLAFKRAG

SEQ ID NO: 113771 - protein, 203 aa, Unknown
  Bacterial polypetide isolated from the Sargasso Sea
AMGALSSKHNKTPTIASRAFDQDRDGFVVSGGAGMLIVESEEHAAKRNANIFAYITGYAANSDGFDMVSPSGSGAVLCMSNALKESDRKIDYINAHGTSTPVGDISELNAIGSIFKNDSPLISSTKSMTGHSLGAAGSQEAIYSILMMHNNFVAPSINILNLVDEASNLNIVTETTDKEITSVMSNSFGFGGTNASLVFSDSA

SEQ ID NO: 113772 - protein, 265 aa, Unknown
  Bacterial polypetide isolated from the Sargasso Sea
MGTKGPNFSTVSACASAADSIGQGLHMIRRGEADIVLAGGSEAAICPIGIAGFNSARALSTNNDNPEEASRPFDAKRDGFVLGEGAGLIVLEDEEHALKRGATIICELSGYGATSDAHHVTQPHPEGEGASKAMDIAISDAGIEKEKVAYINAHGTSTQLNDKFETIAIKKSFGDHAKKLKISSTKSMTGHLLGAAGGIEAAFTCLAINEKVVPPTINLLNPDPECDLDYVANHALKGNVPAAISNSLGFGGHNASLLFQDYPNQ

SEQ ID NO: 113773 - protein, 361 aa, Unknown
  Bacterial polypetide isolated from the Sargasso Sea
MKNVVITGLGIKSCIGNNYSDVLNNLSKGNSGIEFNNTYSEMGFRSCVSGSIDINLAEQIDRKLYRFMGESAGYAYLAAKDALDMAGIDEKDLDSPNIGIVAGSGGASTRVMLESGDIAREKGPKRIGPYGVTKSMSSSISAIIATALKLKGINYSISSACATSAHCIGHAADLIRNGQQNIVIAGGSDDEHWSSSCLFDAMGALSSNFNSTPTVASRPYDSDRDGFVISGGSGMIVLEEEEHAKKRGANILAKLSGYFANSDGYDMVAPSGEGAIRCMEGAIKSCDGEIDYINTHGTSTPVGDIAELNAIKKLFKSNSPMISSTKSMTGHSLGATGAHEAIYSVMMINEGFIAPSINIGT

SEQ ID NO: 113774 - protein, 158 aa, Unknown
  Bacterial polypetide isolated from the Sargasso Sea
ARGAKIYAELTGYGATSDGYDMVAPSGEGAVRCMQMALNTSKNKIDYINTHGTSTPVGDITELKAVGEVFKDKVPKISSTKSLSGHSLGATSVHEAVYSLIMMKNNFISASINITDMDDEAKKYPIVTKVEKDVNLNAIMSNSFGFGGTNATLVFEKV

SEQ ID NO: 113775 - protein, 159 aa, Unknown
  Bacterial polypetide isolated from the Sargasso Sea
KARGAKIYAELTGYGATSDGYDMVAPSGEGAVRCMKMALTTSKNKIDYINTHGTSTPVGDITELKAVGEAFPDYKPKISSTKSLSGHSLGATSVHEAIYSLIMMKNNFISASANISEMDDEAKNYPIVTEVEKDVNLNAIMSNSFGFGGTNATLVFEKV

SEQ ID NO: 113776 - protein, 75 aa, Unknown
  Bacterial polypetide isolated from the Sargasso Sea
MTGHLLGAAGAVEAIFTLLALRDQAVPPTINLDNPDEGCDLDFVAHTARDVKLEYALCNSFGFGGTNGSLLFKKV

SEQ ID NO: 113777 - protein, 290 aa, Unknown
  Bacterial polypetide isolated from the Sargasso Sea
MRRVVVTGLGIVSCIGNNAETVTDNLKNLNSGISAAPEYEEFSFRSLVHGKPEINLEENIDRRLLRFMGDGAAFNYIAMKKAIEDSGLEETDISNEMTGIIVGSGGPSTMNLYKASELGKNSGSKKVGPFMVPRSMSSTNSATLATPFKIKGVNYSITSACSTSSHCIGNAYELIQMGKQNIIFAGGGEELHWTLSILFDAMGALSSKYNDNPKIASRAYDSDRDGFVISGGGGTLVLEELEHAKARGAKIYGEINGYGATSDGFDMVQPSGEGAERCMKMAIKNINRKI

SEQ ID NO: 113778 - protein, 288 aa, Unknown
  Bacterial polypetide isolated from the Sargasso Sea
MKRVVVTGIGIVSCIGNDQKTVIKNLKELNSGISKAPEYEEYFFRSLVHGKPNINLEDEIDRRTLRFMGDGAAYNYVSMKDAIKDSRLNENQVSNEMTGIIVGSGGPSTFNLMKSFDLAKAGGSKKVGPFMVPRSMSSTNSATLATPFKIKGVNYSITSACSTSSHCIGNAYELIQMGKQNIIFAGGGEELHWTMSILFDAMGALSSKYNDDPKKSSRAYDANRDGFVISGGGGTIVLEELEHAKSRGAKIYAEVTGYGATSDGHDMVQPSGEGAIRCMKLALKKIKR

SEQ ID NO: 113779 - protein, 401 aa, Unknown
  Bacterial polypetide isolated from the Sargasso Sea
MTKQRVVVTGLGTINPLGNNVIDTWNNLISGISGIDHITLFDASDLPVTFAGEVKNFDANDYMGKQNARKLDRSGHLSIFAAEEAIQDAGFDLSKPLGEDFGIVFGTGIGGIGATEDAVRVYDERGSTRISPLAITQLMPNSSTGQVAIKYGIQGPSLTITTACAASANAIGEAKRMIEQNIVDKVLVGGTESGTTSMTIGAFAQIKALSKQNDEPQKACKPFDKNRDGFVMAEGSTVLILESESSAKDRDAKVYGYISGYGSSTDAYHITAPSEGGVGALRAMEQAISNADISKENIDYINAHGTSTPANDLNETLAIKSLMNDYAYEVNISSTKSMTGHLLGGGGAFEAMASLLSMKNNQIPPTINLNDSDKDCDLNYTANQSVDKNIDHVMSNSFGFG

SEQ ID NO: 113780 - protein, 414 aa, Unknown
  Bacterial polypetide isolated from the Sargasso Sea
MPNFHRVVITGIGAVTPIGNNIDEYLVGLQTGTNGVSDITLFDPEQHPCKFAAEVKNLQSENFIEAKESKRWDRFSQFGVIAAKQAFNDSGLEITEANASRIGVIIGSGVGGLLTMESQAQILSHKGPKRVSPFTVPMMIPNMATGLAAIALGAKGPSSSVSTACAAGSNAIGDSFRLLQLGKADAMICGGAEASITPLGVAGFASAKALSSRNESPQTASRPFDAERDGFVIGEGSGILVLETLENAQKRNARIYAEIVGYGTTCDAHHITAPSPGGIGGAEAIKLAIEDACLSLEKVDYINAHGTSTSANDKNETSAIKSIFKDRSYLIPVSSTKSMTGHLLGGSGGIEAVACILSLTHNFIPPTINYVNRDPECDLDYVPNNAREAQIGVALSNSFGFGGHNVCLAFSKMN

SEQ ID NO: 113781 - protein, 242 aa, Unknown
  Bacterial polypetide isolated from the Sargasso Sea
AARLIRANEADVMVAGGSEAAITRLGIGGFAAARALSTSYNDNPTTASRPWDEGRDGFVMGEGAGCVVLEDYEHAKSRGAKIYAEILGYGLSADAYHITAPSEDGDGGYRAMQAAIINGGVDISEINYINAHGTSTPLGDEIELGAVKKLFQDNISNLSVSSTKSSVGHMLGAAGAVEAIFSILAVSNDIIPPTLNLEKPCDSAEGIDLVPLKAKEKKVNIALSNSFGFGGTNASLIVGKVK

SEQ ID NO: 113782 - protein, 346 aa, Unknown
  Bacterial polypetide isolated from the Sargasso Sea
MRRVVITGLGVVSCLGNNQEEVHQSLLNSKSGISFAEDYKQHNLKSHVHGKPNIKLEDHIDRKTIRFMGSGSAYNYIAMKEAIEDSGLEESEVSNFKTGIVMGSGGPSIENVILAADKTRAKTPKLMGPFIVPRTMASTASATLAVPFKIKGTNYTMSSACATSGHCIGNSMELIQMGKQDIVFAGGSEEIHWAMTAMFDAMTALSSKYNNTPQSASRAYDKTRDGFVIAGGAGVLVLEEYEHAKARGAKIYAELTGYGATSDGYDMVAPSGEGAVRCMKMAMATAKNKIDYINTHGTSTPVGDITELNAIKETFIEDIPKISSTKSLSGHPLGAASVHEAIYCLI

SEQ ID NO: 113783 - protein, 166 aa, Unknown
  Bacterial polypetide isolated from the Sargasso Sea
YEHALKRGANIYAELVGFGMSADAHHMTAPPSDGYGAALSIKNALSDAGIDTDQIDYINAHATSTPLGDLAECNAIKSVFKNPPIVSSTKSMTGHTLGAAGAIESIFSILSIKDNHAPPTINLKNPDDDCDLDFVANSSRKFEINTAMNNSFGFGGTNSTLIFRSI

SEQ ID NO: 113784 - protein, 167 aa, Unknown
  Bacterial polypetide isolated from the Sargasso Sea
LEEYEHAKSRGAKIYAELTGYGATSDGYDMVAPSGEGAVRCMKMALSTAKNKIDYINTHGTSTPVGDITELKAVGQVFTDYKPKISSTKSLAGHSLGATSVHEAVYSLIMMKNNFIAASANINDMDEEAKKYPIVTKVEKDINLDSIMSNSFGFGGTNATLVFEKVK

SEQ ID NO: 113785 - protein, 166 aa, Unknown
  Bacterial polypetide isolated from the Sargasso Sea
GRYEHAKARGAKIYAEITGYGATSDGYDMVAPSGEGAVRCMKMALSTSKNKIDYINTHGTSTPVGDITELKAVSEVFENSIPKISSTKSLSGHSLGATSVHEAIYSLIMMKNNFISASININEIDEEAKKYPIVTKVEKGVTLNSIMSNSFGFGGTNATLVFEKLN

SEQ ID NO: 113786 - protein, 186 aa, Unknown
  Bacterial polypetide isolated from the Sargasso Sea
VLGEGSGCLILEELEHAKARGAKIYAEVVGGGLTADAHHITAPHPEGLGAINVMKLTLEDAGMKPEEVDYINVHGTSTPLGDIAETIAIKEVFGEHAFNLNISSTKSMTGHLLGAAGAIEAIACVKAIQNDIVPPTINFEHEDENIDYNLNLTLNKAQKRTVNAALSNTFGFGGHNTSIVMKKYND

SEQ ID NO: 113787 - protein, 322 aa, Unknown
  Bacterial polypetide isolated from the Sargasso Sea
MKRVVITGLGVVSCLGNNQEEVHQSLLNSKSGISFSEEYKEHNLKSHVHGKPNIKLEDHIDRKTIRFMGSGSAYNYIAMKEAIEDSGLEESEVSNFKTGIVMGSGGPSIENVILAADKTRAKTPKLMGPFIVPRTMASTASATLAVPFKIKGTNYTMSSACATSGHCIGNSMELIQMGKQDVVFAGGSEEIHWAMTAMFDAMTALSSKYNDTPETASRAYDKTRDGFVIAGGGGVLVLEEYEHAKARGAKIYAELTGYGATSDGYDMVAPSGEGAVRCMKMAMATSKNKIDYINTHGTSTPVGDITELNAVKNTFGDNIPKN

SEQ ID NO: 113788 - protein, 408 aa, Unknown
  Bacterial polypetide isolated from the Sargasso Sea
MKKRVVITGEGSISPLGLNSQSLWDNLVNGISGIDYISNFDTENFSVKIAGEVKEFDPNNFFEAKEVRKLDRFTMFGLIAADQALKNSNYSSSEAGVIVGTGVGGMHTLEEEHQKLIKKGQRGVSPFYVPKMIPNIAGGQIAIKHNLHGLNFSMSTACSSATDAIGMAYRLISNGYSKAILCGGAEGSITPLTLSGFANMKALSKNNENPQGASRPFDKDRDGFILSEGAGMLMLEDYDEAKKRDANIIGEIIGYGITNDAFHITQPDNESTGASNAITMALNDAEIDTSEVGYINAHGTSTYFNDMLETQAIKKVFGKDATNVSISSTKSMTGHLLGAAGAIEAIACINTLNNGIIPPTINYNNSDSECDLDYTPNEALKKDINISMSNSFGFGGHNSVIIFKKFSS

SEQ ID NO: 113789 - protein, 269 aa, Unknown
  Bacterial polypetide isolated from the Sargasso Sea
MKRVVITGIGIVSCLGNNQDEVYQSLINSKSGITFAEEYKEYNLKSNVHGKPNIKLEDHVDRKFIRFMGPGSAYNYVSMMEAVKDSGLEEKEVSNISTGMIMGSGGPSIENVILAADKTREKMPKRMGPFVVPRTMSSTASATLAVPFKIKGVNYTISSACATSGHCIGNAMELIQLGKQKVIFAGGSDEVHFAMTAMFDAMTALSSKYNDTPEKASRPYDKTRDGFVISGGGGVLVLEEHEHAKARGAKIYAEITGYGATSDGYDMVA

SEQ ID NO: 113790 - protein, 189 aa, Unknown
  Bacterial polypetide isolated from the Sargasso Sea
ASRPYDKTRDGFVISGGGGVLVMEEYEHARARGAKIYAEITGYGATSDGYDMVAPSGEGAVRCMNMALSTSKNKIDYINTHGTSTPVGDITELNAVGEVFKDKVPKISSTKSLSGHSLGATSVHEAVYSLIMMKNNFISASANIGEIDEGAKKFPIVTNVEKGVNLNAIMSNSFGFGGTNATLIFEKVE

SEQ ID NO: 113791 - protein, 405 aa, Unknown
  Bacterial polypetide isolated from the Sargasso Sea
MKRAVITGMGIVSCIGNNKSEVTDSLRQGRSGIKRNESYAEIGMRSHVSGSIEIDTKSLIDRKFLRFMGDASAFSFIAMNQAIEDSGLNQSQVSNTRTGLVAGSGGGSPEDQLNSTDIVREKGVRKVGAYRVPRTMSSSVSACLATPFQIKGVNYSISSACATSAHCIGHAAELIQLGKQDVVFAGGGESEHWTLSHMFDAMGALSTDYNETPTKASRAFDANRDGFVIAGGGGMLVVEELNHALQRDAKIYAEITGYAATSDGYDMVAPSGEGGARAMKSALEQSKKSVDYINTHGTSTPTGDVAELKAIKEVFGEKIPTINSTKSLTGHSLGAAGVQEAIYSLIMMEHNFIAASANIENLDPEAKGLPIAIDMQDNVKLDRVLSNSFGFGGTNASLVFSRYEI

SEQ ID NO: 113792 - protein, 381 aa, Unknown
  Bacterial polypetide isolated from the Sargasso Sea
MSKRRVVVTGLGVLAPNGNSVEDYWNSISNGISGIKEISSFDASGLSVRIAGELDGFDPNEHFDRKELKKLDLFTIYHIVSSREAIEQSGFKKHNIDHDRIGVIIGSGIGGIQTLEQQAKIYNERGQRRVSPFFVPRMIANIAAGNLAIEFGLKGPNHTVISACASGTDAIGCAARTIQYGDADVIVTGGTEASITGLTISGFANIRALSTQNDYPSKASKPFDKDRDGFVLSEGSATIVLEELEHAKKRGAKIIAEFAGYGSTDDAYHVTQPSEGGVGAIKAMSNALKDSNLNTSDIDYINAHGTSTPFNDKTESSAIKNLFSEHSKNLKISSTKSMIGHSLGASGALEAIASILAIQNNKIPPTINYKTPDPECDLDYV

SEQ ID NO: 113793 - protein, 345 aa, Unknown
  Bacterial polypetide isolated from the Sargasso Sea
MSKRRVVITGIGMVSPVGNSASESWGNIISGKSGVSNISKFETEGFETKFAATVNINIEEFLEKKEIRRIDEFIQFGLIASDECVNDSKLNLDEENLDRIGVSIGSGIGGLSTIENNKILLNDRGPKKISPFFVPGAISNMVSGYASLRFGFRGPNISIASACSSASHSIGYSFRSISYGDADIMLTGGAEMATTPLGLAGFNAAKALSTNNENPQAASRPWDKKRDGFVLGEGAGCLILEEYEHAKKRGAHIYAEIIGFGMSADAFHITAPPQEGEGAALAMRNALLDANIDKNLIDYINAHGTSTPAGDIAETLAIKSVFENSSKNLVVSSTKSMTGHLLELQ

SEQ ID NO: 113794 - protein, 205 aa, Unknown
  Bacterial polypetide isolated from the Sargasso Sea
LSSAFNDKPIKASRPFDEDRDGFVMGEGAGVVVLEEYEHAIKRGAKIYAEVKGYGLSGDAFHITSPSEDGDGGFRSMSAALNNSGIALDNIDYVNAHGTSTPAGDEIEIKAVERLFGEHSKNLYMSSTKSSIGHLLGAAGSVEAIFSIMAINTGKIPATLNLDNICVDTKINLVPKKSLTREVKSALSNSFGFGGTNASLIFTKV

SEQ ID NO: 113795 - protein, 252 aa, Unknown
  Bacterial polypetide isolated from the Sargasso Sea
GTNYTMSSACATSGHCIGNSMELIQMGKQDVVFAGGSEEIHWAMTAMFDAMTALSSKYNDSPETASRAYDKTRDGFVIAGGGGVLVLEEYEHAKARGANIYAELTGYGATSDGYDMVAPSGEGAVRCMKMAMANTKNKIDYINTHGTSTPVGDITELNAVKETFKENIPKISSTKSLSGHPLGAASVHEAIYCLIMMKNNFIAGSANISDLDEEAKKFPIVTKTETGATLNTVMSNSFGFGGTNATLIFEKV

SEQ ID NO: 113796 - protein, 413 aa, Unknown
  Bacterial polypetide isolated from the Sargasso Sea
MSRDKVVITGIGAVAPNGNNVNEFWTSLTNGISGIGPITYFDSSNHRVKIAGELNGFQPDSILDSKEIRKLDPFSIYALVATQEAISMSGLESESLNPDRIGVTIGTGVGGIQTLEDQQRVIDQKGARRVSPQFVPKMIANIAGGHLSIRWGLRGPNQTVTSACASATDAIGMAMRLILSGDADAMVTGGTEASVTSLTIAGFANMKALSQSNEIPERASRPFDKDRDGFVLGEGSGMLVIERESHAKNRGAHILAELAGYGSTDDAFHITQPSKGGSGALKAMERAIKDAGLNIDDIDYINAHGTSTPYNDKNESAAITELFKNHCEKLKVSSTKSMTGHLLGAAGGIEAVASVKSVLEQTLPPTINYDTPDSECALDYVPNIAQSSNVNSVLSNTFGFGGHNAVICIRKYN

SEQ ID NO: 113797 - protein, 138 aa, Unknown
  Bacterial polypetide isolated from the Sargasso Sea
AGWGGAKAIKLAIEDASISLEKVDYINAHGTSTSANDKNETSAIKSIFKDRSYLIPVSSTKSMTGHLLGGSGGIEAVACILSLTHNFIPPTINYVNPDPECDLDYVPNNARETQVGVALSNSFGFGGHNVCLAFSKMN

SEQ ID NO: 113798 - protein, 415 aa, Unknown
  Bacterial polypetide isolated from the Sargasso Sea
MAESSRRVVITGLGAVTPIGNSVSEYWSGLTEARNGVAPITLFDASRHACRFAAEVKDFDPTGILDPKETKRWDRFCQFGVVAAKEALAHSGLEINDSNRQRIGVIIGSGVGGLLTMETQAHVLEGKGPGRVSPFTVPMMIPNMATGLAAIALGTQGPSSAVATACAAGSNAIGDALRLLQQGHADAMVCGGAESAITPLGVAGFASAKALSFRNDDPATASRPFDAERDGFVIGEGAGILVLETLEHAQNRGATILGEVIGYGMTCDAHHITSPIPGGVGGARAMSLAIADAGLQPKDIDYVNAHGTSTPANDSNETSAIKTALGDRARQIPVSSTKSMTGHLLGGSGGIEAVAAVLALQHGVIPPTINHQNPDPACDLDVVPNQAREQIISTALSNSFGFGGHNVCLAFRRYA

SEQ ID NO: 113799 - protein, 100 aa, Unknown
  Bacterial polypetide isolated from the Sargasso Sea
MKALKLALGDGITNHTSVSSTKSMTGHLLGAAAAIEAVFCVKALHHSYIPPTININELDPECDFDVTPNEGRSRVIDVAMSNSFGFGGTNASVIFRKMYS

SEQ ID NO: 113800 - protein, 164 aa, Unknown
  Bacterial polypetide isolated from the Sargasso Sea
GYEHAKSRGAKIYAEITGYGATSDGYDMVAPSGEGAVRCMKMALSTSKNKIDYINTHGTSTPVGDITELKAVGEVFKDNVPKISSTKSLSGHSLGATSVHEAVYSLIMMKNNFISASININDMDDEAKKFPIITKVEKNVNLNSIMSNSFGFGGTNATLVFEKV

SEQ ID NO: 113801 - protein, 332 aa, Unknown
  Bacterial polypetide isolated from the Sargasso Sea
MKRVVITGLGIISSIGLNAKEVTESLKKGKSGITFSEEYEFHGFRSQVHGMPKINLSDHIDKRQLRFMGDGAAYNYIAMEQAIKDSGLTETEISNERTGLIVGSGGPSTKNLFAAHQIVLEKKSPKRMGPFMVTRGMSSTNSACLATPFKIKGVNYSISSACSTSAHCIGNGLEQIQLGKQDIIFAGGGEELDWTLSCLFDAMGAMSSKYNDIPETASRAYDKDRDGFVISGGAGVLVLECYEHAKARGAKIYAEITGYGATSDGHDMVAPSGEGGERSMKLALSSIEDRKVSYINAHGTSTPAGDVVEVEAIRRIFGNKDIPPISSTKSLT

SEQ ID NO: 113802 - protein, 358 aa, Unknown
  Bacterial polypetide isolated from the Sargasso Sea
MRRVVITGLGVVSCLGNNQEEVHKSLLNSKSGISYAEEYKEHNLKSHVHGKPNIKLEDHIDRKTIRFMGSGSAYNYIAMKEAIEDSGLEETEVSNFKTGIVMGSGGPSIENVILAADKTRAKTPKLMGPFIVPRTMASTASATLAVPFKIKGTNYTMSSACATSGHCIGNSMELIQMGKQDVVFAGGSEEVHWAMTAMFDAMTALSSKYNDAPETASRAYDKTRDGFVIAGGAGVLVLEEYEHAKARGAKIYAELTGYGATSDGYDMVAPSGEGAVRCMQMAMSTAKNKIDYINTHGTSTPVGDITELNAVKNTFGENIPKISSTKSLSGHPLGAASVHEAIYCLIMMKNNFIAGSAN

SEQ ID NO: 113803 - protein, 137 aa, Unknown
  Bacterial polypetide isolated from the Sargasso Sea
MHKSIIKGLGYYIPENVVTNNDLTKMMDTSDEWIRERTGIEERRWVNDNKLSTSLMGTFAAEKAIKNANIDKNDIDFIIFATLSPDYYFPGSGVLLQRNLEIKEVGALDVRNQCSGFVYAFIIADQYIKSGMYKNIL

SEQ ID NO: 113804 - protein, 66 aa, Unknown
  Bacterial polypetide isolated from the Sargasso Sea
RAVLDSERKGLEHLALYGNTSAATIPLMLDEAVRDGRIQPGHRIASSGFGAGLSWGAALLRWSGPA

SEQ ID NO: 113805 - protein, 116 aa, Unknown
  Bacterial polypetide isolated from the Sargasso Sea
YINAHGTSTPLNDKFETIAIKRAFGDHSKKLKISSTKSMTGHLLGAAGGIEAAFTVMAINEKVVPPTINLQNPDPDCDLDYVANHALKGNVPAAISNSLGFGGHNSSLLFQDYPNQ

SEQ ID NO: 113806 - protein, 404 aa, Unknown
  Bacterial polypetide isolated from the Sargasso Sea
MREVVVTGIGIVSSIGNNVEEVTESLKTLKSGIVKNEINLELGLRSHISGSVKNLDLKERIDRKLFRFMGEAAAFAYISTEEAIKDSGLDEESLSSKRTGLIMGSGGASSEDQIDSADILRSKGLKRIGPYRVTKAMGSTVSACLATSFGIKGINYSISSACATSAHCIGSGMEQIQLGKQDIIIAGGGEAEHWGMTSLFDAMGALSTKYNDSPEKASRAYDRDRDGFVIAGGGGAIILEEKEHAIKRGAKIYAQLTGYAATSDGEDMVSPSGEGGERCMRIALGMTGKEKVDYINAHGTSTPAGDITELKAIENVFGTDLPLISSTKSLSGHSLGAAGVHESIFCLIMMKEGFATGSANIENLDEGAINFPIIQKNLETELKKILSNSFGFGGTNATLIFEKI

SEQ ID NO: 113807 - protein, 208 aa, Unknown
  Bacterial polypetide isolated from the Sargasso Sea
MRRVVVTGLGIVSSLGNNIEEVTTSLRNGNSGITFCKEYEEMGFRSHIHGSIKLDPSECVDRKVLRFMGNGAAYAYIAMQQAIEDSGLEKDQVSNDKTGLIIGSGGPSTSNMMTAFDLARNKGPKRVGPYMVPRVMSSTVSATLATSFQIKGLSYSISSACSTSAHCIGNAFETIQLGKQDIIFAGGGEELHWTLSVLFDAMGALSSK

SEQ ID NO: 113808 - protein, 82 aa, Unknown
  Bacterial polypetide isolated from the Sargasso Sea
MISSTKSMTGHSLGATGAHEAIYSVMMIKEGFIAPSINIETLCDEAKGIDIVTNTREFPVCNVLSNSFGFGGTNASLVISKY

SEQ ID NO: 113809 - protein, 246 aa, Unknown
  Bacterial polypetide isolated from the Sargasso Sea
ACSTSAHCIGNAYEQIILNNQDIVLAGGGEDEHWTQSMMFDAMGALSSKYNENPEKSSRPFDEGRDGFVIAGGGGMIILEELSHALSRDAKIYGEIVGYSATSDGGDMVAPSGEGAINCMRNALIMSNLESVDYLNAHGTSTPTGDPVELESIKEVFKDALPIVGSTKSQTGHALGAAGALECIYSLLMMKESYIAESINIDSPITESSGIELAREYTKKNDFKAFMSNSFGFGGTNVSLIVKKYS

SEQ ID NO: 113810 - protein, 386 aa, Unknown
  Bacterial polypetide isolated from the Sargasso Sea
MKRVVVTGIGIVSCLGNNQQEVYESLLNTKSGISFSEEYKEHNLKSNIHGKPNIKLSDHVDRKALRFMGNGSAYNYVAMKEAIKDSGLKENEISNVSTGMVMGSGGPSIENVILAADKTREKNPKKMGPFIVPRTMASTASATLAVPFKIKGVNYTISSACATSGHCIGNAMELIQFGKQKIIFAGGSDELHFAMTAMFDAMTALSSKYNDSPKGASRPYDKTRDGFVIAGGAGVLVLEEMDYAKARGAKIYAELTGYGATSDGFDMVAPSGEGATRCMNLALKTTRNKIDYINAHGTSTPVGDITELKAIEGAFKDKIPKISSTKSLSGHPLGAASVHEAIYSLIMMKNNFIAASANVNEIDDEAKKFPIVYKVENNVTLNSVMS

SEQ ID NO: 113811 - protein, 257 aa, Unknown
  Bacterial polypetide isolated from the Sargasso Sea
MKRVVITGLGIVSCLGNSQEEVHQSLLNSKSGISFAEEYKEHNLKSHIHGKPNIKLEDHVDRKTIRFMGSGSAYNFIAMKEAIEDSGLEEKDVSNFKTGIVMGSGGPSIENVILAADKTRAKTPKLMGPFVVPRTMASTASATLAVPFKIKGTNYTMSSACATSGHCIGNSMELIQMGKQDIVFAGGSEEIHWAMTAMFDAMTALSSKYNDTPEKASRAYDKTRDGFVIAGGGGVLVLEEYEHAKARGAKIYAELTG

SEQ ID NO: 113812 - protein, 231 aa, Unknown
  Bacterial polypetide isolated from the Sargasso Sea
ELIQLGKQNIVFAGGSDEVHFAMTAMFDAMTALSSKYNQTPEKASRPYDKTRDGFVISGGGGVLVLEELEHAKARGAKIYAEITGYGATSDGYDMVAPSGEGAVRCMNMALSTAKNKIDYINTHGTSTPVGDITELKAVGQSFPDYKPKISSTKSLSGHSLGATSVHEAIYSLVMMKNNFISASANISDMDDEAKNFPIVTQVEKDVNLNAVMSNSFGFGGTNATLIFEKV

SEQ ID NO: 113813 - protein, 240 aa, Unknown
  Bacterial polypetide isolated from the Sargasso Sea
HCIGNAYELIQMGKQNIVFAGGGEELHWTLSILFDAMGALSSKYNDNPSVASRAYDSERDGFVISGGGGTLVLEELDHAKARGSKIYGEITGYGATSDGYDMVQPSGEGAERCMKMAIKNIKGNVDYINSHGTSTTIGDLKELEAIKNVFGKNIPKISSTKSLTGHSLGATGVHEAIYSLLMMNNNFLSGSANINSLDDKAKDHNILLETEQNNKIENILSNSFGFGGTNAALLISRYND

SEQ ID NO: 113814 - protein, 181 aa, Unknown
  Bacterial polypetide isolated from the Sargasso Sea
FDKNRDGFVMGEGSTVLILESEESAKSRDAEIYAYIDGYGSTTDAYHITAPAEGGAGAVKAMEKAIDDAGITPSDIDYINAHGTSTPANDKNETEAIKTVLGEKASEVVISSTKSMTGHLLGGGGAFESMASILSIKHSKVPPTINLNDPDEECDLNYTPNNAVDLSIKTAMSNSFGFWWA

SEQ ID NO: 113815 - protein, 96 aa, Unknown
  Bacterial polypetide isolated from the Sargasso Sea
AIKSIFKDRSYLIPVSSTKSMTGHLLGGSGGIEAVACILSLTHNFVPPTINYVNPDPDCDLDYVPNNARDAQIRVALSNSFGFGGHNVCLAFSKLD

SEQ ID NO: 113816 - protein, 394 aa, Unknown
  Bacterial polypetide isolated from the Sargasso Sea
EIVSCLGNNQKEVYESLINSKSGISFAEEYKEHNLKSSIHGKPNIKLEDHVDRKPLRFMGNGSAYNYVAMKEAVKDSGLKESDVSNVSSGMVMGSGGPSIENVILAADKTREKNPKKMGPFIVPRTMASTASATLAVPFKIKGVNYTISSACATSGHCIGNGMELIQFGKQKIVFAGGSDELHFAMTAMFDAMTALSSKYNDTPQKASRPYDKSRDGFVIAGGAGVLVLEEMEHAKARGAKIYAELTGYGATSDGFDMVAPSGEGAARCMEIARKTARNKIDYINAHGTSTPVGDITELKAIQQTFKDKIPKISSTKSLSGHPLGAASVHEAIYSLIMMKNNFIAASVNVNEMDDEAKKFPIVTEVEKNVNLNSVMSNSFGFGGTNATLVFEKV

SEQ ID NO: 113817 - protein, 190 aa, Unknown
  Bacterial polypetide isolated from the Sargasso Sea
DAERDGFVIGEGSGILILETLENAQKRNARIYAEIVGYGTTCDAHHITAPSPGGIGGAEAIKLAIEDACLSHEKVDYINAHGTSTSANDKNETSAIKSIFKDRSYLIPVSSTKSMTGHLLGGSGGIEAVACILSLTHNFIPPTINYVNRDPECDLDYVPNNAREAQIGVALSNSFGFGGHNVCLAFSKMN

SEQ ID NO: 113818 - protein, 388 aa, Unknown
  Bacterial polypetide isolated from the Sargasso Sea
QSLWENLVKGKSGIDHISGFDTEKFSIKIAGEVKDFDPNNFFEAKEARKLDRFTMFGLIAAEQALQNSNYKSSDAGVIVGTGVGGMHTLEEEHQKLIKKGQRGVSPFYVPKMIPNIAGGQIAIKHNLHGLNFSMSTACSSATDAIGMAYRLISNGYSKAILCGGAEGSITPLTLSGFANMKALSKNNENPQGASKPFDKHRNGFILSEGSGMLMLEDYDEAKKRDANIIGEIIGYGITNDAFHITQPDNESTGASNAITMALNDAEIDTSEVEYINAHGTSTYFNDMLETQAIKKVFGKYAKNVSISSTKSMTGHLLGAAGAIEAITCINTLNNGIIPPTINYINPDPECDLDYTPNEAFKKDINISMSNSFGFGGHNSVVIFKKFSS

SEQ ID NO: 113819 - protein, 394 aa, Unknown
  Bacterial polypetide isolated from the Sargasso Sea
NIDEYLVGLQTGTNGVSDITLFDPEQHPCKFAAEVKNLQSENFIEAKESKRWDRFSQFGVIAAKQAFNDSGLEITEANASRIGVIIGSGVGGLLTMESQAQILSHKGPKRVSPFTVPMMIPNMATGLAAIALGAKGPSSSVSTACAAGSNAIGDSFRLLQLGKADAMICGGAEASITPLGVAGFASAKALSFRNDSPQTASRPFDAERDGFVIGEGSGILVLETLENAQKRNARIYAEIIGYGTTCDAHHITAPSPGGVGGAEAIKLAIEDACLSLEKVDYINAHGTSTSANDKNETSAIKSIFRDRSYLIPVSSTKSMTGHLLGGSGGIEAVACILSLTHNFIPPTINYVNPDPECDLDYVPNNAREAPVGVALSNSFGFGGHKCLPCFQQNE

SEQ ID NO: 113820 - protein, 227 aa, Unknown
  Bacterial polypetide isolated from the Sargasso Sea
MIAGGAEAAVCELGLAGFCAARSLSTSYNDNPELASRPWDKNRDGFVMGEGAGILVLEELQHAKKRGAKIYAELIGYGMSGDAHHITAPSEDGDGGFRAMKQSINMANISLEDINYVNAHGTSTIKGDEIELNAIMKLFNKHENLFVSSTKSSIGHLLGAAGSVESIFSILAINNSIVPGTLNLKDPIDSKNINLVANEPKETKINIALSNSFGFGGTNTALLFKNY

SEQ ID NO: 113821 - protein, 249 aa, Unknown
  Bacterial polypetide isolated from the Sargasso Sea
CNAIIDGLNYIRLGYADVIVSGGSEAGVSISGIGGFNALRALSTRNESPKTASRPFDKNRDGFVLGEGAGCLILEELEHALNRGAKIYAELIGGGLSADAYHMTAPLPDGTGAIKVMQNCISDANIKPSDVDIVNMHGTSTPLGDVAESNALKQVFEDHLYTMNINSTKSMTGHLLGAAGAIEAIASILSINNNLVPPTINFSEPDENIDEKINFTFNKSQTREVNYAMSNTFGFGGHNACVIFSSFND

SEQ ID NO: 113822 - protein, 310 aa, Unknown
  Bacterial polypetide isolated from the Sargasso Sea
MRRVVVTGLGIVSCLGNNQEEVHQSLLNSKSGISFAEEYKEHNLKSHVHGKPNIKLSDFVDRKTIRFMGSGSAYNYIAMKEAIKDSGLEEKEVSNFKTGIVMGSGGPSIENVILAADKTRAKTPKLMGPFIVPRTMGSTASATLAVPFKIKGTNYTMSSACATSGHCIGNSMELIQMGKQDVVFAGGSEEVHWAMTAMFDAMTALSSKYNDKPETASRAYDKNRDGFVIAGGAGVLVLEEYEHAKARGAKIYAELTGYGATSDGYDMVAPSGEGAVRCMQMAMVTSKNKIDYINTHGTSTPVGDITELNA

SEQ ID NO: 113823 - protein, 90 aa, Unknown
  Bacterial polypetide isolated from the Sargasso Sea
MRRYSRITGTGSYLPPRRLTNADLVAELGQRGIETSDEWIVERTGIRARHFAAPDVTASDLGLEAARSALQAANLQPTDIDLIIVATSTP

SEQ ID NO: 113824 - protein, 267 aa, Unknown
  Bacterial polypetide isolated from the Sargasso Sea
MDLFMQYGMAAGMDAVADAKLLESQCNPDRIGVSIGSGIGGLPNIENTRDTFIKSGSRRISPFFVPASIINMISGNLSIKYGFKGPNLSIVTACTTGTHNIGEGFRQIQHSHADVMICGGAEMATSDLGVGGFAAARALSTRNDSPETASRPWDKDRDGFVLGDGAGVIVLEELEHAKKRGAKIYAEINGYGMSADAYHMTLPSETGEGASRCMTLALKDANLDPSNIDYINAHGTSTPAGDILELKAVKKTFGAHSQNLIINQQSQ

SEQ ID NO: 113825 - protein, 308 aa, Unknown
  Bacterial polypetide isolated from the Sargasso Sea
SHVHGKPNIKLEDHVDRKFIRFMGPGSAYNYISMAEAVKDSGLEEKDVSNISTGMIMGSGGPSIENVILAADKTREKSPKRMGPFVVPRTMSSTASATLAVPFKIKGVNYTISSACATSGHCIGNAMELIQLGKQKIIFAGGSDEVHFAMTAMFDAMTALSSKYNDTPEKASRPYDKTRDGFVISGGGGVLVLEEYEHAKSRGAKIYAEITGYGATSDGYDMVAPSGEGAVRCMKMALSTSKNKIDYINTHGTSTPVGDITELKAVGEVFKDNVPKISSTKSLSGHSLGATSVHEAVYSLIMMKNNFI

SEQ ID NO: 113826 - protein, 161 aa, Unknown
  Bacterial polypetide isolated from the Sargasso Sea
MVEQLHRTGGVMFRGSGSATPQRSISNTELGQRVETSDDWIRSRTGIAARRVIGADESLGELNGLAAERALSMAGWSADSLDLILLATSTPDDLFGSAPRLQARIGAVNAAAFDLTAACSGFLFAVVTAAQYLRSGAMRRILVVGADQLSRWVDWDDRRSC

SEQ ID NO: 113827 - protein, 218 aa, Unknown
  Bacterial polypetide isolated from the Sargasso Sea
LDWTLSCLFDAMGAMSSNFNETPERASRAFDANRDGFVIAGGGGIVVLEELEHAKARGAKIYAEVTGFGATSDGHDMVAPSGEGGERAMRLALGTLPEGRAVSYINAHGTSTPVGDVGEVEAVRRVFENKEMPLISSTKSMTGHSQGATGAQEAIYCLLMLKNNFIAPSINIEELDAGINSGEIACELVENVSHDTVMTNSFGFGGTNGSMLLSRYYE

SEQ ID NO: 113828 - protein, 296 aa, Unknown
  Bacterial polypetide isolated from the Sargasso Sea
MNTTITATAKYIPEKILSNFDLEKIVDTTDDWIKSRTGITKRHIVQEGEATSDMCANIAKKLLKSSGKTPEEIDIIIIATSTPDHFVVSTAAIVQDKIGAINAWGYDLTAACTGFIFALETGARLIESGKYKNAIIIGADTMSSIIDYKDRNTCVIFGDGGGGVLIEQTDDDYGIVDSILKTDGSGNQFLTVPAGGSRKPASETTVKQRLHYVYQDGKTVFKYAVNRMSEVSKEIIEKNKLSSHDIKLFIPHQANQRIIDATARKCGLDLDQVFVNIDKYGNTTAGTIPIAIDEAK

SEQ ID NO: 113829 - protein, 208 aa, Unknown
  Bacterial polypetide isolated from the Sargasso Sea
SILTNQKISQKVDTSNEWIKSRTGISERRISSLEDNVTEMGYKAALTAIEMANWDIKTIDLIILATSTPHDLFGSAPSIQAKLGASNAVAFDLTAACSGFLFALITASQFLKGGSFKRAIVIGADQLSSFVDWNDRRSCILFGDGAGALAIEATNKFDNFIGFDMRTDGGRGSFLNLPSKKNKDSIVDEIDFSSGGFSPNSDEWSGSL

SEQ ID NO: 113830 - protein, 119 aa, Unknown
  Bacterial polypetide isolated from the Sargasso Sea
MNGQEVYKFAVKEVPLILEKLLKKMKYNSDQVDWLLLHQANQRILDSVGERLKITREKILSNLEKYGNTSAATIPLMMDEAVRDSRIKQNDIIATSGFGAGLSWGAALFNGGKNKIGTL

SEQ ID NO: 113831 - protein, 276 aa, Unknown
  Bacterial polypetide isolated from the Sargasso Sea
FFVPGSIVNMISGLVSIEHQFKGPNHSVVTACSTGSHCIGIAARSVAYGEADIMIAGGAEMASTPLGIAGFVSSRALSTNDNPEEASRPWDQDRDGFVLSDGAGALVLEELEHAKSRNANIYAELVGFGMSSDAYHMTAPPESGDGAALAMSNALSDSKLNPDEVDYINAHGTSTPLGDIAETKAIKKVFLNPPVISSTKSMTGHTLGAAGALESIFSILALQDQIIPPTINLHNQDPECDLDYNANQARDKEVNVVMNNSFGFGGTNSTLVFKKI

SEQ ID NO: 113832 - protein, 263 aa, Unknown
  Bacterial polypetide isolated from the Sargasso Sea
MVEQLHRTGGVMFRGSGSATPQRSISNTELGQRVETSDDWIRSRTGIAARRVIGADESLGELNGLAAERALSMAGWSADSLDLILLATSTPDDLFGSAPRLQARIGAVNAAAFDLTAACSGFLFAVVTAAQYLRSGAMQRILVVGADQLSRWVDWDDRRSCVLFGDAAGAVVMEASDEQNDLQGFLLRSDGGRGAVLQLPQSSERAPLVGDASHQRGGFEPIQMNGQEVYKFAVREVPAILEALLQKTETQADSLDWLLLHQA

SEQ ID NO: 113833 - protein, 189 aa, Unknown
  Bacterial polypetide isolated from the Sargasso Sea
MCFGCWCRTLSRITNWDDRNTCVLFADGAGAAILKPSDDTGIIFSELGANGEYAELLHVPYGTSRKPETPNVDDYTLKMSGNEVFKVAVKTLEEIAIDALKKSNLESKDIDWFIPHQANMRIIQAVAKRLELPEEKVILSMDIHGNTSAASIPLAFDRAVQDGRIKKGDTILMQSFGAGFTWGSVILDL

SEQ ID NO: 113834 - protein, 111 aa, Unknown
  Bacterial polypetide isolated from the Sargasso Sea
GSSVFKFAVTNMADISEEIMKKNNLKADDIAYLVPHQANKRIIDATANRMGVGPDKVLLNIERYGNTTAGTIPLCLWDFEKKFKKGDNLILAAFGGGFTWGSLYLKWSYNN

SEQ ID NO: 113835 - protein, 215 aa, Unknown
  Bacterial polypetide isolated from the Sargasso Sea
VAGFAAARALSTSFNESPTRASRPWDKDRDGFVMGEGAGILVLEEYDHAKKRDANIYAEVIGYGMSGDAYHITAPEPTGLGALNSMQNALKRACIDPSDLDYINAHGTSTPLGDIIELQAVSKLMNSQLEKLVMSSTKSSIGHLLGAAGAVEAIFSILSMKNKTIPPTINLDNKANEAIHFNLAPNFSIEKKINYCLSNSFGFGGTNASLVFRNL

SEQ ID NO: 113836 - protein, 303 aa, Unknown
  Bacterial polypetide isolated from the Sargasso Sea
IVAGSGGASTRIMVQNGDITREKGPKRIGPYGVTKSMSSSISAILATALKLKGINYSISSACATSAHCIGHAADLIKAGQQDIVIAGGSDDEHWSSSALFDAMGALSSNFNSSPTEASRPYDIDRDGFVISGGSGIIILEDEEHAIKRNANILARLSGYFANSDGYDMVAPSGEGAVRCMKGAIDNANCKIDYVNTHGTSTPVGDAAELNAIKEVFGSYSPFISSTKSMTGHSLGATGVHEAIYSTMMINESFIAPSINIKNLCDEAKGLNIITETHETKLNNVLSNSFGFGGTNASLVISKY

SEQ ID NO: 113837 - protein, 253 aa, Unknown
  Bacterial polypetide isolated from the Sargasso Sea
HSVVTACATGAHSIGDASEMIKRGASNVMIAGGAEAAVCKLGIAGFCAARSLSTSFNDFPEKASRPWDKDRDGFVMGEGSGIIVLEELEFAKKRGANIYAEICGYGMSGDAYHITAPSEDGDGGYRAMKSALEMANISNDDVNYINAHGTSTVKGDEIELSAITNLFNHKVNVSSTKSSIGHLLGAAGSVEAIFSMLSIKNNIMPATLNLENPIESRSANLISKEPLEGVVKYALSNSFGFGGTNTALLFKSI

SEQ ID NO: 113838 - protein, 209 aa, Unknown
  Bacterial polypetide isolated from the Sargasso Sea
KSFKRVSPFFVPGSIINMTPGYLSIIKGYTGPNLSIVTACASSNHAIGTSARLIAYGDADVMVTGGSEMATTPLGVSGFLASRALSKSDDPETASRPWDKDRDGFVLSDGAAILVLEEYEHAKNRSANIYAEVIGFGMSFDAYHMTAPSEDGTGAALSISRAISDAGISTNDIDYINAHATSTPLGDLAECNAVKSIFDSPPPISSTKS

SEQ ID NO: 113839 - protein, 253 aa, Unknown
  Bacterial polypetide isolated from the Sargasso Sea
KGTNYTMSSACATSGHCIGNSMELIQMGKQDIIFAGGSEEIHWAMTAMFDAMTALSSKYNETPETASRAYDKTRDGFVIAGGAGVLVLEEYEHAKARGAKIYAELTGYGATSDGYDMVAPSGEGAVRCMKMAMTTAKNKIDYINTHGTSTPVGDITELNAVKETFGSNIPKISSTKSLSGHPLGAASVHEAIYCLIMMKNNFIAGSANIHEMDEEAKKFPIVAKTETGVTLNTVMSNSFGFGGTNAALIFEKV

SEQ ID NO: 113840 - protein, 270 aa, Unknown
  Bacterial polypetide isolated from the Sargasso Sea
MKRRVVVTGLGIVSPLGNDLASSWEGITQGRSGIGPLTNVSDAYLDRFTTKIAGEVKGFDITADNELFGKFRVSGKDAKKMDPFIHYGLGASFMALHDSGLEITDANAERIGAIVGAGIGGLLGIEEQTIEFHEGKKISPFYVPKTIINMLPGQLSIITGLKGPSFSAVSACATSNHSIGTAMRMIQYGDADVMVVGGAERGSSPTALGGFCAMKAMSTRNDAPEQASRPWDKDRDGFVLGDGAGILILEEYEHAKARGAKIYCELAGFG

SEQ ID NO: 113841 - protein, 284 aa, Unknown
  Bacterial polypetide isolated from the Sargasso Sea
SPFFVPGSIINMISGFLSIHLGLQGPNYAIATACTTGTHCIGMAARNIAYGEADVMVAGGAEMAACGLGMGGFGAARALSTRNDEPTKASRPWDKGRDGFVLSDGSGALVLEELEHAKARGATIYAELIGFGMSGDAFHMTSPPEDGAGAARCMAAALRDAGINADQVQYINAHGTSTSAGDLAEAAAVKSVFGDHAYKLAVSSTKSMTGHLLGAAGAVEAIFSILALRDQVAPPTINLDEPDEGCDLDFVPHQAKAMPIEIALSNSFGFGGTNGSLLFRRYNG

SEQ ID NO: 113842 - protein, 131 aa, Unknown
  Bacterial polypetide isolated from the Sargasso Sea
LGADSPKRGDSPAQEEAYIYMKGNEVFKFAVTRLSEIVEETLAHNNMDKSKVDWLVPHQANLRIIKAAAKKLSMPMEQVVVTLDKHGNTSAATIPTALDEAIRDGRIKRGQTILMEAFGSGFTWGSALIKY

SEQ ID NO: 113843 - protein, 241 aa, Unknown
  Bacterial polypetide isolated from the Sargasso Sea
TSGHCIGNAMELIQLGKQNIVFAGGSDEVHFAMTAMFDAMTALSSKYNDTPEKASRPYDKTRDGFVISGGGGVLVLEEYEHAKARGAKIYAELTGYGATSDGYDMVAPSGEGAVRCMKLALSTSKNKIDYINTHGTSTPVGDITELKAVGEVFNESIPKISSTKSLSGHSLGATSVHEAVYSLIMMKNNFISASINITEMDDEAKKFPIVTKVEKNVTLNSIMSNSFGFGGTNATLVFEKV

SEQ ID NO: 113844 - protein, 206 aa, Unknown
  Bacterial polypetide isolated from the Sargasso Sea
MVEQLHRTGGVMFRGSGSATPQRSISNTELGQRVETSDDWIRSRTGIAARRVIGADESLGELSGLAAERALAMAGWSADSLDLILLATSTPDDLFGSAPRLQARIGAVNAAAFDLTAACSGFLFAVVTAAQYLRSGAMQRILVVGADQLSRWVDWDDRRSCVLFGDAAGAVVMEASDEQDDLQGFLLRSDGGRGAVLQLPQSSERA

SEQ ID NO: 113845 - protein, 182 aa, Unknown
  Bacterial polypetide isolated from the Sargasso Sea
GEGSGVVVLEEYEHAKARGATIYAEVAGYGLSGDAYHITAPASDGDGGFRSMQMALGHSGLGVADIDYVNAHGTSTPLGDEIELGAVSRLFGNSIETMSMSSTKSSIGHLLGAAGAVEAIFSILAMRDNMVPPTINLENPSVETDMDLVPLKAREKPVNAVLTNSFGFGGTNASLVMKTADA

SEQ ID NO: 113846 - protein, 227 aa, Unknown
  Bacterial polypetide isolated from the Sargasso Sea
LTGGSEMATTPLGISGFNAAKALSTNNNNPQSASRPWDKDRDGFVLGEGAGCLILEEYEHAKLRDATIYAEIVGFGMSADAYHITAPPEEGEGAALSMSNALSDANLTNEKIDYINAHGTSTPAGDIAETLAVKSVFNDHTDKLVISSTKSMTGHLLGAAGAIEAIFSILAIRDNICPPTINLDNPDDGCDLNYSANEATHKNIKYSLSNSFGFGGTNASLIFCDVE

SEQ ID NO: 113847 - protein, 230 aa, Unknown
  Bacterial polypetide isolated from the Sargasso Sea
IQYGKQDIIFAGGGEELDWALSGMFDAMPALSSKYNNTPEKASRPYDANRDGFIIAGGGGALVLEEYEHAKARGAKIYAELTGYGATSDGYDMVAPSGEGAVRCMKMALKTKRNEIDYINTHGTSTPVGDITELNSIKEAFENKIPKISSTKSLTGHPLGAASVHEAIYSLIMMENNFIAASANIENIDDDAKPFPIVTKVEKNATLNSVMSNSFGFGGTNSTLVFEKLN

SEQ ID NO: 113848 - protein, 228 aa, Unknown
  Bacterial polypetide isolated from the Sargasso Sea
ADRVGANPAAAYDLNAACAGFAYGVAQADALIRAGAAHYAVVIGTEKLSDVVDPTDRSISFLLGDGAGAVVVGPSETPGIGPTIWGSDGSKADAVGMNHTLTEFRDGLAPWPTLRQEGPTVFRWAVWEMVKVARQAIEAAGITPDDLAAFVPHQANMRIIDEFAKQLKLPESVVIGRDIETTGNTSAASIPLATHRLLEEHPELSGGLALQIGFGAGLVFGAQVVVLP

SEQ ID NO: 113849 - protein, 263 aa, Unknown
  Bacterial polypetide isolated from the Sargasso Sea
SATLAVPFKIKGTNYTMSSACATSGHCIGNSMELIQMGKQDIVFAGGSEEIHWAMTAMFDAMTALSSKYNDTPEKASRAYDKARDGFVIAGGGGVLVLEEYEHAKARGAKIYAELTGYGATSDGYDMVAPSGEGAVRCMKMAMATSKNKIDYINTHGTSTPVGDITELNAVKEAFGTEIPKISSTKSLSGHPLGAASVHEAIYCLIMMKNNFIAASANINEMDDDAKKFPIIEKVETDVTLNSVMSNSFGFGGTNAALIFEKV

SEQ ID NO: 113850 - protein, 225 aa, Unknown
  Bacterial polypetide isolated from the Sargasso Sea
MIAGGAEAAVCKLGLAGFCAARSLSTSFNDTPNLASRPWDKDRDGFVMGEGSGILVLEELEFAKKRGANIYAEIIGYGMSGDAYHITAPSEDGDGGYRAMKEALKMADISSENVNYINAHGTSTVKGDEIELNAISKLFKHNIDVSSTKSSIGHLLGAAGSVESIFAILSIKNKVLPSTLNLNNPIDNFNINLIPNVPIEKKIDIALSNSFGFGGTNTALLFKSI

SEQ ID NO: 113851 - protein, 221 aa, Unknown
  Bacterial polypetide isolated from the Sargasso Sea
VFAGGSDEVHFAMTAMFDAMTALSSKYNDTPEKASRPYDKTRDGFVISGGGGVLVLEEYEHAKARGAKIYAEISGYGATSDGYDMVAPSGEGAVRCMKMALSTSKKKIDYINTHGTSTPVGDITELKAVGEVFQNSVPKISSTKSLSGHSLGATSAHEAIYSLIMMKNNFISASININEMDEEAKKYPIVTKVEKNATLNSVMSNSFGFGGTNATLIFEKI

SEQ ID NO: 113852 - protein, 168 aa, Unknown
  Bacterial polypetide isolated from the Sargasso Sea
GYIARGAKIYAEIIGFGMSADAHHITSPPNEGEGAALSMQNAISDAGIEVSSIDYINAHGTSTPAGDIAETKAIKSIFKNEVDDLIVSSTKSMTGHLLGAAGAIEAIFSILSIKDNICPPTINLDNPDPECDLNYSAHTATKKIITHSLSNSFGFGGTNATLIFKELD

SEQ ID NO: 113853 - protein, 293 aa, Unknown
  Bacterial polypetide isolated from the Sargasso Sea
MSTEEAIKDASLNDSELSNQKTGLIMGSGGASTEDQIDSADILRAKGLKRIGPYRVTKAMGSTVSACLATSFGIKGINYSISSACATSAHCIGSGMEQIQLGKQDIVIAGGGEAEHWGMTSLFDAMGALSTKYNEEPEKASRAYDKDRDGFVIAGGAGSMILEEKQHAIERGAKIYAQLTGYAATSDGLDMVSPSGEGGERCMQIAWEMSGNTNIDYINAHGTSTPAGDITELNAIKNVFGDKVPCISSTKSLSGHSLGAAGVQEAIYGLIMMDEGFIAGSANIENIDEGAEP

SEQ ID NO: 113854 - protein, 203 aa, Unknown
  Bacterial polypetide isolated from the Sargasso Sea
GAVVVEESKNEEDGEIYSFSNGMSSDKLDILEIPNFGSAMNRFTPNAAADVVWTFEGQEIFKSGIRAMAKSSEEAIEKSGLKKEDVDILIPHQANVRIIEGLERTLKLPNATTLKYGYKYGNTSAASIPTAFVDAIEDGTIKGNDTLVITAVGAGLTWGGAALRLGNRITPLGETDVDLPPYEGTGIDVIRESINYFVPDKAE

SEQ ID NO: 113855 - protein, 265 aa, Unknown
  Bacterial polypetide isolated from the Sargasso Sea
MKAAVSATSRYLPKQIMTNHDLEKMVDTSDDWIQSRTGIVERRVVSEGETTSDMCTHIAYELLKRSETEPDEIDVIIVATVTPDMPTPATASIVQNRIKANNAWGFDLSGACTGFIYAVDTGSRLIESGKYKKVMVIGVDTMSSVLDYTDRNTCVLFGDGGGGIMLEPAENDDNGIIDSILRTDGSGGDYLKIPGGGSLHPASHDTVDQNLHYIRQDGKIVFKYAVKGMADISEEILIKNNINSSLIDLYVPHQANKRIIDSAAE

SEQ ID NO: 113856 - protein, 187 aa, Unknown
  Bacterial polypetide isolated from the Sargasso Sea
ELIIDYTDRNTCVIFGDGGGGVILEPTQRDIGILDSILHTDGSGNKYLTVPGGGSSNPTSRETIDNRMHYLYQDGKTVYKFAVKNMADVSKKILDNNNLNGTDIKLFIPHQANIRIIDAAAKRCGLKDEQVLININKYGNTTAGTIPIALDEAVETNRLDEGDLLLLSTFGAGFTWGSMLIRWGNTQ

SEQ ID NO: 113857 - protein, 286 aa, Unknown
  Bacterial polypetide isolated from the Sargasso Sea
MKRVVITGLGVVSCLGNNQDEVYQSLVNTKSGITFSEEYKEHNLKSHVHGKPNIKLEDYIDRKVIRFMGAGSAYNYVAMSEAVKDSGLEENEVSNISTGMVMGSGGPSIENVILASDKTREKNPKKMGPFIVPRTMASTASATLAVPFKIKGTNYTISSACATSGHCIGNAMELIQLGKQNIIFAGGSDEVHFAMTAMFDAMTALSSKYNDTPEKASRPYDKTRDGFVIAGGGGVLVLEEYEHAKARGAKIYAELTGYGATSDGYDMVAPSGEGAVRCMKMALATS

SEQ ID NO: 113858 - protein, 219 aa, Unknown
  Bacterial polypetide isolated from the Sargasso Sea
GFVYAMQTADQFIKTGMYKNILVIGSETQSGAIDKTTRGRDIGVIFGDGAGAAVLSRSNSKDSNIMSSHLHSEGEHAEELIMESPNMNKWVTEIVSDNDPEDLSYYPYMNGKHVFKNAVTRFEEVINAGLNHNNLKAEDINLLIPHQANLRISQFVQKKFNLRDDQVYNNIMRYGNTTAASIPIALTEAWEEGKVKDGDLIVLAAFGAGFAWGSNVIKW

SEQ ID NO: 113859 - protein, 273 aa, Unknown
  Bacterial polypetide isolated from the Sargasso Sea
AKSGITFSEEYKEYNLKSHVHGKPNIKLEDHVDRKFIRFMGPGSAYNYVSMNEAVKDSGLEEKDVSNVTTGMIMGSGGPSIENVILAADKTREKSPKRMGPFVVPRTMSSTASATLAVPFKIKGVNYTISSACATSGHCIGNAMELIQLGKQKIIFAGGSDEVHFAMTAMFDAMTALSSKYNDTPEKASRPYDKTRDGFVIAGGGGVLVLEEYEHAKSRGAKIYAELTGYGATSDGYDMVAPSGEGTIRCMKMALSTAKKKIDYINTHGTSTP

SEQ ID NO: 113860 - protein, 53 aa, Unknown
  Bacterial polypetide isolated from the Sargasso Sea
MYNSRISGLGMYVPENIVSNDDLSKMMDTSDEWIVERTGIKERRHIKKGDGNS

SEQ ID NO: 113861 - protein, 123 aa, Unknown
  Bacterial polypetide isolated from the Sargasso Sea
MTNLYSKVISTGSYLPQKIYTNHDIEKLVDTSHDWIVERTGIISRHIADENESSVDMAYEASCKALEKSGLKYNDIDLILVATTTPERKFPSTAVLLQNLLNNNKASAFDVNAACTGFIYALD

SEQ ID NO: 113862 - protein, 296 aa, Unknown
  Bacterial polypetide isolated from the Sargasso Sea
FAAHQIVLEKKSPKRMGPFMVTRGMSSTNSACLATPFKIKGVNYSISSACSTSAHCIGNGLEQIQLGKQDIIFAGGGEELDWTLSCLFDAMGAMSSKYNDIPETASRAYDKDRDGFVISGGGGVLVLECYEHAKARGAKIYAEITGYGATSDGHDMVAPSGEGGERSMKLALSNIKDRKVSYINAHGTSTPAGDVVEVEAIRRIFGNEDVPPISSTKSLTGHSLGAAGVHEAIYSILMMSSGFLSASSNIFNLDSDLQINEILMKMRNNVEFDTVISNSFGFGGTNATLAFSKLRD

SEQ ID NO: 113863 - protein, 132 aa, Unknown
  Bacterial polypetide isolated from the Sargasso Sea
MLPRSKILGHGYFLPSKVLKNEDLLAFVDTSDEWIFTRTGIKQRHIVLKDELTSDLAVMASKNALKSANLKSEDIDCIILATTTPDETFPSTATKVQTQLGMKNIPAFDVQAVCSGFIYSLEIADSLIKCNK

SEQ ID NO: 113864 - protein, 299 aa, Unknown
  Bacterial polypetide isolated from the Sargasso Sea
KLALKKEDIYSRGSNDTTYNMGVKASKIAIERAGINPQEIDLILFATLSPDYYFPGSGVLVQEALEIPNCPAMDIRMQCSGFVYAVATADQFIKTGMYKNVLVIGSEYHSGGLDMTSRGRNISVIFGDGAGAVLMTREKSKKKGILNSQLHSEGKYAQELSLIGPNTRRWVPEIMEENNPDDISYFPHMNGQFVFKNAVVRFSEVIMAGLKKAGWRPQEIDILIPHQANLRISQFVQKKFGLVDKQVYNNIQRYGNTTAASIPIALTEAWEEGKVKKGSKVILAAFGSGFTWGSITIQW

SEQ ID NO: 113865 - protein, 252 aa, Unknown
  Bacterial polypetide isolated from the Sargasso Sea
KSPKRMGPFVVPRTMSSTASATLAVPFKIKGVNYTISSACATSGHCIGNAMELIQLGKQKIIFAGGSDEVHFAMTAMFDAMTALSSKYNDTPEKASRPYDKTRDGFVIAGGGGVLVLEEYEHAKARGAKIYAELTGYGATSDGYDMVAPSGEGAVRCMKMALSTAKNKIDYINTHGTSTPVGDITELKAVGETFKDYKPKISSTKSLAGHSLGATSVHEAIYSLIMMKNSFIAASANITDMDDEAKKYPIVT

SEQ ID NO: 113866 - protein, 268 aa, Unknown
  Bacterial polypetide isolated from the Sargasso Sea
LDGKSRNKKNQTFFTDEFTCKIAGYISKDEGDTNYFDISSYLDAREIKRNDRFIQYGIVAAKMAVEDAGIQDLGEEDKLHTGVIVGSGIGGLETIYNGSLTIQNSGPRKLSPFFIPSSLINLLSGQISIKYGFKGPNHSVVTACATGAHSIGDAGEIIKRGAADIMIAGGAEAAVCELGLAGFCAARSLSTSYNDTPELASRPWDKNRDGFVMGEGAGIVVLEELEHARKRGAKIYAELIGYGMSGDAHHITAPAEDGDGGFRAMKQS

SEQ ID NO: 113867 - protein, 176 aa, Unknown
  Bacterial polypetide isolated from the Sargasso Sea
RSTSILFGDGAGAVLIEPSKNEFGWEDEFLRSDGVGADWLKIKAGGSLYPTSKETFEKKWHYITQDGKTVFKSAVSEMANATEQIIIRNKLDRNDIKYLLPHQANKRIIDATAEKINLDKNKVLMNIEEYGNTTAATIPLLMHDYESNFKKGDKIILAAFGAGLTWGAAYLTWAYN

SEQ ID NO: 113868 - protein, 224 aa, Unknown
  Bacterial polypetide isolated from the Sargasso Sea
QKIIFAGGSDEVHFAMTAMFDAMTALSSKYNDTPEKASRPYDKTRDGFVIAGGGGVLVLEEYEHAKARGAKIYAELTGYGATSDGYDMVAPSGEGAVRCMEMALSTAKNKIDYINTHGTSTPVGDITELKAVGETFKDYKPKISSTKSLAGHSLGATSVHEAIYSLIMMKNSFIAASANITDMDDEAKKYPIVTKVEKGVNLNSVMSNSFGFGGTNATLVFEKV

SEQ ID NO: 113869 - protein, 249 aa, Unknown
  Bacterial polypetide isolated from the Sargasso Sea
KSGKSAEDIDLILVATSTPDFLVVSTAALVQDKIGAKNAWGYDIVAACTGFVYAMETGAKFIESGSYNNVIVIGADTMSSIIDYTDRNTCVIFGDGGGGVLLEPTQEEIGIIDSILHIDGSGHKYLTVPAGGSANPASKETLDNKMHYVYQDGKTVYKFAVKNMANVSKTILDNNKLQGSDVKLFIPHQANRRIIDAAAKRCGLKDDQVLVNINKYGNTTAGTIPIALDEAVETGRLNKNDLLLLAAFG

SEQ ID NO: 113870 - protein, 177 aa, Unknown
  Bacterial polypetide isolated from the Sargasso Sea
FVISGGGGVLVLEEYEHAKARGAKIYAELTGYGATSDGYDMVAPSGEGAVRCMQMALKTSKNKVDYINTHGTSTPVGDITELKAVGEVFKDNVPKISSTKSLSGHSLGATSVHEAVYSLIMMKNNFISASINITDMDDEAKKYPIVTKVEKDVTLNSIMSNSFGFGGTNATLVFEKV

SEQ ID NO: 113871 - protein, 280 aa, Unknown
  Bacterial polypetide isolated from the Sargasso Sea
NLLNGKSGIKKINNFNTDEFPCKIAGYISNNENSDNYFDITSQLESREIKRNDRFIQYGIVAAKMAVEDAGIQNLSEQDKLNTGVIAGSGIGGLETIYNGALTINNSGPRKLSPFFIPSSLINLLSGQISIKYGFKGPNHSVVTACATGAHSIGDAGEIIKRGAADIMIAGGAEAAVCELGLAGFCAARSLSTSFNETPELASRPWDKNRDGFVMGEGAGIVVLEELDHAKKRGAKIYAELVGYGMSGDAHHITAPSEDGDGGFRAMKQSIDMANMPQRI

SEQ ID NO: 113872 - protein, 197 aa, Unknown
  Bacterial polypetide isolated from the Sargasso Sea
MRRAVITGIGVVSSIGNNKEEVLESLKTGKSGIAFNQEFADYNLRSNVSGKIDINVKDHVDRKAMRFMGDAAAYSYISMTQAIEDSGLSEEQVSNERTGIIVGSGGGSSKWQVEAADILREKGVKRVGPYMVPRTMASTTSACLATPFKIKGVNYSISSACATSAHCIGNAVEQNSLGKQDVVFAGGGEELHWTLAM

SEQ ID NO: 113873 - protein, 239 aa, Unknown
  Bacterial polypetide isolated from the Sargasso Sea
GHCIGNSVELIQTGKQKIMFAGGSEEIHWAMTAMFDAMTALSSKYNDTPEKASRAYDKTRDGFVIAGGAGVLVLEEYEHAKARGAKIYAEITGYGATSDGYDMVAPSGEGAVRCMQMALKTSRNKLDYINTHGTSTPVGDITELKAIGETFKEKIPKISSTKSLSGHPLGAASVHEAIYSLIMMKNNFIAGSANINEMDEEAKKFPIVGKTEKDVNLNAVMSNSFGFGGTNATLIFEKV

SEQ ID NO: 113874 - protein, 309 aa, Unknown
  Bacterial polypetide isolated from the Sargasso Sea
HVDRKFIRFMGPGSAYNYISMAEAVKDSGLEEKDVSNISTGMIMGSGGPSIENVILAADKTREKSPKRMGPFVVPRTMSSTASATLAVPFKIKGVNYTISSACATSGHCIGNAMELIQLGKQKIIFAGGSDEVHFAMTAMFDAMTALSSKYNDTPEKASRPYDRTRDGFVISGGGGVLVLEEYEHAKSRGAKIYAEITGYGATSDGYDMVAPSGEGAVRCMKMALSTSKNKIDYINTHGTSTPVGDITELKAVGEVFKDNVPKISSTKSLSGHSLGATSVHEAVYSLIMMKKNFISASININDMDDEAK

SEQ ID NO: 113875 - protein, 265 aa, Unknown
  Bacterial polypetide isolated from the Sargasso Sea
TASATLAVPFKIKGVNYTISSACATSGHCIGNAMELIQLGKQKIIFAGGSDEVHFAMTAMFDAMTALSSKYNDTPEKASRPYDKTRDGFVISGGGGVLVLEEYEHAKSRGAKIYAELTGYGATSDGYDMVAPSGEGAVRCMKMALSTAKNKIDYINTHGTSTPVGDITELKAVGEVFNDYKPKISSTKSLAGHSLGATSVHEAIYSLIMMKNNFIAASANINDMDEEAKKYPIVTTVEKEVNLNSIMSNSFGFGGTNATLVFEKV

SEQ ID NO: 113876 - protein, 219 aa, Unknown
  Bacterial polypetide isolated from the Sargasso Sea
MKSKIISIGSYTPNNIVTNQDLEKRVDTTNEWIVSRTGIKERPIADDSQATSDLAYEAAKIAIERAKIDKNEIDLIIVGTCTPDVATPNVGTLIQKRLDLKNFPAFSIEAACSGFIYALNIADKFIKSGDSKCALVVGAETLSRITNWDDRNTCVLFADGAGAAILKSSDDTGIIFSELGANGEYAELLHVPYGTSRKPERPKEDDYTLKMSGDEVFKV

SEQ ID NO: 113877 - protein, 85 aa, Unknown
  Bacterial polypetide isolated from the Sargasso Sea
IDTNKIAYLVPHQANKRIIDAVAKRINIPSEKVMNNIEKYGNTTAATLPLLLNDYEKKLSPGDKLIFAAFGGGFTWGAAYLTWSY

SEQ ID NO: 113878 - protein, 292 aa, Unknown
  Bacterial polypetide isolated from the Sargasso Sea
VILAADKTRAKTPKLMGPFIVPRTMASTASATLAVPFKIKGTNYTMSSACATSGHCIGNSMELIQMGKQDIVFAGGSEEIHWAMTAMFDAMTALSSKYNDKPETASRAYDKTRDGFVIAGGAGVLVLEEYEHAKARGAKIYAELTGYGATSDGYDMVAPSGEGAVRCMKMAMATAKNKIDYINTHGTSTPVGDITELNAIKETFGEDIPKISSTKSLSGHPLGAASVHEAIYCLIMMKNNFITGSANITDMDDDAKKYPIVAKTETGATLDTVMSNSFGFGGTNAAFIFEKV

SEQ ID NO: 113879 - protein, 181 aa, Unknown
  Bacterial polypetide isolated from the Sargasso Sea
TLSRIQNWDDRNTCVLFADGAGAAILKPSDDRGIIFSELGANGEYADLLHVPYGTSRKPEKPNADDYKLKMSGNEVFKVAVKTLEEIAIDALVKANLESRDIDWFIPHQANMRIIQAVAKRLVLPEEKVILSMDIHGNTSAASIPLAFDRAIQDGRIKEGDTILMQSFGAGFTWGSVIMDL

SEQ ID NO: 113880 - protein, 153 aa, Unknown
  Bacterial polypetide isolated from the Sargasso Sea
MKSKIISIGSYTPNNIVTNKDLEKKVDTTDEWIVSRTGIKERPIADDSQATSDLAFEAAKIAIERADIDKNEIDLIIVGTCTPDVATPNVGTIVQKRLELKNFPAFSIEAACSGFIYALNIADKFIKSGESKCALVIGAETLSRITNWDDRNT

SEQ ID NO: 113881 - protein, 295 aa, Unknown
  Bacterial polypetide isolated from the Sargasso Sea
FRRQIDSADILRTKGLKRIGPYRVTKAMGSTVSACLATSFGIKGINYSISSACATSAHCIGSGMEQIQLGKQDIVIAGGGEAEHWGMTSLFDAMGALSTKYNEEPEKASRAYDKDRDGFVIAGGAGSMILEEKQHAIQRGAKIYAQLTGYAATSDGADMVSPSGEGGERCMQIAWEMSGNKNIDYINAHGTSTPAGDITELSAIKNVFGDKVPWISSTKSLSGHSLGAAGVQEAIYGLIMMDEGFIAGSANIENLDEGAEPFPIVRENFSTELQSFLSNSFGFGGTNASLIFEKI

SEQ ID NO: 113882 - protein, 305 aa, Unknown
  Bacterial polypetide isolated from the Sargasso Sea
DLSNNRTGLIMGSGGASSEDQIDSADILRSKGLKRIGPYRVTKAMGSTVSACLATSFGIKGINFSISSACATSAHCIGSGMEQIQLGKQDIVIAGGGEAEHWGMTSLFDAMGALSTKYNDHPQSASRAYDKDRDGFVIAGGAGTVILEEKQHAINRGAEIIAQLTGYAATSDGEDMVSPSGEGGERCMQIALEMSGNKTVDYINAHGTSTPAGDITELNAIKSVFGDSIPWISSTKSLSGHSLGAAGVQEAIYGLIMMKEGFIVGSANIENIDEGAESFPIVRENFSTELKSFLSNSFGFGGTNA

SEQ ID NO: 113883 - protein, 304 aa, Unknown
  Bacterial polypetide isolated from the Sargasso Sea
MKRVVVTGIGVVSCLGNNQAEVLESLVNAKSGITFSEEYKEYNLKSHVHGKPNIKLEDHVDRKFIRFMGPGSAYNYVSMNEAVKDSGLEEKDVSNVTTGMIMGSGGPSIENVILAADKTREKSPKRMGPFVVPRTMSSTASATLAVPFKIKGVNYTISSACATSGHCIGNAMELIQLGKQKIIFAGGSDEVHFAMTAMFDAMTALSSKYNDTPEKASRPYDKTRDGFVISGGGGVLVLEEYEHAKSRGAKIYAELTGYGATSDGYDMVAPSGEGAVRCMKMALSTAKNKIDYINTHGTSTPVEI

SEQ ID NO: 113884 - protein, 223 aa, Unknown
  Bacterial polypetide isolated from the Sargasso Sea
IIFAGGSDEVHFAMTAMFDAMTALSSKYNDTPEKASRPYDKTRDGFVISGGGGVLVLEEYEHAKSRGAKIYAEVTGYGATSDGYDMVAPSGEGAVRCMKMAMSTAKNKIDYINTHGTSTPVGDITELKAVGKVFSDYKPKISSTKSLAGHSLGATSVHEAVYSLIMMKNNFIAASANINDMDEEAKNYPIVTKVEKNVNLNSVMSNSFGFGGTNATLVFEKVK

SEQ ID NO: 113885 - protein, 285 aa, Unknown
  Bacterial polypetide isolated from the Sargasso Sea
KRVVITGLGIVSCLGNNQDEVFNSLINSKSGITFCEEYKAHNLKSHVHGKPNIKLNEIIDRKIIRFMGSGSAYNYVAMDEAVKDSGLEEKEVSNIFTGMVMGSGGPSIENVILAADKTREKNPKKMGPFVVPRTMASTASATLAVPFKIKGINYTISSACATSGHCIGNATELIQLGKQKIVFAGGSDEVHFAMTAMFDAMTALSSKYNETPEKASRPYDKNRDGFVISGGGGVLVLEEYEHAKARGAKIYAEVTGYGATSDGYDMVAPSGEGAVRCMNLALSTS

SEQ ID NO: 113886 - protein, 292 aa, Unknown
  Bacterial polypetide isolated from the Sargasso Sea
ETSDDWISERTGIKNRRWVNDKKLTTSLMGTYAAEKAIADAGIDKNDIDFIIFSTLSPDYYFPGSGVLLQRNLGIKEIGALDVRNQCSGFIYGLSIADQYIKSGMYKNILLVGSEIHSGGLDKSTKGRSVSVIFGDGAGAAVISSTESENGILSTHLHSEGKYAEELAVIKPATTHWIDKIKSDQTDKSYWPYMNGNFVFKNAVVRFEQVIKEGLEYSNLNIDDISLLIPHQANLRISQFIQKKLKLSDSQVFNNIMKYGNTTAASIPIALTEAYQSNLIKKNDIVVLAAFG

SEQ ID NO: 113887 - protein, 198 aa, Unknown
  Bacterial polypetide isolated from the Sargasso Sea
IFKYNDTPEKASRPYDKTRDGFVIAGGGGVLVLEEYEHAKARGAKIYAELTGYGATSDGYDMVAPSGEGAVRCMKMALSTAKNKIDYINTHGTSTPVGDITELKAVGETFTDYKPKISSTKSLAGHSLGATSVHEAIYSLIMMKNSFIAASANITDMDDEAKKYPIVTKVEKDVNLNSIMSNSFGFGGTNATLVFEKV

SEQ ID NO: 113888 - protein, 309 aa, Unknown
  Bacterial polypetide isolated from the Sargasso Sea
AGLVPEFDLEQYMSGKEARKMDPFIQYGMVSAIQAVEQSGLMDSDFDPTRVGVSIGSGIGGLTLIENTTLLLSERGPRKVSPFFVPGSIINMIAGNLAIKYGFQGPNIAITTACTTSTHCIGFGARMIAYGDADVVIAGGAEKASTQLGIAGFCAARALSTRNDAPEAASRPWDKDRDGFVLADGAATMVLEDYESAKARGANIIAELVGFGMSDDAHHMTAPAEDGRGARSAMVNALKDAGLAVDEVSYVNAHGTSTPLGDVAESQAIEALMGTYAPHVAVSSTKSMTGHALGAAGALEACFCVLSIR

SEQ ID NO: 113889 - protein, 183 aa, Unknown
  Bacterial polypetide isolated from the Sargasso Sea
DKTRDGFVIAGGGGVLVLEEYEHAKARGAKIYAELTGYGATSDGYDMVAPSGEGAVRCMKMAMATSKNKIDYINTHGTSTPVGDITELNAVQKAFGDKIPKISSTKSLSGHPLGAASVHEAIYCLIMMKNNFIAGSANINEMDEEAKKFPIVAKTETGVNLNTVMSNSFGFGGTNAALIFEKV

SEQ ID NO: 113890 - protein, 280 aa, Unknown
  Bacterial polypetide isolated from the Sargasso Sea
RVGPFAVPKAMSSTNSATLATPFGIKGVNYSISSACATSSHCIGNAYELIQYGKQDTMFAGGGEELNWALSVLFDAMGAMSSKYNSTPETSSRAYDKDRDGFVIAGGAGVLVLEEMGKAKARGAKIYAEIVGYGATSDGHDMVQPSGEGAVRCMKMSMENLGCEVDYINPHATSTPIGDEKEVEAIRETFKDKIPAISATKSLTGHSLGAAGVQEAIYSILMMHNGFIAKSANIENIDPKFEDLPINKDTIENAEIGCLLSNSFGFGGTNASLVFKNPKV

SEQ ID NO: 113891 - protein, 93 aa, Unknown
  Bacterial polypetide isolated from the Sargasso Sea
KTVLGEKASEVVISSTKSMTGHLLGGGGAFESMASILSIKHNKVPPTINLNDPDEECDLNYTPNDAVDLEINTAMSNSFGFGGHNAVLVFKKQ

SEQ ID NO: 113892 - protein, 284 aa, Unknown
  Bacterial polypetide isolated from the Sargasso Sea
PYRVTRTMGSTVSAVLATAFKLQGLSYSVSSACSTGAHSIGMGMEQIQLGKHDVMFCGSGELENWGSTIMFDGMGALSSKYNDDPTHASRAFDKDRDGFVIAAGGGVVIVEELEHAKARGAKIYAELVGYSATSDGYDMVAPSGEGGKRAMREAIAMANRLGGEKKVDYINTHGTSTPVGDVAELGAIKDLFTSEFDYIPNIGSTKSLSGHALSVAGVHEAIYSLLMMDRGFLAESANIFNIVDEAEGLPILTERKEGPVSRVMSNSFGFGGTNACLVFDKYEG

SEQ ID NO: 113893 - protein, 201 aa, Unknown
  Bacterial polypetide isolated from the Sargasso Sea
TALSSKYNDTPEKASRPYDKTRDVFVIAGGGGVLVLEEYEHAKARGAKIYAELTGYGATSDGYDMVAPSGEGAVRCMKMALATSKNKIDYINTHGTSTPVGDITELKAVGEAFPDYKPKISSTKSLSGHSLGATSVHEAIYSLIMIKNNFISASANISEMDDEARNYPIVTQVEKNVNLNAIMSNSFGFGGTNATLVFEKV

SEQ ID NO: 113894 - protein, 188 aa, Unknown
  Bacterial polypetide isolated from the Sargasso Sea
ASRPYDKTRDVFVIAGGGGVLVLEEYEHAKARGAKIYAELTGYGATSDGYDMVAPSGEGAVRCMKMALATSKNKIDYINTHGTSTPVGDITELKAVGEAFPDYKPKISSTKSLSGHSLGATSVHEAIYSLIMMKNNFISASANISEMDDEAKNYPIVTQVEKEVNLNAIMSNSFGFGGTNATLVFEKV

SEQ ID NO: 113895 - protein, 209 aa, Unknown
  Bacterial polypetide isolated from the Sargasso Sea
MTAMFDAMTALSSKYNDTPDKASRPYDKTRDGFVISGGGGVLVLEEYEHAKARGAKIYAELTGYGATSDGYDMVAPSGEGAVRCMQMALNTSKNKIDYLNTHGTSTPVGDITELKAVGEVFKDNVPKISSTKSLSGHSLGATSAHEAIYSLIMMKNNFISASINITDMDDEAKKYPIVTKVQKDVTLNSIMSNSFGFGGTNATLVFEKV

SEQ ID NO: 113896 - protein, 236 aa, Unknown
  Bacterial polypetide isolated from the Sargasso Sea
MIKRGAADIMIAGGAEAAVCQLGVAGFCAARSLSTGFNDKPEEASRPWDKDRDGFVMGEGSGILVLEEYEHAKKRNAKIYAEIIGYGMSGDAHHITSPSEDGDGGYRAMIESIKMAKINAVDIDYINAHGTSTLLGDDIELNAIMKFTNQNKKLKVSSTKSSIGHLLGAAGSVEAIFSILAINKNIIPATLNLENPSHSFNVDLVPKNSIDHKVNIALSNSFGFGGTNTALLFRTI

SEQ ID NO: 113897 - protein, 264 aa, Unknown
  Bacterial polypetide isolated from the Sargasso Sea
MTTPVGNNVSETWKNILEGKSGISLIEHFDTSDFSVRIGGSIKNLSLDKYITKKEQRRMDPFIHYGITAGVQAIEDSGLDVSHNTDRIGVAIGSGIGGLPGIEKGTELFHSGGPRKISPFYVPSNIINMISGHLSIMYGLEGPNFSIVTACTTGTHNIGDAARLIEYGDADVMIAGGAEMATSKTGLAGFAAARALSTRNEEPELASRPWDKDRDGFVLSDGAGAMVLEEYEYAKKRGAKIYAELIGYGMSADAFHITAPSENG

SEQ ID NO: 113898 - protein, 322 aa, Unknown
  Bacterial polypetide isolated from the Sargasso Sea
YISMAEAVKDSGLEDKDISNMSTGMIMGSGGPSIENVILAADKTRAKSPKRMGPFIVPRTMSSTASATLAVPFKIKGVNYTISSACATSGHCIGNAMELIQLGKQKIIFAGGSDEVHFAMTAMFDAMTALSSKYNDTPEKASRPYDKTRDGFVIAGGGGVLVLEEYEHAKARGAKIYAELTGYGATSDGYDMVAPSGEGAVRCMKMALSTAKNKIDYINTHGTSTPVGDITELKAVGETFKDYKPKISSTKSLAGHSLGATSVHEAIYSLIMMKNSFVAASANITDMDDEAKKYPIVTKVEKGVNLNSVMSNSFGFGGTNAT

SEQ ID NO: 113899 - protein, 254 aa, Unknown
  Bacterial polypetide isolated from the Sargasso Sea
SKETNYTMSSACATSGHCIGNSMELIQMGKQDIVFAGGSEEIHWAMTAMFDAMTALSSKYNDTPLSASRAYDKTRDGFVIAGGAGVLVLEEYEHAKARGAKIYAELTGYGATSDGYDMVAPSGEGAVRCMKMAMATTKNKIDYINTHGTSTPVGDITELKAIKETFGEEIPKISSTKSLSGHPLGAASVHEAIYCLIMMKNNFIAGSANINEMDEEAKKFPIVAKTETGATLNTVMSNSFGFGGTNAALIFEKV

SEQ ID NO: 113900 - protein, 267 aa, Unknown
  Bacterial polypetide isolated from the Sargasso Sea
ASLRFGFKGPNISIASACSSASHSIGYSFRSISYGDVDMMLTGGAEMATTPLGVSGFNAAKALSTNNENPQSASRPWDKKRDGFVLGEGAGCLMLEEYEHAKARCANIYAEIIGFGMSADAFHITAPPEEGKGAALAMSNALLDANLNHKKIDYINAHGTSTPAGDIAETLAIKSVFKDYAQNLIVSSTKSMTGHLLGAAGAIEAIFSILAIRDNICPPTINLEDPDEGCDLNYSANQATERNISHSLTNSFGFGGTNASLIFCDVK

SEQ ID NO: 113901 - protein, 247 aa, Unknown
  Bacterial polypetide isolated from the Sargasso Sea
CSPSAHCIGNASELIQYGKQDIIFAGGGEELDWTLSCLFDAMNAMSSKYNDKPEIASRAFDSDRDGFVIAGGGGVVVLEELEHAKARGAKIYAEILGYGATSDGFDMVAPSGEGAIRAMKLAVSTCKSRTVSYINAHGTSTPAGDVTEVQAVRKVFLGKKFPLISSTKSLSGHSLGAAGVHETIYSLLMLENNFIAGSANIFNLDPELNSNEIATTIIADTKLDTILSNSFGFGGTNASLALGKYLD

SEQ ID NO: 113902 - protein, 160 aa, Unknown
  Bacterial polypetide isolated from the Sargasso Sea
MKSKITSIGSYTPKNIVTNKDLEKRVDTTDEWIVSRTGIKERPIADDSQATSDLAFEAAKIAIERADIDKNEIDLIIVGTCTPDVATPNVGTIVQKRLELKNFPAFSIEAACSGFIYALNIADKFIKSGESKCALVIGAETLSRITNWDDRNTCVLFADG

SEQ ID NO: 113903 - protein, 111 aa, Unknown
  Bacterial polypetide isolated from the Sargasso Sea
MDGREVWNFAVKAFPQAVRGVLERTSKGLSEVDLIVPHQANLRIIEAGMKELGLPMDKTLTNVQKYGNTAGASVPIALKEAVDEGLVGTGDLLVTAAFGGGLAWGANAIVW

SEQ ID NO: 113904 - protein, 273 aa, Unknown
  Bacterial polypetide isolated from the Sargasso Sea
MFKSKIIGMGYSVPENIITNHDLSKIMDTSDDWIQSRSGIKERRWATDNVTTSDLAYKACKQTIENSKINPIDIDMIIVGTLSSDYFFPGVSAQLQEKLNLKNVGAFDIKAACSAFIYSISIADQFIRTGAAKTILVVGAETQTKLIEKSTEGRDVAVLFGDGAGAAILTRSDSKSEILSTHLHSDGKHLKDLWMEAPGTNKGSWIDDPINLSKFTPKMNGREVFRNAVTRFPEVINEALFANDLDIDDVKYIVPHPANYRISESIAKKLNVK

SEQ ID NO: 113905 - protein, 197 aa, Unknown
  Bacterial polypetide isolated from the Sargasso Sea
KNVIVIGSDTMSSIIDYTDRNTCVIFGDGGGGVILEPTQRDIGILDSILHTDGSGNKYLTVPGGGSFNPTSRETIDNRMHYLYQDGKTVYKFAVKNMADVSKKILDNNNLNGTDIKLFIPHQANIRIIDAAAKRCGLKDEQVLININKYGNTTAGTIPIALDEAVETNRLDEGDLLLLSTFGAGFTWGSMLIRWGNT

SEQ ID NO: 113906 - protein, 260 aa, Unknown
  Bacterial polypetide isolated from the Sargasso Sea
SLGNNISEVTNSLRNLKSGISENIINKELGLRSHVSGSILNLEPKDLIDRKLYRFMGDAAAYAYLSTEEAIKDASLNVSELSNEKTGLIMGSGGASTEDQIDSADILRSKGLKRIGPYRVTKAMGSTVSACLATSFGIKGINYSISSACATSAHCIGSGMEQIQLGKQDIVIAGGGEAEHWGMTSLFDAMGALSTKYNEEPEKASRAYDKDRDGFVIAGGAGSMILEEKQHAIERGAKIYAQLTGYAATSDGLDMVSPSG

SEQ ID NO: 113907 - protein, 125 aa, Unknown
  Bacterial polypetide isolated from the Sargasso Sea
VTVEGVAAGEQYMQMDGRAVFKWAIRLVEENVQQVVDHSGVPIESIDLFILHQANLRIIDGIRSSLGLKEDKFLVNLDRYGNTSSGSIPLALDEAWRAGRIGPGSTVLICGFGGGLAWGSGVWRL

SEQ ID NO: 113908 - protein, 318 aa, Unknown
  Bacterial polypetide isolated from the Sargasso Sea
MRRVVVTGLGLLSSIGENLDKTWSSLINCKSGIKNIVSFDTSDLPCKIGGFISHNENDEFFLDRLKFLEQKEINRNDRFIQYGLIAAQMAIEDAGLINLSEEDKLKIGVTIGSGIGGLETIYNGSITLNEKGPRKISPFFIPSSLINLLSGQVSIKNGFKGPNHSVVTACATGAHSIGDASEIIKRGAAQIMVAGGAEAAICKLGVAGFCSARSLSTSYNDHPTQASRPWDKDRDGFVMGEGSGILVLEEYENAKKRNAKIYAEIIGYGMSGDAHHITSPSEDGDGGYRAMSNALKMASMDVDKIDYINAHGTSTQLG

SEQ ID NO: 113909 - protein, 293 aa, Unknown
  Bacterial polypetide isolated from the Sargasso Sea
NVILAADKTRAKTPKLMGPFVVPRTMASTASATLAVPFKIKGTNYTMSSACATSGHCIGNSMELIQMGKQDIVFAGGSEEIHWAMTAMFDAMTALSSKYNDTPETASRAYDKTRDGFVIAGGGGVLVLEEYEHAKARGAKIYAELTGYGATSDGYDMVAPSGEGAVRCMQMAIATSKNKIDYINTHGTSTPVGDITELNAVKSTFGENIPKISSTKSLSGHPLGAASVHEAIYCLIMMKNNFIAGSANINEMDEEAKKFPIVAKTETETTLNTVMSNSFGFGGTKCCSNFEKV

SEQ ID NO: 113910 - protein, 184 aa, Unknown
  Bacterial polypetide isolated from the Sargasso Sea
DKTRDGFVISGGGGVLVLEEYEHAKSRGAKIYAELTGYGATSDGYDMVAPSGEGAVRCMKMALSTAKNKIDYINTHGTSTPVGDITELKAVGEVFNDYKPKISSTKSLAGHSLGATSVHEAVYSLIMMKNNFIAASANISDMDDEAKKYPIVTKVEKNVNLNSVMSNSFGFGGTNATLVFEKVK

SEQ ID NO: 113911 - protein, 245 aa, Unknown
  Bacterial polypetide isolated from the Sargasso Sea
SACATSGHCIGNSMELIQMGKQDIVFAGGSEELHWAMTAMFDAMTALSSKYNDTPQSASRAYDKTRDGFVIAGGGGVLVLEEYEHAKARGAKIYAELTGYGATSDGYDMVAPSGEGAVRCMKMAMAMTKNKIDYINTHGTSTPVGDITELNAVKETFGTDIPKISSTKSLSGHPLGAASVHEAIYCLIMMKNNFIAGSANISEIDEEAKKFPIVAKTETGATLNTVMSNSFGFGGTNAALIFEKV

SEQ ID NO: 113912 - protein, 277 aa, Unknown
  Bacterial polypetide isolated from the Sargasso Sea
MGPFVVPRTMASTASATLAVPFKIKGTNYTMSSACATSGHCIGNSMELIQMGKQDIVFAGGSEEIHWAMTAMFDAMTALSSKYNDTPETASRAYDKTRDGFVIAGGGGVLVLEEYEHAKARGAKIYAELTGYGATSDGYDMVAPSGEGAARCMKMAMSTTKNKIDYINTHGTSTPVGDITELNAIKDTFGDQIPKISSTKSLSGHPLGAASVHEAIYCLIMMKNNFIAGSANINEMDEEAKKFPIVSKTESGITLNTVMSNSFGFGGTNAALIFEKV

SEQ ID NO: 113913 - protein, 205 aa, Unknown
  Bacterial polypetide isolated from the Sargasso Sea
DAMTALSSKYNDTPEKASRPYDKTRDGFVISGGGGVLVLEEYEHAKSRGAKIYAELTGYGATSDGYDMVAPSGEGAVRCMKMALSTAKNKIDYINTHGTSTPVGDITELKAVGEVFSDYKPKISSTKSLAGHSLGATSVHEAVYSLIMMKNNFIAASANINDMDDEAKKYPIVTKVEKNINLNSVMSNSFGFGGTNATLVFEKVK

SEQ ID NO: 113914 - protein, 267 aa, Unknown
  Bacterial polypetide isolated from the Sargasso Sea
ASTASATLAVPFKIKGTNYTMSSACATSGHCIGNSMELIQMGKQDVVFAGGSEEIHWAMTAMFDAMTALSSKYNNTPGTASRAYDKTRDGFVIAGGGGVLVLEEYEHAKARGAKIYAELTGYGATSDGYDMVAPSGEGAVRCMKMAMATSKNKIDYINTHGTSTPVGDITELNAIKEIFGVDIPKISSTKSLSGHPLGAASVHEAIYCLIMMKNNFIAGSANINEMDEGAKKFPIVAKTETGATLNTVMSNSFGFGGTNAALIFEKV

SEQ ID NO: 113915 - protein, 310 aa, Unknown
  Bacterial polypetide isolated from the Sargasso Sea
ITFSEEYKEYNLKSNIHGKPNIKLEDYVDRKFIRFMGPGSAYNYISMAEAVKDSGLEEKDVSCDSTGMIMGSGGPSIQNVILAADKTREKNPKKMGPFVVPRTMSSTASATLAVPFKIKGVNYTISSACATSGHCIGNAMELIQLGKQNIIFAGGSDEVHFAMSAMFDAMTALSSKYNDTPEKASRPYDKTRDGFVISGGGGVLVLEEYEHAKARGAKIYAELTGYGATSDGYDMVAPSGEGAVRCMKMALSTSKNKIDYLNTHGTSTPVGDITELKAVGEVFKENVPKISSTKSLSGHSLGATSVHEAS

SEQ ID NO: 113916 - protein, 220 aa, Unknown
  Bacterial polypetide isolated from the Sargasso Sea
VILALLIKQGEKNPKKMGPFVFPRTMSSTASATLAVPFKIKGVNYTISSACATSGHCIGNAMELIQLGKQKIMFAGGSDEVHYAMTAMFDAMTALSSKYNDTPEKASRPYDKTRDGFVISGGGGVLVLEEYEHAKARGAKIYAELTGYGATSDGYDMVAPSGEGAIRCMKLALSTSKNKIDYLNTHGTSTPVGDITELKAVGEVFKDNVPKISSTKSLSG

SEQ ID NO: 113917 - protein, 265 aa, Unknown
  Bacterial polypetide isolated from the Sargasso Sea
AADKTREKSPKRMGPFVVPRTMSSTASATLAVPFKIKGVNYTISSACATSGHCIGNAMELIQLGKQKIIFAGGSDEVHFAMTAMFDAMTALSSKYNDTPEKASRPYDKTRDGFVISGGGGVLVLEEYEHAKSRGAKIYAEITGYGATSDGYDMVAPSGEGAVRCMKMALSTSKNKIDYINTHGTSTPVGDITELKAVGEVFKDNVPKISSTKSLSGHSLGATSVHEAVYSLIMMKNNFISASININDMDDKAKKFPIITKVEKKC

SEQ ID NO: 113918 - protein, 199 aa, Unknown
  Bacterial polypetide isolated from the Sargasso Sea
SKYNDKPATSSRAYDKDRDGFVIAGGAGVLVLEEMEKAKARGAKIYAEIVGYGATSDGHDMVQPSGEGAVRCMKMSMENIGCEIDYINPHATSTPIGDEKEVEAIRETFRGKIPNISATKSLTGHSLGAAGVQEAIYSILMMQNDFIAKSANIENIDPKFEDLPINKERIDNANIGCLLSNSFGFGGTNASLVFKNPNL

SEQ ID NO: 113919 - protein, 140 aa, Unknown
  Bacterial polypetide isolated from the Sargasso Sea
NGEYAELLHVPYGTSRKPERPKKDDYTLKMSGNEVFKVAVKTLEEIAIDALKKSNLESKDIDWFIPHQANMRIIQAVAKRLELPEEKVILSMDIHGNTSAASIPLAFDRAVQDGRIKKGDTILMQSFGAGFTWGSVILDL

SEQ ID NO: 113920 - protein, 171 aa, Unknown
  Bacterial polypetide isolated from the Sargasso Sea
EYEHAIARGAKIYAEIIGFGMSADAHHITSPPNEGEGAALSMQNAISDADIEVSMIDYVNAHGTSTPAGDIAETKAIKSIFKYEIDDLIVSSTKSMTGHLLGAAGAIEAIFSILSIQDNICPPTINLDNPDPECDLNYSAHTATKKIITHSLSNSFGFGGTNATLIFKELD

SEQ ID NO: 113921 - protein, 196 aa, Unknown
  Bacterial polypetide isolated from the Sargasso Sea
KYNDTPETASRAYDKTRDGFVIAGGGGVLVLEEYEHAKARGAKIYAELTGYGATSDGYDMVAPSGEGAVRCMKMAMATSKNKIDYINTHGTSTPVGDITELNAVKEAFGSEIPKISSTKSLSGHPLGAASVHEAIYCLIMMKNNFIAGSANINEMDDEAKKFPIIAKTETGATLNTVMSNSFGFGGTNAALIFEKI

SEQ ID NO: 113922 - protein, 283 aa, Unknown
  Bacterial polypetide isolated from the Sargasso Sea
PFFVPRNIINMVAGHLSIKYGITGVNYAIVSACSTGAHCIGQAARTIERGEQDVIIAGGAEFSTCPMGIGGFASAKALSTRNDDPKAASRPWDADRDGFVLSDGAGVLLLEEMEIAKKRGAKIYAEITGFGMNSDAYHMTAPSPSGKGAAACMKMALEDAKVNKEDVQYINAHGTSTPAGDKAETDAVKALFGDHSKKLAMSSTKSMVGHMLGAAGGAEAVYTVMAVRDQIAPPTINYTTPDAECDLDYVPNIARDLKIDVGITNSFGFGGTNGTLVFSRFKD

SEQ ID NO: 113923 - protein, 166 aa, Unknown
  Bacterial polypetide isolated from the Sargasso Sea
MKSKIISIGSYTPNNIVTNQDLEKRVDTTDEWIVSRTGIKERPIADDSQATSDLAYEAAKIAIERAKIDKNEIDLIIVGTCTPDVATPNVGTLIQKRLDLKNFPAFSIEAACSGFIYALNIADKFIKSGDSKCALVVGAETLSRITNWDDRNTCVLFADGARCCHL

SEQ ID NO: 113924 - protein, 233 aa, Unknown
  Bacterial polypetide isolated from the Sargasso Sea
KSTEKVLKKTNTSIEEIDFVIFATSSPDYYVPGSGSVFQNKMGLNNIGVLDIRQGCAGFVYALSVADQYIKSGTYKNILVIGAEVQTTQLDYDTEGRGTAIIFGDGAASALVNPTSVKGKGILSSHLHSDGKYIDELGTIAPSPKIKGLINKKNIDDREHHIFMNGREVFKHAVKRFPEVILEGLSHNNLNIDDVSLVIPHQANYRITKAVQQNLKIEEEKVFSNIHKYGNTT

SEQ ID NO: 113925 - protein, 268 aa, Unknown
  Bacterial polypetide isolated from the Sargasso Sea
TNSANMSTAFGMRGLSYSISSACATSAHCIGNGAELIQWGKQDVVFAGGGEEVDWTLSALFDAMGALSSKYNDMPEKSSRPFDVNRDGFVIAGGAGVLVLEELERAKARGAKIYAELVGYGATSDGVDMVAPSGEGGQRCMRMATTGLGNTTVDYINAHGTSTPVGDMIELNSIQEVFGAHRPKISSTKSLTGHSQGATGVHEAVYSLIMLDNDFIAASANIEEMDPGVGDANVVTERVDDAGLNCVLSNSFGFGGTNASLAFSRYDQ

SEQ ID NO: 113926 - protein, 224 aa, Unknown
  Bacterial polypetide isolated from the Sargasso Sea
QNIIFAGGSDEVHFAMTAMFDAMTALSSKYNDTPEKASRPYDKTRDGFVISGGGGVLVLEEYEHAKARGAKIYAELTGYGATSDGFDMVAPSGEGAVRCMKMALSTSKNKIDYINTHGTSTPVGDITELKAVGEVFVDYKPKISSTKSLAGHSLGATSVHEAIYSLIMMKNNFIAASANIVDMDEEAKKYPIVTKVEKGVKLNSIMSNSFGFGGTNATLVFEKV

SEQ ID NO: 113927 - protein, 248 aa, Unknown
  Bacterial polypetide isolated from the Sargasso Sea
TMSSACATSGHCIGNSMELIQMGKQDVVFAGGSEEIHWAMTAMFDAMTALSSKYNDTPETASRAYDKTRDGFVIAGGGGVLVLEEYEHAKVRGAKIYAELTGYGATSDGYDMVAPSGEGAVRCMKMAMATSKNKIDYINTHGTSTPVGDITELNAVKEAFGNEIPKISSTKSLSGHPLGAASVHEAIYCLIMMKNNFIAGSANINEMDDEAKKFPIVAKTETGATLNAVMSNSFGFGGTNAALIFEKI

SEQ ID NO: 113928 - protein, 282 aa, Unknown
  Bacterial polypetide isolated from the Sargasso Sea
MKRVVVTGIGIVSCLGNNQEEVYQSLKNSKSGITFAEEYKEYNLKSHVHGKPDIKLEDHVDRKFIRFMGPGSAYNYVSMMEAVKDSGLEEKEVSNISTGMIMGSGGPSIENVILAADKTREKMPKRMGPFVVPRTMSSTASATLAVPFKIKGVNYTISSACATSGHCIGNAMELIQLGKQKVIFAGGSDEVHFAMTAMFDAMTALSSKYNDTPEKASRPYDKTRDGFVISGGGGVLVLEEYEHAKARGAKIYAEITGYGATSDGFDMGAPSGEGAVRCMNMA

SEQ ID NO: 113929 - protein, 183 aa, Unknown
  Bacterial polypetide isolated from the Sargasso Sea
MKSKIISIGSYTPNNIVTNQDLEKKVDTTDEWIVSRTGIKERPIADDSQATSDLAYEAAKIAIERAKIDKNEIDLIIVGTCTPDVATPNVGTLIQKRLDLKNFPAFSIEAACSGFIYALNIADKFIKSGDSKCALVVGAETLSRITNWDDRNTCVLFADGAGAAILKPSDDTGNIFSELGANG

SEQ ID NO: 113930 - protein, 298 aa, Unknown
  Bacterial polypetide isolated from the Sargasso Sea
ASSEDQIESADILREKGLKRIGPYRVTKAMGSTVSACLSTALKIKGINFSISSACSTSAHCIGVGMEQIQLNKQDVLIVGGAEAEHWGITSLFDAMGALSTKYNEDPHKASRAFDKDRDGFVIAGGGGALVIEELEHAKKRGAKIYAELTGYAATSDGHDMVSPSGEGALRCMETALTMSGGENPDYINAHGTSTPVGDIAEIEAIHNLFGKNSPLISSTKSLTGHSLGAAGVQESIYSLLMLNEGFLCASANIDHIDEKISKANILRKNQTGTFKKVMSNSFGFGGTNACLVFETLN

SEQ ID NO: 113931 - protein, 274 aa, Unknown
  Bacterial polypetide isolated from the Sargasso Sea
MKRVVITGIGIVSCLGNNKKEVYESLINSKSGITFCEEYKEFNLKSNIHGKPNIKLEDHVDRKVIRFMGEGSAYNYVAMSEAVKDSGLDEKDISNISSGMIMGSGGPSIKNVILAADKTREKNPKKMGPFVVPRTMASTASATLAVPFKIKGVNYTISSACATSAHCIGNAMELIQLGKQKIVFAGGSDEVHFALTAMFDAMTALSSKYNDTPKKASRPYDKTRDGFVISGGGGVLVMEEYEHAKARGAKIYAEITGYGATSDGYDMVAPSGEG

SEQ ID NO: 113932 - protein, 249 aa, Unknown
  Bacterial polypetide isolated from the Sargasso Sea
LEDHVDRKFIRFMGPGSAYNYISMVEAVKDSGLEDKDVSNISTGMIMGSGGPSIQNVILAADKTREKNPKKMGPFVVPRTMSSTASATLAVPFKIKGVNYTISSACATSGHCIGNAMELIQLGKQNVVFAGGSDEVHYAMTAMFDAMTALSSKYNDTPEKASRPYDKTRDGFVISGGGGVLVLEEYEHAKARGAKIYAELTGYGATSDGYDMVAPSGEGAVRCMQMALNTSKNKIDYINTHGTSTPVEI

SEQ ID NO: 113933 - protein, 299 aa, Unknown
  Bacterial polypetide isolated from the Sargasso Sea
YIDRKVIRFMGAGSAYNYIAMSEAVKDSGLEENEVSNISTGMVMGSGGPSIENVILASDKTREKNPKKMGPFIVPRTMASTASATLAVPFKIKGTNYTISSACATSGHCIGNAMELIQLGKQNIIFAGGSDEVHFAMTAMFDAMTALSSKYNDTPEKASRPYDKTRDGFVIAGGGGVLVLEEYEHAKARGAKIYAELTGYGATSDGYDMVAPSGEGAVRCMKMALATSKNKIDYINTHGTSTPVGDITELKAVGEAFPEYKPKISSTKSLSGHSLGATSVHEAIYSLIMKKNNFISASA

SEQ ID NO: 113934 - protein, 256 aa, Unknown
  Bacterial polypetide isolated from the Sargasso Sea
MEGINFNQIGVSFKGSGSYVPDQILTNQKISQKVDTSNEWIQSRTGISERRISSVEDNVTEMGYKAALKAIEMANWDIKTIDLIVLATSTPHDLFGSAPSIQAKLGAANAVAFDLTAACSGFLFALITASQFLKGGSFKRAIVIGADQLSSFVDWNDRRSCILFGDGAGALAIEATNEFDNFIGFDMKTDGGRGSFLNLPSKNNKDSIVDEIDFLSGGFSPIQMNGQEVYKFAVKEVPLILRKLLKKMKYNSDQVD

SEQ ID NO: 113935 - protein, 123 aa, Unknown
  Bacterial polypetide isolated from the Sargasso Sea
VHWVGHVRMEGKEVFRHAVEKLAAVMDEALDAAQMDATQIDWLVPHQANIRIIDAMQKKMGMASDRVVRTVEQHANTSAASIPLALAVAVDDGRIKNGDVLAMEAIGGGLVWGAALVKFGKPC

SEQ ID NO: 113936 - protein, 111 aa, Unknown
  Bacterial polypetide isolated from the Sargasso Sea
MVEPLSTTSGVLFRGSGSATPSRSISNAELGQRVETSDEWIRSRTGIAARRVVNSDESLAELSGVAAERALEMAGWAPDSLDLILLATSTPDDLFGSAPRLQARLGATNAA

SEQ ID NO: 113937 - protein, 205 aa, Unknown
  Bacterial polypetide isolated from the Sargasso Sea
FDAMTALSSKYNDAPETASRAYDKTRDGFVIAGGAGVLVLEEYEHAKARGAKIYAELTGYGATSDGYDMVAPSGEGGVRCMQMAMSTAKNKIDYINTHGTSTPVGDITELNAVKNTFGDNIPKISSTKSLSGHPLGAASVHEAIYCLIMMKNNFIAGSANISEMDEEAKKFPIVSKTETEATLNTVMSNSFGFGGTNAALIFEKV

SEQ ID NO: 113938 - protein, 194 aa, Unknown
  Bacterial polypetide isolated from the Sargasso Sea
NDTPEQASRPYDKTRDGFVIAGGGGVLVLEEYEHAKARGAKIYAELTGYGATSDGFDMVAPSGEGAVRCMRMALKTSKNKIDYINTHGTSTPVGDITELRAVGEVFTEYKPKISSTKSLAGHSLGATSVHEAIYSLIMMKNNFIAASANITDMDDEAKKYPIITKVEKDVSLNSIMSNSFGFGGTNATLVFEKV

SEQ ID NO: 113939 - protein, 299 aa, Unknown
  Bacterial polypetide isolated from the Sargasso Sea
FFDITSHLEAKDIKRNDRFIQYGIVAANMAVHDSGIQDLGDEDKLKTGVIVGSGIGGLETIYNGSLTIKNNGPRRLSPFFIPSSLINLLSGQISIKFGLKGPNHSVVTACATGAHSIGDAGEIIKRGAADIMIAGGAEAAVCELGLAGFCAARSLSTSYNDTPEIASRPWDKNRDGFVMGEGAGIVVLEELDHAKKRGAKIYAELIGYGMSGDAYHITAPSEDGDGGFRAMRQALNMAQTMPEDINYVNAHGTSTLKGDEIELNAIMKLFNNHENLFVSSTKSSIGHLLGAAGSVESIF

SEQ ID NO: 113940 - protein, 254 aa, Unknown
  Bacterial polypetide isolated from the Sargasso Sea
IKGVNYTISSACATSGHCIGNAMELIQLGKQKIIFAGGSDEVHFALTAMFDAMTALSSKYNDTPEKASRPYDKTRDGFVISGGGGVLVMEEYEHAKSRGAKIYAEITGYGATSDGYDMVAPSGEGAVRCMRMALSTSKNKIDYINTHGTSTPVGDITELNAVGEVFKDKIPKISSTKSLSGHSLGATSVHEAIYSIIMMKNNFISASVNITDMDEGAKKFPIVTNVQKNLSLNAIMSNSFGFGGTNATLVFEKV

SEQ ID NO: 113941 - protein, 272 aa, Unknown
  Bacterial polypetide isolated from the Sargasso Sea
NLLLAFDTARHSSAKKVGPFMVPRTMSSTNSAVLATAFKIKGVNYSISSACATSAHCIGNAAELIQLGKQDVVFAGGGEELDWTMTVLFDAMPALSGRYNDAPERASRPFDSNRDGFVIAGGGGVVVLEELQHAKARGAKIYAEFAGYGATSDGYDMVQPSGEGAVRCMNMALQGVEAVDYVNTHGTSTPVGDVKELAALRTVFGEKNRIPAFNSTKSLAGHSLGATGVHEAIYTLLMMENHFISASANVENVDPEVGDMPLVTKRRDNIEI

SEQ ID NO: 113942 - protein, 216 aa, Unknown
  Bacterial polypetide isolated from the Sargasso Sea
DTNDEWITTRTGIKERRIVSNGETLSDLGAEVVKVICEKRGISPLEIDLIIVGTVTSDHRFPSSSNLICHKSGATNAWGYDVSAACSGFLYSLVTGQQFVESGKYKKVIVIGGDIMSSIINYEDRNTCIIFGDGCGGVLLEANEEGNGIIDSVLKADGSGKEYLNQKLGGSAYPITKENVGHPDMYVYQEGRSVFKFAVTSMADVSAEIMERNNLT

SEQ ID NO: 113943 - protein, 135 aa, Unknown
  Bacterial polypetide isolated from the Sargasso Sea
MTYARIVGTGSYLPEKVLRNKELERKVNTTDSWIQERTGIRERRIVAENESTVDLAERAALNALQAADLSPEDIDLIIVGTTTPDRIYPATACRLQARLEAPGCPAFDVQAVCTGFIYALGIAEKFIKSGTSVRA

SEQ ID NO: 113944 - protein, 216 aa, Unknown
  Bacterial polypetide isolated from the Sargasso Sea
ELGLAGFCAARSLSTSYNETPELASRPWDKKRDGFVMGEGAGIIILEELEHAIKRGAKIYAELIGYGMSGDAHHITAPSEDGDGGFRAMKQSINMANIALEDINYINAHGTSTIKGDEIELNAIMRLFKNHKNLFVSSTKSSIGHLLGAAGSVESIFAILAINNSILPGTLNLEDPIDSQNIKLVAKEPIETKINIALSNSFGFGGTNTALLFKNY

SEQ ID NO: 113945 - protein, 197 aa, Unknown
  Bacterial polypetide isolated from the Sargasso Sea
SKYNNEPKKASRAYDKTRDGFVIAGGGGVLVLEEYEHAKARGAKIYAEITGYGATSDGYDMVAPSGEGAVRCMKLALSTSRNKIDYINTHGTSTPVGDITELKAIGETFKENIPKISSTKSLSGHPLGAASVHEAIYCLIMMKNNFITASANISEMDDEAKKFPIITKTEKDLNLRSIMSNSFGFGGTNATLIFEKV

SEQ ID NO: 113946 - protein, 246 aa, Unknown
  Bacterial polypetide isolated from the Sargasso Sea
SSACATSGHCIGNSMELIQMGKQDIVFAGGSEEIHWAMTAMFDAMTALSSKYNDKPESASRAYDKTRDGFVIAGGAGVLVLEEYEHAKARGAKIYAELTGYGATSDGYDMVAPSGEGAVRCMKMAMATSKNKIDYINTHGTSTPVGDITELNAVKSTFGENIPKISSTKSLSGHPLGAASVHEAIYCLIMMKNNFIAGSANINEMDDEAKNFPIITKTEKGTAINTVMSNSFGFGGTNAALIFEKV

SEQ ID NO: 113947 - protein, 140 aa, Unknown
  Bacterial polypetide isolated from the Sargasso Sea
APDGEGALRAMKKALDDAKVNPTDIDYINAHGTSTYLNDKNETAAIKNVFKDHAYNVAISSTKSMTGHLLGAAGAIELIAGLNAINRNIVPPTINLNNPDPECDLNYTPNKAIERNVNKVMSNSFGFGGHNAVLIFQGVS

SEQ ID NO: 113948 - protein, 236 aa, Unknown
  Bacterial polypetide isolated from the Sargasso Sea
GYSDIIVSGGSEAGIIKSGIGGFNAVQALSKRNDDPKTASRPFDLDRDGFVLGEGGGCIILEELEHAKSRGAKIYAEVSGAGLSADAYHMTAPHPEGEGAINVMNNCLADSGLSYKDVDLINMHGTSTPLGDKAEAKAVKAVFKDHAYNLNINSTKSMTGHLLGAAGAVEAISCILAINNNIVPPTINHFNDDPEIDNQLNFTFNSSQKREVKVAMSNTFGFGGHNACVLLKEFVD

SEQ ID NO: 113949 - protein, 118 aa, Unknown
  Bacterial polypetide isolated from the Sargasso Sea
MDGPAVFKKGIEIVTKSIMALLKKHAIDPHAITYFIAHQANIRILESVAKKLGIPFDRFLINIDSVGNTSAASIPLILSEHFDQNTFKKGDTLCLLGFGAGFTWSSILLEWSESYEHS

SEQ ID NO: 113950 - protein, 211 aa, Unknown
  Bacterial polypetide isolated from the Sargasso Sea
MHALSTRNDDPSTASRPFDRDRDGFVLGEGAGALILEEYEHAINRGAKIYAELAGGGLSCDAYHMTAPHPDGRGAIKVMKNCLDDADLDHDEIDLINMHGTSTSLGDVAESKAVMNVFQDHTYNLNINSTKSMTGHLLGAAGAIESISCILAMKHSIVPPTINHFNDDDNIDSKLNFTFSSPQKREVNIAMSNTFGFGGHNACIIFKKIDQ

SEQ ID NO: 113951 - protein, 275 aa, Unknown
  Bacterial polypetide isolated from the Sargasso Sea
PFVVPRTMASTASATLAVPFKIKGVNYTISSACATSGHCIGNAMELIQLGKQNIIFAGGSDEVHFALTAMFDAMTALSSKYNDKPETASRPYDKTRDGFVISGGGGVLVMEEYEHAKARGAKIYAEITGYGATSDGYDMVAPSGEGAVRCMNMALSTAKNKIDYINTHGTSTPVGDITELKAVGEAFPEYKPKISSTKSLSGHSLGATSVHEAIYSLIMMKNNFISASVNIHNMDDEAKNFPIVTQVEKDVQLDAIMSNSFGFGGTNATLVFEKV

SEQ ID NO: 113952 - protein, 228 aa, Unknown
  Bacterial polypetide isolated from the Sargasso Sea
MTKRAVITGVGHYLPKRIVLNSEFEETLNTSDDWIITRSGIRQRHFSNGDETTSKMAVLAGKQAIEDANIAVSDLDAIILATSTADLTFPSAATMVQAGLGMRHGFAYDVQAVCAGFIYALSTANAQIVSGQANRILVIGSETFSNLMDWSDRSTCVLFGDGAGAVVLEGHNANGTKEDRGILSVDLNSDGSFRDILYVDGGVSQKTTGYLKMEGKEVFKHAVEKLAK

SEQ ID NO: 113953 - protein, 231 aa, Unknown
  Bacterial polypetide isolated from the Sargasso Sea
MGGSEATICKIGIEGFTSCKALSTKFNENPSESSRPFDKDRDGFVMGEGGCILILEEMEHAIKRGAKIYTEVKGYGMSSDAYHYTLPEPTGDGAFRAMKNAILDANLIPSNIEYINAHGTSTPSGDKVEVNAIDRLYEDNSFNVAVSSTKSQIGHLLGAAGAVEAAYSIMSLEKNTVPFNLNLKNEIESNKISFVRDKPREIELSNILSNSFGFGGTNVSLIFSKIKDDKK

SEQ ID NO: 113954 - protein, 295 aa, Unknown
  Bacterial polypetide isolated from the Sargasso Sea
GLEEKDVSNVTTGMIMGSGGPSIENVILAADKTREKSPKRMGPFVVPRTMSSTASATLAVPFKIKGVNYTISSACATSGHCIGNAMELIQLGKQKIIFAGGSDEVHFAMTAMFDAMTALSSKYNDTPEKASRPYDKTRDGFVISGGGGVLVLEEYEHAKSRGAKIYAELTGYGATSDGYDMVAPSGEGAVRCMKMALSTAKNKIDYINTHGTSTPVGDITELKAVGEVFNDYKPKISSTKSLAGHSLGATSVHEAVYSLIMMKNNFIAASANISDMDDEAKKYPIVTKVEKNVNF

SEQ ID NO: 113955 - protein, 292 aa, Unknown
  Bacterial polypetide isolated from the Sargasso Sea
RDSEGINQTRHAAITGWGSCMPPAVLSNNDLSTFLDTSDEWIITRTGMKERRISHVSATEMATLAAKRALACAGLDPTDLDLIIYGGVSNEELCPNSASGVQFSLGASNAASIDLNTACTSFCYGLAAATAMIQAGQVRNAVVIGVELISRYMDWTNRNVAVLFGDGAAAVVLEATDQAEGLLASVLGCDAEARHTLRVRGFGCSYSGYGITLGDTFWDFDGQQIFKRAVLGMSRASSEVLKRSALTADDISLVIPHQANLRIIESVAKHTGIPMERVMLTVEKYGNMSAAT

SEQ ID NO: 113956 - protein, 265 aa, Unknown
  Bacterial polypetide isolated from the Sargasso Sea
PSIENVILAADKTREKSPKRMGPFVVPRTMSSTASATLAVPFKIKGINYTISSACATSGHCIGNAMELIQLGKQNIIFAGGSDEVHFAMTAMFDAMTALSSKYNDIPEKASRPYDKTRDGFVISGGGGVLVLEEYEHAKARGAKIYAELTGYGATSDGYDMVAPSGEGAVRCMKMALSSAKNKIDYINTHGTSTPVGDITELKAVGEVFKEYKPKISSTKSLAGHSLGATSVHEAIYSLIMMKNNFIAASANIIDMDEEAKKYPI

SEQ ID NO: 113957 - protein, 287 aa, Unknown
  Bacterial polypetide isolated from the Sargasso Sea
KGSPKRMGPFMVTRGMSSTNSACLATPFKIKGVNYSITSACSTSAHCIGNASELIQYGKQDIIFAGGGEELDWTLSCLFDAMNAMSSKYNDNPEVASRAFDSDRDGFVIAGGGGVVVLEELEHAKSRGAKIYAEVVGYGATSDGFDMVAPSGEGAERAMRLAISSCNNRTVDYINAHGTSTPAGDVTEVEAVRKVFSETKFPLISSTKSLTGHSLGAAGVHEAIYSILMIENNFIAGSANVANLDPELRSDEIATKLVENIELDTVLSNSFGFGGTNASLAIGRYLG

SEQ ID NO: 113958 - protein, 220 aa, Unknown
  Bacterial polypetide isolated from the Sargasso Sea
MYNSKISGLGKYLPDNVVTNDDLSKIMDTSNEWIIERTGIKERRHIKKGDGDTTATMGVKAAKIAIERAGIDKNDIDLILFATLSPDYYFPGSGVLVQELLEIPTCPAMDIRNQCSGFIYAISTADQFVKSGMYKNILVIGSENHSGGLDMTTRGRGVSVIFGDGAGAAVISREDDLTTGILSSHLHSEGKHAEELSLIGPSTNRWVPEIIDANDPEDIL

SEQ ID NO: 113959 - protein, 171 aa, Unknown
  Bacterial polypetide isolated from the Sargasso Sea
GGVLVLEEYEHAKARGAKIYAELTGYGATSDGYDMVAPSGEGAARCMQMALKTSKNKIDYINTHGTSTPVGDITELKAVGEVFKDYKPKISSTKSLSGHSLGATSVHEAVYSLIMMKNNFISASANITEMDDEAKKYPIVTEVEKDVSLNSVMSNSFGFGGTNATLVFEKV

SEQ ID NO: 113960 - protein, 172 aa, Unknown
  Bacterial polypetide isolated from the Sargasso Sea
GGGVLVLEEYEHAKARGAKIYAELTGYGATSDGYDMVAPSGEGAVRCMQMALSTTKNKIDYINTHGTSTPVGDITELKAVGEAFKDYKPKISSTKSLAGHSLGATSVHEAVYSLIMMKNKFIAASANIQDMDDEAKNYPIVTKVEKDVNLNSVMSNSFGFGGTNATLVFEKV

SEQ ID NO: 113961 - protein, 276 aa, Unknown
  Bacterial polypetide isolated from the Sargasso Sea
MAVDDAGLNDLNQEDKLRIGVSVGSGIGGLETIYEGSLTINNKDSRKLSPFFIPSSLVNLLSGQISIKYGFKGPNHSVVTACATGAHSIGDSGEMIKRGAADVMIAGGSEAAVCKLGIAGFCAARSLSTSYNSTPHQASRPWDKDRDGFVMGEGAGIIVLEEMEHAKKRGAKIYAELVGYGMSGDAHHITAPAEDGDGGFRAMNEALRMAKISTDDVGYINAHGTSTIKGDEIELNAIARLFNNKIFVSSTKSSIGHLLGAAGSVESIFSIMSRII

SEQ ID NO: 113962 - protein, 295 aa, Unknown
  Bacterial polypetide isolated from the Sargasso Sea
NNLLNGKSGIKKIDHFNTDEFPCKIAGYISNNEKNDNYFDITSHLDSREIKRNDRFIQYGIVAAKMAVEDAGIENLSEKDKLNIGVIAGSGIGGLETIYNGALTINNSGPRKLSPFFIPSSLINLLSGQISIKYGFKGPNHSVVTACATGAHSIGDAGEIIKRGAADIMIAGGAEAAVCELGLAGFCAARSLSTSFNETPELASRPWDKNRDGFVMGEGAGIIILEELEHAKKRGAKIYAELIGYGMSGDAHHITAPSEDGDGGFRAMKQSINMANISLEDINYVNAPWNINLKR

SEQ ID NO: 113963 - protein, 267 aa, Unknown
  Bacterial polypetide isolated from the Sargasso Sea
LNSKSGISFSEEYKEYNLKSHIHGKPNINLEDHVDRKFIRFMGPGSAYNYISMAEAVKDSGLDEKDVSNTSTGMIMGSGGPSIENVILAADKTRAKSPKRMGPFIVPRTMSSTASATLAVPFKIKGVNYTISSACATSGHCIGNAMEIIQLGKQKIIFAGGSDEVHFAMTAMFDAMTALSSKYNDTPEKASRPYDKTRDGFVISGGGGVLVLEEYEHAKARGAKIYAELTGYGATSDGYDMVAPSGEGAVRCMQMALGTTKNKIDYI

SEQ ID NO: 113964 - protein, 217 aa, Unknown
  Bacterial polypetide isolated from the Sargasso Sea
SEELHWAMTAMFDAMTALSSKYNDTPEKASRAYDKTRDGFVIAGGGGVLVLEEYEHAKARGAKIYAEITGYGATSDGYDMVAPSGEGAIRCMNMALATMKNKKIDYLNTHGTSTPVGDITELKAIREAFGENVPKISSTKSLSGHPLGAASVHEAIYSLIMMKNNFITASANIGDMDDEAKKFPIVTKTEKDVNLNSVMSNSFGFGGTNATLVFEKV

SEQ ID NO: 113965 - protein, 287 aa, Unknown
  Bacterial polypetide isolated from the Sargasso Sea
MKRVVVTGLGVFSCLGNNQEEVYKSLINTKSGITFSEEYKEHNLKSHVHGKPNIKLEDYIDRKVIRFMGAGSAYNYVAMSEAVKDSGLEENEVSNISTGMVMGSGGPSIENVILASDKTREKNPKKMGPFIVPRTMASTASATLAVPFKIKGTNYTISSACATSGHCIGNAMELIQLGKQNIIFAGGSDEVHFAMTAMFDAMTALSSKYNDTPEKASRPYDKTRDGFVIAGGGGVLVLEEYNHAMARGAKIYAELTGYGATSDGYDMVAPSGEGAVRCMKMALATSK

SEQ ID NO: 113966 - protein, 403 aa, Unknown
  Bacterial polypetide isolated from the Sargasso Sea
MKRVVITGLGIVSCIGNNQEEVHQSLLNSKSGISFSEEYKNHNLKSHVHGKPNIKIEDHIDRKTIRFMGSGSAYNYIAMKEAIEDSGLEEKDVSNFKTGIIMGSGGPSIENVILAADKTRAKTPKLMGPFIVPRTMASTASATLAVPFKIKGTNYTMSSACATSGHCIGNAMELIQMGKQDIIFAGGSEEIHWAMTAMFDAMTALSSKYNDTPESASRAYDKTRDGFVIAGGGGVLVLEEYDHAKARGAKIYAELTGYGATSDGYDMVAPSGEGAVRCMKMAMATTKNKINYINTHGTSTPVGDITELNAVRETFGSEIPKISSTKSLSGHPLGAASVHEAIYCLIMMKNNFIAGSANISDMDEEAKKFPIVCKTEKDVNLNTVMSNSFGFGGTNATLIFEKV

SEQ ID NO: 113967 - protein, 403 aa, Unknown
  Bacterial polypetide isolated from the Sargasso Sea
MRKVVVTGLGIISPIGNNAIEVTDSLREAKSGISFDQSHKDMNFRSHVSGQIKINLQESIDRKFLRFMGDGASYNYLAMLEALKDSGLDENLISNPMTGLIMGSGGPSTKNLLRAFDITRDTGPKKIGPTSVPRVMCSTNSATLSTFFKIKGMNYSISSACATSAHCIGHGAELIQMGKQDIVFAGGGEELDWSLSALFDAMTALSSKYNDTPETASRAFDSSRDGFVIAGGGGVLVLEELEHAKSRGAKIYAELVGYGATSDGYDMVQPSGEGAERCMKMAIKNLDEKVDYINAHGTSTPVGDNAELGAVKKVFGEETPFISSTKSLTGHSLGAAGVQEAIYSLLMLNNDFMSESAHIKNIDEAARDLNILTSIKEGAFDTVMSNSFGFGGTNASLVFRKYI

SEQ ID NO: 113968 - protein, 403 aa, Unknown
  Bacterial polypetide isolated from the Sargasso Sea
MKRVVITGIGVVSCLGNNQEEVYQSLLNSKSGITFSEEYKEYNLKSNVHGKPNIKLEDYVDRKFIRFMGPGSAYNYISMSEAVKDSGLEEKDVSNISTGMIMGSGGPSIENVILAADKTRQKSPKRMGPFVVPRTMSSTASATLAVPFKIKGVNYTISSACATSGHCIGNAMELIQLGKQKIIFAGGSDEVHFAMTAMFDAMTALSSKYNDTPEKASRPYDKTRDGFVISGGGGVLVLEEYEHAKARGAKIYAEITGYGATSDGYDMVAPSGEGAVRCMNMAIGTAKNKIDYINTHGTSTPVGDITELNAVGKVFTDYKPKISSTKSLAGHSLGATSVHEAVYSLIMMKNSFIAASANITDMDDEAKKYPIVTKVEKDVTLNSVMSNSFGFGGTNATLVFEKV

SEQ ID NO: 113969 - protein, 403 aa, Unknown
  Bacterial polypetide isolated from the Sargasso Sea
MKRVVVTGIGVVSCLGNNQDEVYQSLLNSKSGISFSDEYKEYNLKSNIHGKPKINLEDHVDRKFIRFMGPGSAYNYISMAEAVKDSGLEDKDVSNISTGMIMGSGGPSIENVILAADKTRAKSPKRMGPFVVPRTMSSTASATLAVPFKIKGVNYTISSACATSGHCIGNAMELIQLGKQKIIFAGGSDEVHFAMTAMFDAMTALSSKYNDTPEKASRPYDKTRDGFVIAGGGGVLVLEEYEHAKARGAKIYAELTGYGATSDGYDMVAPSGEGAVRCMQMALSTAKNKIDYINTHGTSTPVGDITELKAVGETFKDYKPKISSTKSLAGHSLGATSVHEAIYSLIMMKKSFIAASANITDMDDEAKKYPIVTKVEKGVNLNSVMSNSFGFGGTNATLVFEKV

SEQ ID NO: 113970 - protein, 177 aa, Unknown
  Bacterial polypetide isolated from the Sargasso Sea
FVIAGGAGVLVLEEYEHAKARGAKIYAELTGYGATSDGYDMVAPSGEGAVRCMKMAMATAKNKIDYINTHGTSTPVGDITELNAIKETFGEDIPKISSTKSLSGHPLGAASVHEAIYCLIMMKNNFITGSANITEMDEDAKKFPIVEKTETDATLNTVMSNSFGFGGTNAALIFEKV

SEQ ID NO: 113971 - protein, 403 aa, Unknown
  Bacterial polypetide isolated from the Sargasso Sea
MRRVVITGLGIVSCLGNNQEEVHQSLLNAKSGISFAEEYEEHNLKSHVHGKPNIKLSDFVDRKTIRFMGSGSAYNYIAMKEAISDSGLKENDVSNFKTGIIMGSGGPSIENVILAADKTRAKTPKLMGPFIVPRTMGSTASATLAVPFKIKGTNYTMSSACATSGHCIGNAMELIQMGKQDIIFAGGSEEVHWAMTAMFDAMTALSSKYNDKPETASRAYDKTRDGFVIAGGAGVLVLEEYERAKARGAKIYAELTGYGATSDGYDMVAPSGEGAIRCMQMALATSKNKIDYINTHGTSTPVGDITELNAVQKTFGENIPKISSTKSLSGHPLGAASVHEAIYCLIMMKNNFIAGSANITEMDEEAKKFPIITKTEKVASLNAVMSNSFGFGGTNAALIFEKV

SEQ ID NO: 113972 - protein, 404 aa, Unknown
  Bacterial polypetide isolated from the Sargasso Sea
MKRAVITGLGIVSSIGNDKQQVLNSLKAGRSGIKASQEFADMGLRSQVWGQIDIDTAALIDRKALRFMGDAAAYAYISMQQAIEDAGLTPEQVSNFRTGLVVGSGGASSKTQIEAADTLREKGVKRVGPYAVPKTMSSTCSACLATPFEIKGVNYSISSACATSAHCIGHAVELIQLGKQDIIFAGGGEEVHWTLAMEFDAMGALSTKYNETPELASRTYDADRDGFVISGGGGILVVEELEHALARGAKIYAEIVGYGATSDGYDMVAPSGEGAVRCMEMAMKDVKGPIDYVNTHGTSTPVGDVKELGAIQQVFGGKSPAISATKAMTGHALGAAGVHEAIYSLLMMEHNFIAPSINISNLDEAAAGLNIVTKATEAKLTTVMSNSFGFGGTNATLVMQKYQG

SEQ ID NO: 113973 - protein, 278 aa, Unknown
  Bacterial polypetide isolated from the Sargasso Sea
MATSRRVVVTGMGIISPLGNELEASWQNILAGRSGAKTVTAFDVTDYPTKFAAPVENFDDVNHLDVKTKRRVDEFVQYGLVASKHAIENSGLELNSIDSSRIGVSIGSGIGGLDTIEKNALTLDKKGPRKISPFFVPGAIVNMVSGLVSIEYGLHGPNLSIVTACSSGNHSIGFSARSISHGDCDVMITGGSEMAITPLGLGGFSAVTALSTNNENPTKASRPWDKDRDGFVLGDGAGVLVLEEYEHAKARSANIFAEVIGFGMSSDAFHMTAPAEDG

SEQ ID NO: 113974 - protein, 403 aa, Unknown
  Bacterial polypetide isolated from the Sargasso Sea
MKRVVITGIGIVSCLGNNQEEVYQSLLNSKSGITFSEEYKEYNLKSHVHGKPNIKLEDHVDRKFIRFMGPGSAYNYISMMEAVKDAGLEEKDVSNISSGMIMGSGGPSIENVILAADKTREKNPKRMGPFVVPRTMSSTASATLAVPFKIKGVNYTISSACATSGHCIGNGMELIQLGKQKIIFAGGSDEVHFAMTAMFDAMTALSSKYNDTPEKASRPYDKTRDGFVISGGGGVLVLEEYEHAKARGAKIYAELTGYGATSDGYDMVAPSGEGAERCMKMALSNAKNKIDYINTHGTSTPVGDITELNAVGKVFTDYKPKISSTKSLAGHSLGATSVHEAVYSLIMMKNNFISASVNITDMDDEAKKYPIVTKVEKNVELTSVMSNSFGFGGTNATLVFEKI

SEQ ID NO: 113975 - protein, 403 aa, Unknown
  Bacterial polypetide isolated from the Sargasso Sea
MKRVVVTGIGVVSCLGNNQEEVYQSLLNSKSGITFSEEYKEYNLKSNVHGKPNIKLEDHVDRKFIRFMGPGSAYNYISMTEAVKDSGLEDKDVSNVSTGMIMGSGGPSIQNVILAADKTREKNPKKMGPFVVPRTMSSTASATLAVPFKIKGVNYTISSACATSGHCIGNAMELIQLGKQNVVFAGGSDEVHYAMTAMFDAMTALSSKYNDTPEKASRPYDKTRDGFVISGGGGVLVLEEYEHAKARGAKIYAELTGYGATSDGYDMVAPSGEGAVRCMQMALNTSKNKIDYINTHGTSTPVGDITELKAVGEVFKDNVPKISSTKSLSGHSLGATSVHEAVYSLIMMKNNFISASINITDMDEEAKKYPIVTKVEKDVTLNAIMSNSFGFGGTNATLVFEKV

SEQ ID NO: 113976 - protein, 404 aa, Unknown
  Bacterial polypetide isolated from the Sargasso Sea
MKRVVVTGIGVVSCLGNNQDEVYKSLLNAKSGITFSEEYKEYNLKSHVHGKPNIKLEDHVDRKFIRFMGPGSAYNYVSMNEAVKDSGLEEKDVSNITTGMIMGSGGPSIENVILAADKTREKSPKRMGPFVVPRTMSSTASATLAVPFKIKGVNYTISSACATSGHCIGNAMELIQLGKQKIIFAGGSDEVHFAMTAMFDAMTALSSKYNDTPEKASRPYDKTRDGFVIAGGGGVLVLEEYEHAKSRGAKIYAELTGYGATSDGYDMVAPSGEGAVRCMKMALSTTKNKIDYINTHGTSTPVGDITELKAVGEVFNEYKPKISSTKSLAGHSLGATSVHEAIYSLIMMKNNFIAASANINDMDDEAKKYPIVTKVEKGVNLNSVMSNSFGFGGTNATLVFEKVK

SEQ ID NO: 113977 - protein, 271 aa, Unknown
  Bacterial polypetide isolated from the Sargasso Sea
MRRVVVTGIGLLSSIGSEKEKVWNNLLNGKSGIKKIKHFDTEEFSCKIAGYISNDESDSNYFDINSHLDTKEIKRNDRFIQYGIVAAKMAVEDSGINNLTDEDKLNTGVIVGSGIGGLETIYNGSLTVKNSGPRKLSPFFIPSSLINLLSGQISIKYGFKGPNHSVVTACATGAHSIGDAGEIIKRGAANIMLAGGAEAAVCELGLAGFCAARSLSTSYNDTPDLASRPWDKDRDGFVMGEGAGIVVLEELEHAKKRGAKIYAELIGYGMS

SEQ ID NO: 113978 - protein, 311 aa, Unknown
  Bacterial polypetide isolated from the Sargasso Sea
GIVFGTGIGGIGATEDAVRTFDERGPSRVNPLAITQLMPNSSTGQVAIKFGIEGPSVTITTACAASANAVGEAKNMIENGIVDIVVTGGTESGTTPMTIAAFAQIRALSTQNDNPKGACKPFDKNRDGFVMGEGSTVLILESEESAKSRDAVIYAYIDGYGSTTDAYHITAPAEGGAGAVKAMEKAIKDAGITPSDIDYINAHGTSTPANDKNETEAIKTVLGEKASEVVISSTKSMTGHLLGGGGAFESMASILSIKHNKVPPTINLNDPDEECDLNYTPNDAVDLEINTAMSNSFGFGGHNAVLVFKKQ

SEQ ID NO: 113979 - protein, 270 aa, Unknown
  Bacterial polypetide isolated from the Sargasso Sea
RTMSSTASATLAVPFKIKGVNYTISSACATSGHCIGNAMELIQLGKQNIIFAGGSDEVHFAMTAMFDAMTALSSKYNDTPEKASRPYDKTRDGFVISGGGGVLVLEEYDHAKARGAKIYAEITGYGATSDGYDMVAPSGEGAVRCMQMALNTAKNKIDYINTHGTSTPVGDLTELKAVGEVFKDYKPKISSTKSLAGHSLGATSVHEAVYSLIMMKNNFIAASANITDMDDEAKKYPIVTKVENDAKVNSVMSNSFGFGGTNATLVFEKV

SEQ ID NO: 113980 - protein, 195 aa, Unknown
  Bacterial polypetide isolated from the Sargasso Sea
YNDTPEKASRAYDKTRDGFVIAGGAGVLVLEEYEHAKARGAKIYAELTGYGATSDGYDMVAPSGEGAVRCMQMAMATSKNKVDYINTHGTSTPVGDITELNAVKEAFGNEIPKISSTKSLSGHPLGAASVHEAIYCLIMMKNNFITGSANISEMDEEAQKFPIVAKTETEATLNTVMSNSFGFGGTNATLIFEKV

SEQ ID NO: 113981 - protein, 310 aa, Unknown
  Bacterial polypetide isolated from the Sargasso Sea
HDIEKMVQTSDEWIQNRTGIKQRHIVSEGEASSDLSTHVANKLLVTRGIDASEIDVIIVGTVTPDHLTPSTAAIVQNNINAVNAWAFDLSAACSGFLFGLETGSKLIESGDYEKVMVIGVDTMTSILDFDDRETCVIFGDGAGGVILEPTKQDNGIISSILKTDGSGASSLNVEAGGSRKPASEETIANREHFIRQDGKKVFKFAVKRMADVSEKILKENGLSGNDIKLFIPHQANKRIIDATGERCGIPKERTLINIDRFGNTTAGTIPIALDEAVKNQLIKNGDYVLLAAFGSGFTWGSILMKWNSKT

SEQ ID NO: 113982 - protein, 403 aa, Unknown
  Bacterial polypetide isolated from the Sargasso Sea
MRRVVITGLGVVSCLGNNQEEVHQSLLNSKSGISFAEEYKEHNLKSHVHGKPNIKLEDHIDRKTIRFMGSGSAYNYIAMKEAIEDSGLEESEVSNFKTGIVMGSGGPSIENVILAADKTRAKTPKLMGPFIVPRTMASTASATLAVPFKIKGTNYTMSSACATSGHCIGNSMELIQMGKQDVVFAGGSEEIHWAMTAMFDAMTALSSKYNDIPQSASRAYDKTRDGFVIAGGAGVLVLEEYEHAKARGAKIYAELTGYGATSDGYDMVAPSGEGAVRCMKMAMATAKNKIDYINTHGTSTPVGDITELNAIKETFGEDIPKISSTKSLSGHPLGAASVHEAIYCLIMMKNNFITGSANITDMDDDAKKFPIVAKTETGATLNTVMSNSFGFGGTNAALIFEKV

SEQ ID NO: 113983 - protein, 403 aa, Unknown
  Bacterial polypetide isolated from the Sargasso Sea
MKRVVVTGIGVVSCLGNNQEEVYKSLLNSKSGISFSEEYKEYNLKSHVHGKPNINLEDHVDRKFIRFMGPGSAYNYISMVEAVKDSGLEEKDVSNTSTGMIMGSGGPSIENVILAADKTRAKSPKRMGPFIVPRTMSSTASATLAVPFKIKGINYTISSACATSGHCIGNAMEIIQLGKQKIIFAGGSDEVHFAMTAMFDAMTALSSKYNDTPEKASRPYDKTRDGFVISGGGGVLVLEEYEHAKARGAKIYAELTGYGATSDGYDMVAPSGEGAVRCMQMALSTTKNKIDYINTHGTSTPVGDITELKAVGEAFKDYKPKISSTKSLAGHSLGATSVHEAVYSLIMMKNKFIAASANIQDMDDEAKNYPIVTKVEKDVNLNAVMSNSFGFGGTNATLVFEKV

SEQ ID NO: 113984 - protein, 403 aa, Unknown
  Bacterial polypetide isolated from the Sargasso Sea
MRRVVITGLGIVSCLGNNQEEVHQSLLNTKSGISFSEEYKEHNLKSHIHGKPNIKLEDHIDRKTIRFMGSGSAYNYIAMKEAIEDSGLEESEVSNFKTGIVMGSGGPSIENVILAADKTRAKTPKLMGPFIVPRTMASTASATLAVPFKIKGTNYTMSSACATSGHCIGNSMELIQMGKQDVVFAGGSEEIHWAMTAMFDAMTALSSKYNDTPEKASRAYDKTRDGFVIAGGAGVLVLEEYEHAKARGAKIYAELTGYGATSDGYDMVAPSGEGAVRCMQMAMATSKNKVDYINTHGTSTPVGDITELNAVKEAFGNEIPKISSTKSLSGHPLGAASVHEAIYCLIMMKNNFITGSANISEMDEEAKKFPIVAKTETEATLNTVMSNSFGFGGTNATLVFEKV

SEQ ID NO: 113985 - protein, 316 aa, Unknown
  Bacterial polypetide isolated from the Sargasso Sea
LEEKDVSNISTGIVMVSGGPSIENVILAADKTRAKTPKLMGPFIVPRTMASTASATLAVPFKIKGVNYTMSSACATSGHCIGNSVELIQSGKQKIMFAGGSEELHWAMTAMFDAMTALSSKYNDTPEKASRAYDKTRDGFVIAGGGGVLVLEEYEHAKARGAKIYAEITGYGATSDGYDMVAPSGEGAVRCMQMALQTSKNKIDYINTHGTSTPVGDITELKAIGETFKEKIPKISSTKSLSGHPLGAASVHEAIYSLIMMKNNFITGSANINEMDEEAKKFPIINKTEKEVSLNSVMSNSFGFGGTNATLIFEKV

SEQ ID NO: 113986 - protein, 412 aa, Unknown
  Bacterial polypetide isolated from the Sargasso Sea
MTKQRVVVTGLGTINPLGNNVITTWKNLINGVSGVDYITLFDASDLPVTFAGEVKDFDPNNYMGKQNARKLDRSGQLSIFAAEEALRDAGFDIDQPLGEEFGIVFGTGIGGIGATEDAVRIYDERGSNRISPLAITQLMPNSSTGQVAIKYGIQGPSLTITTACAASANAIGEAKRMIEQNIVDKVLVGGTESGTTSMTIGAFAQIKALSKQNEEPQRACKPFDKNRDGFVMAEGSTVLILESEKSANERNGKIYGFVEGYGSSTDAYHITAPSEGGVGALRAMDQAITNADINAEEIDYINAHGTSTIANDVNETLAIKSLMKEYAYKVNISSTKSMTGHLLGGGGAFEAMASLLSLKNNQIPPTINLNDPDEECDLNYTANNSIEKNIEYVMSNSFGFGGHNAVLVFSKQ

SEQ ID NO: 113987 - protein, 302 aa, Unknown
  Bacterial polypetide isolated from the Sargasso Sea
MGSGGPSIENVILAADKTREKNPKRMGPFVVPRTMSSTASATLAVPFKIKGVNYTISSACATSGHCIGNAMELIQLGKQKIIFAGGSDEVHFSMTAMFDAMTALSSKYNDTPEKASRPYDKTRDGFVISGGGGVLVLEEYEHAKARGAKIYAELTGYGATSDGYDMVAPSGEGAVRCMKMALNTAKNKIDYINTHGTSTPVGDITELKAVGEVFKDNVPKISSTKSLSGHSLGATSVHEAVYSLIMMKNNFISASINITDMDDEAKKFPIVTKVEKDVTLNSIMSNSFGFGGTNATLVFEKV

SEQ ID NO: 113988 - protein, 390 aa, Unknown
  Bacterial polypetide isolated from the Sargasso Sea
MFRNNQEEVHQSLLNSKSGISYAEDYKEHNLKSHVHGKPNIKLEDHIDRKTIRFMGSGSAYNYIAMKEAIEDSGLEESEVSNFKTGIVMGSGGPSIENVILAADKTRAKTPKLMGPFIVPRTMASTASATLAVPFKIKGTNYTMSSACATSGHCIGNSMELIQMGKQDVVFAGGSEEIHWAMTAMFDAMTALSSKYNDTPQSASRAYDKTRDGFVIAGGAGVLVLEEYEHAKARGAKIYAELTGYGATSDGYDMVAPSGEGAVRCMKMAMATAKNNIDYINTHGTSTPVGDITELNAIKETFGEDIPKISSTKSLSGHPLGAASVHEAIYCLIMMKNNFITGSANITDMDDDAKKFPIVSKTEMGATLNTVMSNSFGFGGTNAALIFEKV

SEQ ID NO: 113989 - protein, 278 aa, Unknown
  Bacterial polypetide isolated from the Sargasso Sea
KMGPFIVPRTMSSTASATLAVPFKIKGVNYTISSACATSGHCIGNAMELIQFGKQKIIFAGGSDEIHFAMTAMFDAMTALSSKYNDNPQKASRPYDKTRDGFVIAGGAGVLVLEELEHAKARGAKIYAELTGYGATSDGFDMVAPSGEGATRCMNLALKTTRNQIDYINTHGTSTPVGDITELKAIKDAFKDKIPKISSTKSLSGHPLGAASVHEAIYSLIMMKNNFIAASCNVNEMDESAQKFPIVTKVEKDVKLNSVMSNSFGFGGTNATLIFEKV

SEQ ID NO: 113990 - protein, 228 aa, Unknown
  Bacterial polypetide isolated from the Sargasso Sea
AMDIRNQCSGFIYAISTADQFIKSGMYKNILVIGSENHSGGLDMTTRGRGVSVIFGDGAGAAIISREDDLTKGILSSHLHSEGKHAEELSLIGPSTNRWVPEILDANDPDDISYYPYMNGQLVFKNAVVRFSEVIMEGLSHNNLTPEKIDMLIPHQANLRISQFVQKKFGLSEGQVYNNIQKYGNTTAGSIPIALTEAWEDSKINEGDIVVLAAFGSGFTWGSTIIRW

SEQ ID NO: 113991 - protein, 399 aa, Unknown
  Bacterial polypetide isolated from the Sargasso Sea
MRRVVITGIGIVSSIGNNKDEVLDSLKKGTSGIDYREDFEEMGLKSRVAGSIKLDLTEHIDRKLKRFMSDGIGFNYLAMKEAVEDSGLSEDEVSDIRTGLIMGNGGGSPETIVSGADSLREKGKVSPFLVTRSMASGNSGVIGTAFKIKGINYSISSACATSAHCIGNAAELIQFDKQDVVFAGAGDEVHWVLASFFDGMKALSASYNDNPTIASRPFDSNRDGFVISGGGGVVVLEEYEHAIARGANIYGELIGYGATSDGFDMVQPSGEGAMRCMQQAMQNNDKIDYLNAHGTSTPVGDMRELEAVREVFGANTPRITSTKSLTGHSLGVAGVHEAIYTILMLQNDFISPSINIENLDENAAGFNIVTDLIEGAGLEIVMSNSFGFGGTNASLVFKK

SEQ ID NO: 113992 - protein, 360 aa, Unknown
  Bacterial polypetide isolated from the Sargasso Sea
MRRVAVTGMGIVSCIGNNTQEVLSNLREGKSGISKSEEHVNLGFRSQIYGKPDLDPEDYLDKKVRRFMGMGAAWNYISMQQAIEDSGLEENDVINEKTGIIMGSGGPSTKTLVESADITREKGPKRVGPFAVPKAMSSTNSATLATPFGIKGINYSISSACATSSHCIGNAYELIQFGKQDTMFAGGGEELNWALSVLFDAMGAMSSKYNDKPATSSRAYDKDRDGFVIAGGAGVLVLEEMEKAKARGAKIYAEIVGYGATSDGHDMVQPSGEGAVRCMKMSMENIGCEIDYINPHATSTPIGDEKEVEAIRETFGSKIPNISATKSLTGHSLGAAGVQEAIYYILMMQNDFIAKSANMK

SEQ ID NO: 113993 - protein, 216 aa, Unknown
  Bacterial polypetide isolated from the Sargasso Sea
MPQFKKPTNGINASITAIGGYVPDEILSNKKLESMVDTNDAWIQSKTGIKERRILNDPNKATSYLAVMAAKKLISKNLIDPKQIDMVIVATATPDMQIAATSAYVATKIGATNAFGYDLQAACSGFLYAMSMAVGKIESGRYKKILVIGADKMSSLINYQDRSTCIIFGDGAGAVLFEPNKEKLGWQDEFFKSDGGDRDSLKVKAGGSLFPASKTS

SEQ ID NO: 113994 - protein, 402 aa, Unknown
  Bacterial polypetide isolated from the Sargasso Sea
MKNVVITGVGIKSCIGNTYKDVLSNLQNGKSGIAFNDTYSEMGFRSCVSGSIDVNLSDFIDRKLLRFMGESAGYAYLATADALEMAGIYEEDLDSPRIGIVAGSGGASTRIMVDSGDIARERGPKRIGPYGVTKSMSSSISAIIATALKLKGINYSISSACATSAHCIGHAADLIKNGQQDMVIAGGSDDEHWSSSCLFDAMGALSSNFNSNPTVASRPYDSNRDGFVISGGAGMVILEDEEHAKKRGAKILAKLSGYYANSDGYDMVAPSGEGAIRCMEGAIDQSKVQIEYINTHGTSTPVGDVAELNAIKELFGDNAPMISSTKSMTGHSLGATGAHEAIYSIMMINEDFIAPSINIESLCDEAKGLSIVTSTKETSVNNILSNSFGFGGTNASLVISRY

SEQ ID NO: 113995 - protein, 362 aa, Unknown
  Bacterial polypetide isolated from the Sargasso Sea
FKKSWVHGKPNIKLEDFVDRKFIRFMGPGSAYNYISMNEAVKDSGLEEKDVSNITTGMIMGSGGPSIENVILAADKTREKSPKRMGPFVVPRTMSSTASATLAVPFKIKGVNYTISSACATSGHCIGNAMELIQLGKQKIIFAGGSDEVHFAMTAMFDAMTALSSKYNDTPEKASRPYDKTRDGFVISGGGGVLVLEEYEHAKSRGAKIYAELTGYGATSDGYDMVAPSGEGAVRCMKMALSTTKNKIDYINTHGTSTPVGDITELKAVGEVFSDYKPKISSTKSLAGHSLGATSVHEAVYSLIMMKNNFIAASANINDMDEEAKKYPIVTKVEKDVNLNSVMSNSFGFGGTNATLVFEKVK

SEQ ID NO: 113996 - protein, 403 aa, Unknown
  Bacterial polypetide isolated from the Sargasso Sea
MRRVVVTGLGIVSCLGNNQEEVHQSLLNSKSGISFSEEYKEHNLKSHIHGKPNIKLEDHIDRKTIRFMGSGSAYNYIAMKEAIEDSGLEESEVSNFKTGIVMGSGGPSIENVILAADKTRAKTPKLMGPFIVPRTMASTASATLAVPFKIKGTNYTMSSACATSGHCIGNSMELIQMGKQDIVFAGGSEEIHWAMTAMFDAMTALSSKYNDTPEKASRAYDKTRDGFVIAGGAGVLVLEEYEHAKARGAKIYAELTGYGATSDGYDMVAPSGEGAVRCMQMAMTTSKNKIDYINTHGTSTPVGDITELNAVKDTFGNEIPKISSTKSLSGHPLGAASVHEAIYCLIMMKNNFIAGSANISEMDEDAKKFPIVAKTEIDANLNTVMSNSFGFGGTNATLIFQKV

SEQ ID NO: 113997 - protein, 316 aa, Unknown
  Bacterial polypetide isolated from the Sargasso Sea
LKENEVSNINTGMVMGSGGPSIENVILAADKTREKNPKKMGPFIVPRTMASTASATLAVPFKIKGVNYTISSACATSGHCIGNAMELIQFGKQKIIFAGGSDELHFAMTAMFDAMTALSSKYNDSPDKASRPYDKTRDGFVIAGGAGVLVLEEMEHAKARGAKIYAELTGYGATSDGFDMVAPSGEGATRCMNLALKTTRNKVDYINAHGTSTPVGDITELRAIGNAFKDKIPKISSTKSLSGHPLGAASVHEAIYSLVMMKNNFIAASANVNEMDDEAKKFPIVTKVEKNVTLNSVMSNSFGFGGTNATLIFEKV

SEQ ID NO: 113998 - protein, 403 aa, Unknown
  Bacterial polypetide isolated from the Sargasso Sea
MKRVVITGLGIVSCLGNNQDEVYKSLLDSKSGISFCEEYKEHNLKSHIHGKPNIKLQDHVDRKTIRFMGSGSAYNYIAMKEAIKDSGLENKEVSNFTTGIVMGSGGPSIENVILAADKTRAKTPKLMGPFIVPRTMASTASATLAVPFKIKGVNYTMSSACATSGHCIGNSMELIQSGKQKIMFAGGSEEIHWAMTAMFDAMTALSSKYNDTPETASRAYDKTRDGFVIAGGGGVLVLEEYEHAKARGAKIYAELTGYGATSDGYDMVAPSGEGAVRCMKMAMATSKNKIDYINTHGTSTPVGDITELNAVKDTFGNNIPKISSTKSLSGHPLGAASVHEAIYCLIMMKNNFIAGSANISEMDEEAKKFPIVAKTETGTTLNTVMSNSFGFGGTNAALIFEKV

SEQ ID NO: 113999 - protein, 402 aa, Unknown
  Bacterial polypetide isolated from the Sargasso Sea
MRNVVITGVGIKSCIGNDYAEVLANLQNAKSGIIFNEKYSEMGFRSCVSGSVNIDLSEHIDRKLLRFMGESAGYAYLATKDALKMAGIDESHLDSPKIGIVAGSGGASTRVMLESGDIAREKGPKRIGPYGVTKSMSSSISAIIATALKLKGINYSISSACATSAHCIGHAADLIKSGQQDVVIAGGSDDEHWSSSCLFDAMGALSSNFNSTPTIASRPYDSNRDGFVISGGAGMIILENEEHAKKRGANILAKLSGYFANSDGYDMVAPSGEGASRCMQGAIDNSKIKIDYINTHGTSTPVGDIAEINAIKTLFTSEQPMISSTKSMTGHSLGATGAHEAIYSIMMINENFIAPSINIESLCDDAEGLDIVTETRNISINNVLSNSFGFGGTNASLVITRY

SEQ ID NO: 114000 - protein, 402 aa, Unknown
  Bacterial polypetide isolated from the Sargasso Sea
MKNVVITGLGIKSCIGNEYNSVLKNLQEGKSGIIFNETYDEMNFRSCVSGSIKIDLSEYIDRKLLRFMGESAGYAYLATLDALKMAGVDNNYLDNPRIGIVAGSGGASTRIMVESGDIARNRGPKRIGPYGVTKSMSSSISAIIATALKLKGINYSISSACATSAHCIGHAADIIKNGQQDIVIAGGSDDEHWSSSCLFDAMGALSSNFNADPTIASRPYDSNRDGFVISGGAGMIILEEEEHAKKRGANILAKLSGYFANSDGYDMVAPSGEGATRCMNGAIKGIKSEIDYINTHGTSTPVGDVAELNAIKELFGSNAPMISSTKSMTGHSLGATGAHEAIYSVMMINENFIAPSINIDNLCDEAQGLDIVRETREANIKNILSNSFGFGGTNASLVISKY

SEQ ID NO: 114001 - protein, 412 aa, Unknown
  Bacterial polypetide isolated from the Sargasso Sea
MTRKRVVVTGLGMLSPVGNNVTSSWKKIIEGYSGVKVIDRFDTSDFETKFAATVDINSEDYLDKKEVRRTDPFIQYGLIASNECLDDSEIDLENIDLNRFGVSIGSGIGGLGTIEENKTLLFERGPKKISPFFVPGAISNMVSGYASLKFGLKGPNISIASACSSASHSIGYSFRSIVHGDADLMLTGGSEMATTPLGIAGFNAAKALSTNNENPTEASRPWDQDRDGFVLGEGAGCLLLEEYEHAIARGAKIYAEIIGFGMSADAHHITSPPNEGEGAALSMQNAISDAGIEVSEIDYVNAHGTSTPAGDIAETKAIKAIFKNEIDDLIVSSTKSMTGHLLGAAGAIEAIFSILSIQDNICPPTINLDNPDPECDLNYSAHSATKKIITHSLSNSFGFGGTNATLIFKELD

SEQ ID NO: 114002 - protein, 403 aa, Unknown
  Bacterial polypetide isolated from the Sargasso Sea
MRRVVITGLGIVSCLGNNQEEVHQSLLNTKSGISFSEEYKEHNLKSHIHGKPNIKLEDHIDRKTIRFMGSGSAYNYIAMKEAIEDSGLEESEVSNFKTGIVMGSGGPSIENVILAADKTRAKTPKLMGPFIVPRTMASTASATLAVPFKIKGTNYTMSSACATSGHCIGNSMELIQMGKQDIVFAGGSEEIHWAMTAMFDAMTALSSKYNDTPEKASRAYDKTRDGFVIAGGAGVLVLEEYEHAKARGAKIYAELTGYGATSDGYDMVAPSGEGAVRCMQMAMATSKNKVDYINTHGTSTPVGDITELNAVKEAFGNEIPKISSTKSLSGHPLGAASVHEAIYCLIMMKNNFITGSANISEMDEEAKKFPIVAKTETEATLNTVMSNSFGFGGTNATLVFEKV

SEQ ID NO: 114003 - protein, 403 aa, Unknown
  Bacterial polypetide isolated from the Sargasso Sea
MRRVVITGLGIVSCLGNNQEEVHQSLLNTKSGISFSEEYKEHNLKSHIHGKPNIKLEDHIDRKTIRFMGSGSAYNYIAMKEAIEDSGLEESEVSNFKTGIVMGSGGPSIENVILAADKTRAKTPKLMGPFIVPRTMASTASATLAVPFKIKGTNYTMSSACATSGHCIGNSMELIQMGKQDVVFAGGSEEIHWAMTAMFDAMTALSSKYNDTPEKASRAYDKTRDGFVIAGGAGVLVLEEYEHAKARGAKIYAEITGYGATSDGYDMVAPSGEGAVRCMQMAMATSKNKVDYINTHGTSTPVGDITELNAVKEAFGNEIPKISSTKSLSGHPLGAASVHEAIYCLIMMKNNFITGSANISEMDDEAKKFPIVAKTETEATLNSVMSNSFGFGGTNATLVFEKV

SEQ ID NO: 114004 - protein, 128 aa, Unknown
  Bacterial polypetide isolated from the Sargasso Sea
MKSKIISIGSYTPNNIVTNQDLEKKVDTTDEWIVSRTGIKERPIADDTQATSDLAYEAAKIAVERSKIDKNDIDLIIVGTCTPDVATPNVGTLIQKRLDLKNFSAFSIEAACSGFIYALNIADKFIKS

SEQ ID NO: 114005 - protein, 403 aa, Unknown
  Bacterial polypetide isolated from the Sargasso Sea
MKRVVVTGIGVVSCLGNNQDEVYQSLLNSKSGISFSDEYKEYNLKSNIHGKPKINLEDHVDRKFIRFMGPGSAYNYISMAEAVKDSGLEDKDVSNISTGMIMGSGGPSIENVILAADKTRAKSPKRMGPFVVPRTMSSTASATLAVPFKIKGVNYTISSACATSGHCIGNAMELIQLGKQKIIFAGGSDEVHFAMTAMFDAMTALSSKYNDTPEKASRPYDKTRDGFVIAGGGGVLVLEEYEHAKARGAKIYAELTGYGATSDGYDMVAPSGEGAVRCMKMALSTAKNKIDYINTHGTSTPVGDITELKAVGETFTDYKPKISSTKSLAGHSLGATSVHEAIYSLIMMKNSFIAASANITDMDDEAKKYPIVTKVEKDVNLNSVMSNSFGFGGTNATLVFEKV

SEQ ID NO: 114006 - protein, 403 aa, Unknown
  Bacterial polypetide isolated from the Sargasso Sea
MRRVVITGLGVVSCLGNNQEEVYQSLLNSKSGISFSEEYKEHNLKSHVHGKPKIKLEDHIDRKTIRFMGSGSAYNYIAMKEAIQDSGLEEKEISNFKTGIVMGSGGPSIENVILAADKTRAKTPKLMGPFIVPRTMASTASATLAVPFKIKGTNYTMSSACATSGHCIGNSMELIQMGKQDIVFAGGSEEIHWAMTAMFDAMTALSSKYNDTPESASRAYDKTRDGFVIAGGGGVLVLEEYEHAKARGAKIYAELTGYGATSDGYDMVAPSGEGAVRCMQMAMATAKNKIDYINTHGTSTPVGDITELNAVKNTFGDNIPKISSTKSLSGHPLGAASVHEAIYCLIMMKNNFIAGSANINEMDEEAKKFPIIAKTETGVTLNTVMSNSFGFGGTKCCFSFEKV

SEQ ID NO: 114007 - protein, 310 aa, Unknown
  Bacterial polypetide isolated from the Sargasso Sea
SNFKTGIVMGSGGPSIENVILAADKTRAKTPKLMGPFIVPRTMASTASATLAVPFKIKGTNYTMSSACATSGHCIGNSMELIQLGKQDIVFAGGSEEIHWAMTAMFDAMTALSSKYNDTPETASRAYDKTRDGFVIAGGGGVLVLEEYEHAKARGAKIYAELTGYGATSDGYDMVAPSGEGAVRCMKMAMATAKNKIDYINTHGTSTPVGDITELNAVKETFGSEIPKISSTKSLSGHPLGAASVHEAIYCLIMMKNNFITGSANINEMDNEAKKFPIVAKTETGVALNTVMSNSFGFGGTNAALIFEKV

SEQ ID NO: 114008 - protein, 340 aa, Unknown
  Bacterial polypetide isolated from the Sargasso Sea
LRFMGDAAAYAYISMQQAIDDAGLTPEQVSNFRTGLVVGSGGASSKTQIEAADTLREKGVKRVGPYAVPKTMSSTCSACLATPFEIKGVNYSISSACATSAHCIGHAVELIQLGKQDIIFAGGGEEVHWTLAMEFDAMGALSTKYNETPELASRTYDADRDGFVISGGGGILVVEELEHALARGAKIYAEIVGYGATSDGYDMVAPSGEGAVRCMEMAMKDVKGPIDYVNTHGTSTPVGDVKELGAIQQVFGGKSPAISATKAMTGHALGAAGVHEAIYSLLMMEHNFIAPSINVNTLDEAAAGLNIVTKATEAQLTTVMSNSFGFGGTNATLVMQKYQG

SEQ ID NO: 114009 - protein, 254 aa, Unknown
  Bacterial polypetide isolated from the Sargasso Sea
IKGTNYTISSACATSGHCIGNAMELIQLGKQNIIFAGGSDEVHFAMTAMFDAMTALSSKYNDTPEKASRPYDKTRDGFVIAGGGGVLVLEEYEHAKARGAKIYAELTGYGATSDGYDMVAPSGEGAVRCMKMALATSKNKIDYINTHGTSTPVGDITELKAVGEAFPEYKPKISSTKSLSGHSLGATSVHEAIYSLIMMKNNFISASANISEMDDEAKNYPIVTQVEKDVNLNAIMSNSFGFGGTNATLVFEKV

SEQ ID NO: 114010 - protein, 368 aa, Unknown
  Bacterial polypetide isolated from the Sargasso Sea
SEEYKEYNLKSNVHGKPNIKLEDHVDRKFIRFMGPGSAYNFISMAEAVKDSGLEENEVSNISTGMIMGSGGPSIENVILAADKTRDRTPKKMGPFVVPRTMSSTASATLAVPFKIKGVNYTISSACATSGHCIGNAMELIQLGKQNIIFAGGSDEVHFAMTAMFDAMTALSSKYNDTPEKASRPYDKTRDGFVIAGGGGVLVLEEYEHAKARGAKIYAEITGYGATSDGHDMVAPSGEGAVRCMKMALSTSKNKIDYINTHGTSTPVGDITELKAVGEVFKDNIPKISSTKSLSGHSLGATSVHEAIYSLIMMKNNFISASININDIDDEAKKYPIVTKVEKDKNLDSIMSNSFGFGGTNATLVFEKV

SEQ ID NO: 114011 - protein, 403 aa, Unknown
  Bacterial polypetide isolated from the Sargasso Sea
MKRVVITGIGVVSCLGNNQDEVYQSLVNSKSGITFSEEYKEYNLKSNIHGKPNIKLEDHVDRKFIRFMGPGSAYNFISMAEAVKDSGLEEKEVSNISTGMIMGSGGPSIENVILAADKTREKSPKRMGPFVVPRTMSSTASATLAVPFKIKGVNYTISSACATSGHCIGNAMELIQLGKQNIIFAGGSDEVHFAMTAMFDAMTALSSKYNDTPEKASRPYDKTRDGFVISGGGGVLVLEEYEHAKARGAKIYAEITGYGATSDGFDMVAPSGEGAVRCMQMALSTAKNKIDYINTHGTSTPVGDITELKAVGEVFKDYKPKISSTKSLAGHSLGATSVHEAVYSLIMMKNNFIAASANIIDMDDEAKKYPIVTKVESNVNLNSVMSNSFGFGGTNATLVFEKV

SEQ ID NO: 114012 - protein, 404 aa, Unknown
  Bacterial polypetide isolated from the Sargasso Sea
MREVVITGIGIISSLGNNISEVTNSLRNLKSGISKNIINKELGLRSHVSGSIQNLEPKELIDRKLYRFMGDAAAYAYLSTEEAIKDASLNDSELSNQKTGLIMGSGGASTEDQIDSADILRTKGLKRIGPYRVTKAMGSTVSACLATSFGIKGINYSISSACATSAHCIGSGMEQIQLGKQDIVIAGGGEAEHWGMTSLFDAMGALSTKYNEEPEKASRAYDKDRDGFVIAGGAGSMILEEKQHAIERGAKIYAQLTGYAATSDGADMVSPSGEGGERCMQIAWEMSGGKNIDYINAHGTSTPAGDITELNAIKNVFGDRIPWISSTKSLSGHSLGAAGVQEAIYGLIMMDEGFIAASANIENLDEGAEPFPIVRENVSTELQSFLSNSFGFGGTNASLIFEKI

SEQ ID NO: 114013 - protein, 351 aa, Unknown
  Bacterial polypetide isolated from the Sargasso Sea
LKSNVHGKPNIKLEDYVDRKFIRFMGPGSAYNYVAMNEAVKDSGLEEKDVSNISTGMIMGSGGPSIENVILAADKTREKSPKRMGPFVVPRTMSSTASATLAVPFKIKGVNYTISSACATSGHCIGNAMELIQLGKQKIIFAGGSDEVHFAMTAMFDAMTALSSKYNSTPEKASRPYDKTRDGFVISGGGGVLVLEEYEHAKARGAKIYAELTGYGATSDGYDMVAPSGEGAIRCMKMALNTSKNKIDYINTHGTSTPVGDITELKAVGEVFKDYKPKISSTKSLAGHSLGATSVHEAVYCLIMMKNRFIAASANISDMDDEAKKFPIVTKVEKNIDVNSVMSNSFGFGGT

SEQ ID NO: 114014 - protein, 403 aa, Unknown
  Bacterial polypetide isolated from the Sargasso Sea
MKRVVITGMGVVSSIGNNKQEVTESLKAGRSGITHSAQFEEMQLRSHVWGNIKLDPSELIDRKALRFMGDAAAYAYIAMQEAIKDAQLTEEQYSDPRVGLIVGTGGASSSNQVQAADILREKGVKRVGPYIVPRIMSSTASACLATPFKIKGMNYSISSACATSAHCIGHAVELIQMGKQDMVFAGGSEEVDWTLTMGFDAMGALSTKYNATPEKASRTYDADRDGFVISGGGGILIVEELEHALARGAKIYAEVIGYGASSDGYDMVAPSGEGAVRCMQMALADVDTPIDYINTHGTSTPVGDVRELEALREVFKDKCPPIASTKSMTGHALGAAGVHEAIYSLIMMENSFIAPSINIDNLDEAAKDMPIVREYRDAELNTVMSNSFGFGGTNATLVMRKYK

SEQ ID NO: 114015 - protein, 291 aa, Unknown
  Bacterial polypetide isolated from the Sargasso Sea
MKATITATSRYLPKQIMTNYELEKMVDTSDEWIQSRTGIVERRVVSEGETTSDMCTIIAEELLKRSNTDPNEVDVIIIATVTPDMPTPATASLVQNRIGANNAWGFDLSGACTGFIYALDTGSRLIESGKYNKVIVIGSDTMSSILDYTDRNTCVLFGDGGGGVMLERAKDSDSGVIDSILRTDGSGSDYLKIPGGGSLHPASYETVDQHLHYIRQDGQVVFKYAIKGMADISEEILKKNNIDSNSISLYVPHQANKRIIDGAAQRCGFKDDQVYININKYGNTTAGTIPI

SEQ ID NO: 114016 - protein, 385 aa, Unknown
  Bacterial polypetide isolated from the Sargasso Sea
KKEVYEALINTKSGITFCEEYREYNLKSNIHGKPNIKLDDYVDRKIIRFMGAGSAYNYIAMDEAVKDSGLEEKDVSNISTGMIMGSGGPSIENVILAADKTREKNPKKMGPFVVPRTMASTASATLAVPFKIKGVNYTISSACATSGHCIGNAMELIQLGKQKIIFSGGSDEVHFALTAMFDAMTALSSKYNDMPEKASRPYDKTRDGFVISGGGGVLVMEEYEHAKARGAKIYAEITGYGATSDGYDMVAPSGEGAARCMKMALSTSKNKIDYINTHGTSTPVGDITELNAVGEVFKDKVPKISSTKSLSGHSLGATSVHEAIYSLIMMKNNFISASANINDMDDGAKKFPIVTSVEKDVSLNSIMSNSFGFGGTNATLIFEKV

SEQ ID NO: 114017 - protein, 403 aa, Unknown
  Bacterial polypetide isolated from the Sargasso Sea
MRRVVITGLGVVSCLGNNQEEVHQSLVNSKSGISYAEEYKEHNLKCHVHGKPNIKLEDHIDRKTIRFMGSGSAYNYIAMKEAIEDSGLEESEISNFKTGIVMGSGGPSIENVILAADKTRAKTPKLMGPFIVPRTMASTASATLAVPFKIKGTNYTMSSACSTSGHCIGNSMELIQMGKQDIVFAGGSEEVHWAMTAMFDAMTALTSKYNDTPETASRAYDKTRDGFVIAGGGGVLVLEEYEHAKARGAKIYAELTGYGATSDGYDMVAPSGEGAVRCMKMAMATSKNKIDYINTHGTSTPVGDITELNAIKNTFGDDIPKISSTKSLSGHPLGAASVHEAIYCLIMMKNNFIAGSANISEMDEEAKKFPIVAKTETGATLNTVMSNSFGFGGTNAALIFEKV

SEQ ID NO: 114018 - protein, 353 aa, Unknown
  Bacterial polypetide isolated from the Sargasso Sea
TIHKTLKIIFDRKTIRFMGSGSAYNYIAMKEAIQDSGLEEKEVSNFKTGIVMGSGGPSIENVILAADKTRAKTPKLMGPFIVPRTMASTASATLAVPFKIKGTNYTMSSACATSGHCIGNSMELIQMGKQDIVFAGGSEEIHWAMTAMFDAMTALSSKYNDTPETASRAYDKSRDGFVIAGGGGVLVLEEYEHAKARGAKIYAELTGYGATSDGYDMVAPSGEGAIRCMKMAMSTTKNKIDYINTHGTSTPVGDITELNAVKKTFESEIPKISSTKSLSGHPLGAASVHEAIYCLIMMKNNFIAGSANIIEMDEDAKKFPIVSKTEKGVTLNTVMSNSFGFGGTNAALIFEKV

SEQ ID NO: 114019 - protein, 244 aa, Unknown
  Bacterial polypetide isolated from the Sargasso Sea
MQPNKKTNIKAAITAVGGYVPDDFISNKDLEKMVDTNDEWITARTGIKKRRILKERGKGTSFLAISAAKDLIAKKEINPETIDLVIVSTITPDFHGAPTAPSVASVIKAKNAYAFDLSAACSGFLFGMSSASSYIESGRYKKILLIGADMMSSIVDYTDRSTSILFGDGAGAVLVEPSINGYGWEDEYLRSDGVGAEWLNIKSGGSLYPISEETIANKWHYISQDGKTVFKSAVSEMANATEQN

SEQ ID NO: 114020 - protein, 402 aa, Unknown
  Bacterial polypetide isolated from the Sargasso Sea
MKKVVVTGLGIKSCIGNTYDEVLLSLKNGSSGISFNDVYSEMGFRSCVSGSININLADYIDRKLLRFMGESAGYSYLATKDALDMAGINEEDLDSPRIGIVAGSGGSSTRIMVENGDIARDRGPKRIGPYGVTRSMSSSISAIISTAFKLKGINYSISSACATSAHCIGHAADLIKSGQQDIVIAGGSDDEHWSSSCLFDAMGALSSNFNSSPETASRPYDVNRDGFVIAGGAGMVILEDEEHAKKRGANILAKISGYYANSDGYDMVAPSGEGAARCMKGAMKDAGLEIDYINTHGTSTPVGDVAELKAINEVFSSNSPAISSTKSMTGHSLGATGAHEAIYSIMMINNGFIAPTINVDELCDEAKDLDIVTETRDCEISNVLSNSFGFGGTNASLVLSKF

SEQ ID NO: 114021 - protein, 403 aa, Unknown
  Bacterial polypetide isolated from the Sargasso Sea
MRRVVITGLGVVSCLGNNQEEVHQSLLNSKSGISYAEDYKEHNLKSHVHGKPNIKLEDHIDRKTIRFMGSGSAYNYIAMKEAIEDSGLEESEVSNFKTGIVMGSGGPSIENVILAADKTRAKTPKLMGPFIVPRTMASTASATLAVPFKIKGTNYTMSSACATSGHCIGNSMELIQMGKQDVVFAGGSEEIHWAMTAMFDAMTALSSKYNDTPQSASRAYDKTRDGFVIAGGAGVLVLEEYEHAKARGAKIYAELTGYGATSDGYDMVAPSGEGAVRCMKMAMATAKNKIDYINTHGTSTPVGDITELNAIKETFGEDIPKISSTKSLSGHPLGAASVHEAIYCLIMMKNNFITGSANITDMDDDAKKFPIVSKTETGATLNTVMSNSFGFGGTNAALIFEKV

SEQ ID NO: 114022 - protein, 399 aa, Unknown
  Bacterial polypetide isolated from the Sargasso Sea
VISGIGIVSCIGNNQDEVYKSLLNSKSGISFSEEYKEYNLKSNVHGKPNIKLEDHVDRKFIRFMGPGSAYNYVSMNEAVKDSGLEEKDVSNINTGMIMGSGGPSIENVILAADKTRAKSPKRMGPFVVPRTMSSTASATLAVPFKIKGVNYTISSACATSGHCIGNAMELIQLGKQKIVFAGGSDEVHFAMTAMFDAMTALSSKYNDTPEKASRPYDKTRDGFVISGGGGVVVLEEYEHAKARGAKIYAELTGYGATSDGFDMVAPSGEGAVRCMKMALETAKNKIDYINTHGTSTPVGDITELKAVGEVFNEYKPKISSTKSLAGHSLGATSVHEAIYSLIMMKNNFIAASANITDMDEEAKKYPIVTKVEKDVTLNSIMSNSFGFGGTNATLVFEKV

SEQ ID NO: 114023 - protein, 200 aa, Unknown
  Bacterial polypetide isolated from the Sargasso Sea
ALSSKYNNTPETASRAYDKTRDGFVIAGGGGVLVLEEYEHAKARGAKIYAELTGYGATSDGYDMVAPSGEGAVRCMKMAMATTKNKVDYINTHGTSTPVGDITELNAVKETFGDDIPKISSTKSLSGHPLGAASVHEAIYCLIMMKNNFIAGSANINEMDDEAKKFPIIVKTEKNKTLNTVMSNSFGFGGTNAALIFEKV

SEQ ID NO: 114024 - protein, 286 aa, Unknown
  Bacterial polypetide isolated from the Sargasso Sea
NPFFIPKMIPDIAPGVISIRHGFKGPNFATVSACASSANALIDALNYIRLGYSDIIVSGGSEAGIIKSGIGGFNAVQALSKRNDDPKTASRPFDLDRDGFVLGEGGGCIILEELEHAKSRGAKIYAEVSGAGLSADAYHMTAPHPEGEGAINVMNNCLADSGLSYKDVDLINMHGTSTPLGDKAEAKAVKAVFKDHAYNLNINSTKSMTGHLLGAAGAVEAISCILAINNNIVPPTINHFNDDPEIDNKLNFTFNTSQKREVKVAMSNTFGFGGHNACVLLKEFVD

SEQ ID NO: 114025 - protein, 275 aa, Unknown
  Bacterial polypetide isolated from the Sargasso Sea
MQLPRRVVVTGMGLISPLGNSVIESWSNCIKGCSGISENIVDLEDMPIKVGGRIYDFDPTRYIDSKDIRRLDTFVQYGVSAGIQAIEDAGLDNNVDKDRVGLNIGSGIGGLDSIEKNKDILNKKSFKRVSPFFVPGSIINMTPGYLSIIKGYTGPNLSIVTACASSNHAIGTSARLIAYGDADVMVTGGSEMATTPLGVSGFLASRALSKSDDPKTASRPWDKDRDGFVLSDGAAILVLEEYEHAKKRSANIYAEVIGFGMSSDAYHMTAPSEDG

SEQ ID NO: 114026 - protein, 232 aa, Unknown
  Bacterial polypetide isolated from the Sargasso Sea
MELIQLGKQNIIFAGGSDEVHFAMTAMFDAMTALSSKYNDTPEKASRPYDKTRDGFVISGGGGVLVLEEYEHAKARGAKIYAELTGYGATSDGYDMVAPSGEGAIRCMKMALSTSKNKIDYINTHGTSTPVGDITELKAVGEVFKDNTPKISSTKSLSGHSLGATSVHEAIYSLIMMENNFISASINITDIDDEAKKYPIITKVEKDVKLNSIMSNSFGFGGTNATLVFEKI

SEQ ID NO: 114027 - protein, 403 aa, Unknown
  Bacterial polypetide isolated from the Sargasso Sea
MKRVVITGMGVVSSIGNNKQEVTESLKAGRSGITHSAQFEEMQLRSHVWGNIKLDPSELIDRKALRFMGDAAAYAYIAMQEAIKDAQLTEEQYSNPRVGLIVGTGGASSSNQVQAADILREKGVKRVGPYIVPRIMSSTASACLATPFKIKGMNYSISSACATSAHCIGHAVELIQMGKQDMVFAGGSEEVDWTLTMGFDAMGALSTKYNDTPEKASRTYDADRDGFVISGGGGILIVEELEHALARGAKIYAEVIGYGASSDGYDMVAPSGEGAVRCMQMALADVDTPIDYINTHGTSTPVGDVRELEALREVFKDKCPPVASTKSMTGHALGAAGVHEAIYSLIMMENSFIAPSINIDNLDEAAKDMPIVREYRDAELNTVMSNSFGFGGTNATLVMRKYK

SEQ ID NO: 114028 - protein, 403 aa, Unknown
  Bacterial polypetide isolated from the Sargasso Sea
ASGVEETWSRIINGDSGAGLITRFNADRVATKYACEVPHGDGLNGTFNADDWMEPKERRKVDDFILYGIAASEMAVRDADWMPTDEASLLRTGVMIGSGIGGLNSIAETAVMINERGPRRISPFFIPGALINLISGQVSIRFGFKGPNHSVVTACSTGAHAIGDAARLIGTNDADVMIAGGAEAAISEIGIGGFNACKALSTKRADDPTRASRPYDVDRDGFVMGEGAGIVVLEEYEHAKSRGAKIYAEVVGYGLSGDAYHITAPSENGEGGERSMLAALKKAGIEPDQLGYINAHGTSTMADVIELAAVERMMGDNAGQLTMSSTKSSTGHLLGAAGAIEAIFTILAIRDQVAPPTINLDNLAIETQIDLAPNQKVSREINYAISNSFGFGGTNASLLLAKV

SEQ ID NO: 114029 - protein, 232 aa, Unknown
  Bacterial polypetide isolated from the Sargasso Sea
MELIQMGKQDVVFACGSEEIHWAMTAMFDAMTALSSKYNDTPEKASRAYDKTRDGFVIAGGAGVLVLEEYEHAKARGAKIYAELTGYGATSDGYDMVAPSGEGAVRCMQMAMATSKNKVDYINTHGTSTTVGDITELNAVKEAFGNEIPKISSTKSLSGHPLGAASVHEAIYCLIMMKNNFITGSANISEMDEEAKKFPIVDKTETEATLNTVMSNSFGFGGTNATLVFEKV

SEQ ID NO: 114030 - protein, 182 aa, Unknown
  Bacterial polypetide isolated from the Sargasso Sea
MGEGSGCLLLEEYEHAKARGAKIYAEIVGFGMSADAYHITSPPDGGSGAALSMQNAINDAQLTPSDIDYINAHGTSTPAGDIAETQAIKTVFNESTKDLIVSSTKSMTGHLLGAAGAIEAIFSVLSIKNNLCPPTINLDNPDVGCDLNYSAHQASEKSVSYSLSNSFGFGGTNATLIFKELD

SEQ ID NO: 114031 - protein, 405 aa, Unknown
  Bacterial polypetide isolated from the Sargasso Sea
MRRVAVTGMGIVSCIGNNTQEVLSNLREGKSGISKSEEHVDLGFRSQIYGKPDLDPEEYLDKKTRRFMGMGAAWNYISMQQAIEDAGLEEKDIINEKTGIIMGSGGPSTKTLVESADITREKGPKRVGPFAVPKAMSSTNSATLATPFGIKGINYSISSACATSSHCIGNAYELIQFGKQDTMFAGGGEELNWALSVLFDAMGAMSSKYNDNPATSSRAYDKDRDGFVIAGGAGVLVLEEMEKAKARGAKIYAEIIGYGATSDGHDMVQPSGEGAVRCMRMSMENIGCEIDYINPHATSTPIGDEKEVEAIRETFGNKIPNISATKSLTGHSLGAAGVQEAIYSILMMQNDFIAKSANIENIDPKFEDLPINRERIDNANIGCLLSNSFGFGGTNASLVFKNPNL

SEQ ID NO: 114032 - protein, 350 aa, Unknown
  Bacterial polypetide isolated from the Sargasso Sea
IKIEDYVDRKFIRFMGPGSAYNYISMAEAVKDSGLEEKDVSNASTGMIMGSGGPSIQNVILAADKTREKNPKKMGPFVVPRTMSSTASATLAVPFKIKGVNYTISSACATSGHCIGNAMELIQLGKQKIIFAGGSDEVHFAMSAMFDAMTALSSKYNDTPEKASRPYDKTRDGFVISGGGGVLVLEEYEHAKARGAKIYAELTGYGATSDGYDMVAPSGEGAVRCMKMALSTSKNKIDYLNTHGTSTPVGDITELKAVGEVFKDNVPKISSTKSLSGHSLGATSVHEAVYSLIMMKNKFISASINITDMDDEAKKYPIVTKVEKDVTLNAIMSNSFGFGGTNATLVFEKV

SEQ ID NO: 114033 - protein, 357 aa, Unknown
  Bacterial polypetide isolated from the Sargasso Sea
MVHGKPEIDLAENIDRKILRFMGDGAAYNYISMKEAINDSGLSENDISNENTGIIVGSGGPSTQNFLNAYEIAKSKGSKKVGPYMVTRTMSSTNTATLATPFKIKGVNYSISSACSTSSHCIGNAYELIQFGKQKIVFAGGGEEVHWTMSVLFDAMGALSSKYNDNPQVASRAYDADRDGFVIAGGGGTLVLEEYEHAKARGAKIYGEITGYGATSDGFDMVQPSGEGATRCMAQALKTVNGKIDYLNTHGTSTPIGDIKEIESIKNVFKNDIPYLSSTKSLTGHSLGATGVHEAIYCLLMMENNFLAGSANIKNLDENAKNSNILLETIDNRNIKNVMSNSFGFGGTNATLVFSKI

SEQ ID NO: 114034 - protein, 197 aa, Unknown
  Bacterial polypetide isolated from the Sargasso Sea
QNITIPPEKASRPYDKTRDGFVIAGGGGVLVLEEYEHAKARGAKIYAELTGYGATSDGYDMVAPSGEGAVRCMKMALATSKNKIDYINTHGTSTPVGDITELKAVGEAFPDYKPKISSTKSLSGHSLGATSVHEAIYSLIMMKNNFISASANISEMDDEAKNYPIVTQVEKDVNLNAIMSNSFGFGGTNATLVFEKV

SEQ ID NO: 114035 - protein, 307 aa, Unknown
  Bacterial polypetide isolated from the Sargasso Sea
MKRVVITGIGVVSCLGNNQDEVYQSLLNSKSGITFSEEYKEYNLKSNIHGKPNIKLEDHVDRKFIRFMGPGSAYNYVSMKEAVKDSGLKEKDVSNISTGMIMGSGGPSIENVILAADKTREKNPKRMGPFVVPRTMSSTASATLAVPFKIKGVNYTISSACATSGHCIGNAMELIQLGKQKIVFAGGSDEVHFAMTAMFDAMTALSSKYNDTPEKASRPYDKTRDGFVISGGGGVLVLEEYEHAKARGAKIYAELTGYGATSDGYDMVAPSGEGAVRCMKMALSTSKNKIDYINTHGTSTPVGDITE

SEQ ID NO: 114036 - protein, 225 aa, Unknown
  Bacterial polypetide isolated from the Sargasso Sea
AYSFDMSAACSGFLYSLVTGSQFIESGTHKKVVVVGADKMSSIVDFEDRNNCVLFGDGGGAVLLEPSLDENGIIDHILKSDGSGGSYLCIKGGGSKYPASLETINNKDHFIYQEGKRVFKFAVTNMANVSEEIMLKNNLKSNDISYLVPHQANKRIIDATAKKMGIGDKKVLMNIEKYGNTTAGTIPLCLWDFEKKLKKGDNLILSAFGGGFTWGSVYLKWSYNS

SEQ ID NO: 114037 - protein, 313 aa, Unknown
  Bacterial polypetide isolated from the Sargasso Sea
KEISNFSTGIVMGSGGPSIENVILAADKTRAKTPKLMGPFIVPRTMASTASATLAVPFKIKGTNYTMSSACATSGHCIGNSMELIQMGKQDIVFAGGSEEIHWAMTAMFDAMTALSSKYNDTPQSASRAYDKTRDGFVIAGGAGVLVLEEYEHAKARGAKIYAELTGYGATSDGYDMVAPSGEGAVRCMKMAMATTKNKIDYINTHGTSTPVGDITELKAIKETFGEEIPKISSTKSLSGHPLGAASVHEAIYCLIMMKNNFIAGSANISEIDEDAKKFPIVSKTETNSTLNTVMSNSFGFGGTNAALIFEKI

SEQ ID NO: 114038 - protein, 300 aa, Unknown
  Bacterial polypetide isolated from the Sargasso Sea
MKRVVVTGIGVVSCLGNNQKEVFDSLINSKSGISFSEEYKEYNLKSHVHGKPKIKLEDHVDRKFIRFMGPGSAYNYISMAEAVKDSGLEEKYVSNVSTGMIMGSGGPSIENVILAADKTRAKSPKRMGPFVVPRTMSSTASATLAVPFKIKGVNYTISSACATSGHCIGNAMELIQLGKQKIIFAGGSDEVHFAMTAMFDAMTALSSKYNDTPEKASRPYDKTRDGFVIAGGGGVLVLEEYEHAKARGAKIYAELTGYGATSDGYDMVAPSGEGAVRCMKMALNTSKNKIDYINTHGTST

SEQ ID NO: 114039 - protein, 411 aa, Unknown
  Bacterial polypetide isolated from the Sargasso Sea
MKVGYLNNEKSCYYRYWHCICLENNQNEVYNSLLNSKSGISFADEYKEHNLKSHVHGKPNIKLEDHVDRKTIRFMGSGSAYNYIAMKEAVVDSGLEEKEISNFKTGIVMGSGGPSIENVILAADKTRAKTPKLMGPFIVPRTMASTASATLAVPFKIKGVNYTMSSACATSGHCIGNSMELIQSGKQDIMFSGGSEELHWAMTAMFDAMTALSSKYNETPEKASRAYDKTRDGFVIAGGGGVLVLEEYEHAKARGAKIYAEITGYGATSDGYDMVAPSGEGAVRCMNMALATMKNKKIDYLNTHGTSTPVGDITELKAIGEAFGENVPKISSTKSLSGHPLGAASVHEAIYSLIMMKNNFITASANIGDMDDEAKKFPIVTKTEKDVNLNSVMSNSFGFGGTNATLVFEKV

SEQ ID NO: 114040 - protein, 403 aa, Unknown
  Bacterial polypetide isolated from the Sargasso Sea
MKRVVVTGIGIVSCLGNNQKEVYDSLINNKSGISFAEEYKEHNLKSHVHGKPNIKLADYVDRKALRFMGNGSAYNYVAMKEAISDSGLEDKDVSNVNSGMVMGSGGPSIENVILAADKTREKNPKKMGPFIVPRTMASTASATLAVPFKIKGVNYTISSACATSGHCIGNAMELIQFGKQKVIFAGGSDEIHFAMTAMFDAMTALSSKYNDSPQKASRPYDKTRDGFVIAGGAGVLVLEELEHAKARGAKIYAELTGYGATSDGYDMVAPSGEGATRCMNLALKTTRNKVDYINAHGTSTPVGDITELKAIKGAFKDNVPKISSTKSLSGHPLGAASVHEAIYSIIMMKNNFIAASANVNEMDDEAKSFPIVTKVEKDVKLNSVMSNSFGFGGTNATLIFEKV

SEQ ID NO: 114041 - protein, 282 aa, Unknown
  Bacterial polypetide isolated from the Sargasso Sea
KNPKKMGLFIVPRTMASTASATLAVPFKIKGTNYTISSACATSGHCIGNAMELIQLGKQNIIFAGGSDEVHFAMTAMFDAMTALSSKYNDTPEKASRPYDKTRDGFVIAGGGGVLVLEEYEHAKARGAKIYAELTGYGATSDGYDMVAPSGEGAVRCMKMALATSKNKIDYINTHGTSTPVGDITELKAVGEAFPEYKPKISSTKSLSGHSLGATSVHEAIYSLIMMKNNFISASANISEMDDEAKNYPIVTQVEKDVNLNSIMSNSFGFGGTNATLVFEKV

SEQ ID NO: 114042 - protein, 399 aa, Unknown
  Bacterial polypetide isolated from the Sargasso Sea
MRRVVVTGIGVVSSIGNSKDQVLDSLKKGASGIDYREDFEEMGLKSRIAGSIKLDLNEHVDRKLKRFMSDGIAFNYLAMKEAVEDSGLSEEQVSDIRTGLIMGNGGGSPETIVSGADSLREKGKVSPFLVTRSMASGNSGVLGTAFKIKGINYSISSACATSAHCIGNAAELIQFDKQDVVFAGAGDEVHWVLASFFDGMKALSTNHNDNPQLASRPFDANRDGFVISGGGGVVVLEEYEHAIARGANIYGELVGYGATSDGFDMVQPSGEGAMRCMQQAMQGNNKIDYLNAHGTSTPVGDMRELEAVRQVFGEDTPKITSTKSLTGHSLGVAGVHEAIYTILMLHHDFISPSINIENIDENAEGFNIVTDLIEEAGLETVMSNSFGFGGTNASLVFKK

SEQ ID NO: 114043 - protein, 403 aa, Unknown
  Bacterial polypetide isolated from the Sargasso Sea
MKRVVVTGIGVVSCLGNNQKEVYDSLVNNKSGISFAEEYKEHNLKSHVHGKPNIKLADYVDRKALRFMGNGSAYNYIAMKEAISDSGLEDKDVSNVNSGMVMGSGGPSIENVILAADKTREKNPKKMGPFIVPRTMASTASATLAVPFKIKGVNYTISSACATSGHCIGNAMELIQFGKQKVIFAGGSDEIHFAMTAMFDAMTALSTKYNDSPQKASRPYDKARDGFVIAGGAGVLVLEELEHAKARGAKIYAELTGYGATSDGYDMVAPSGEGATRCMNLALKTTRNKVDYINAHGTSTPVGDITELKAIKGAFKDNVPKISSTKSLSGHPLGAASVHEAIYSLIMMKNNFIAASANVNEMDEEAKSFPIVTKVEKDVKLNSVMSNSFGFGGTNATLIFEKV

SEQ ID NO: 114044 - protein, 208 aa, Unknown
  Bacterial polypetide isolated from the Sargasso Sea
MKSKITSIGSYTPNNIVTNKDLEKRVDTTDEWIVSRTGIKERPIADDSQATSDLAFEAAKIAIERANIDKNEIDLIIVGTCTPDVATPNVGTIVQKRLELKNFPAFSIEAACSGFIYALNIADKFIKSGESKCALVIGAETLSRITNWDDRNTCVLFADGAGAAILSHQMTEGLYFPSLVPMVNTLSFSTYPMERLESRRHPMQMITN

SEQ ID NO: 114045 - protein, 111 aa, Unknown
  Bacterial polypetide isolated from the Sargasso Sea
MSGNEVFKVAVKTLEEIAIDALKKSNLQSKDIDWFIPHQANMRIIQAVAKRLELPEEKVILSMDIHGNTSAASIPLAFDRAVQDGRIKKGDTILMQSFGAGFTWGSVILDL

SEQ ID NO: 114046 - protein, 371 aa, Unknown
  Bacterial polypetide isolated from the Sargasso Sea
ITFSEEYKEYNLKSNVHGKPNIKLEDHVDRKFIRFMGPGSAYNYISMAEAVKDSGLEENEVSNISTGMIMGSGGPSIENVILAADKTREKSPKRMGPFVVPRTMSSTASATLAVPFKIKGVNYTISSACATSGHCIGNAMELIQLGKQNIIFAGGSDEVHFAMTAMFDAMTALSSKYNDTPEKASRPYDKTRDGFVISGGGGVLVLEEYEHAKARGAKIYAEITGYGATSDGYDMVAPSGEGAVRCMQMALSTSKNKIDYINTHGTSTPVGDITELKAVGEVFKDYKPKISSTKSLAGHSLGATSVHEAVYSLIMMKNNFIAASVNITDMDEEAKNYPIVTKVEKDTNLNSVMSNSFGFGGTNATLVFEKV

SEQ ID NO: 114047 - protein, 410 aa, Unknown
  Bacterial polypetide isolated from the Sargasso Sea
MKQLHRRVVVTGLGILSPIGNTLSEAWDSCINGVSGISKIEIDLKNNPVKVGGRLKNFNPEDFLDSKEIRRIDPFIQYGIIAANQSINHSGILDSKIDLSKVGINFGAGIGGIDTIEKNKSLLEKRGYKKVSPFFVPGSIVNMISGLISIKHGFMGPNTSVVTACSTGNHCIGTAARSIAYGEADVMIAGGAEMASTPLSIAGFTAARALSMNSDPETASRPWHKDRDGFVLSDGAGSLVLEDFDHAKARGAKIHAEVIGFGTSSDAHHMTAPPEDGRGAALSMTNAINDAEIRPSEIDYINAHGTSTPLGDIAETTALKKVFGDNVPQISSTKSMTGHTLGAAGAIESIFCIQAINHGIIPPTINLDKPDPLCDLNYTPLVSVEKNIRVAMNNSFGFGGTNSTLVFKQI

SEQ ID NO: 114048 - protein, 147 aa, Unknown
  Bacterial polypetide isolated from the Sargasso Sea
MSSDAYHMTAPPETGAGARLAMQNALNDSNIDQSEISYINAHGTSTPLGDIAESKAIEEIFNEPPIVSSTKSMTGHTLGAAGAIESVFTIMSIYKDVIPPTINLKNQDDQCTLDYNCGDARETKIQYAMNNSFGFGGTNSSLVFKKI

SEQ ID NO: 114049 - protein, 86 aa, Unknown
  Bacterial polypetide isolated from the Sargasso Sea
QLEASQIDWLVPHQANKRIIDSTARKLGMGTDRIVLTISEHANTSAASIPLALDSAIRDGRIKKGHLLLMEAMGGGLTWGAALVRW

SEQ ID NO: 114050 - protein, 259 aa, Unknown
  Bacterial polypetide isolated from the Sargasso Sea
MFLFKIKGVNYTISSACATSGHCIGNAMELIQLGKQKIIFAGGSDEVHFAMTAMFDAMTALSSKYNSTPDKASRPYDKTRDGFVISGGGGVLVLEEYEHAKARGAKIYAELTGYGATSDGYDMVAPSGEGAVRCMKMALGTTNKKIDYINTHGTSTPVGDITELKAVGEVFSDYKPKISSTKSLAGHSLGATSVHEAIYSLIMMKNNFIAASANITDMDEEAKKYPIVTKVEKNVNLNAIMSNSFGFGGTNATLVFEKI

SEQ ID NO: 114051 - protein, 235 aa, Unknown
  Bacterial polypetide isolated from the Sargasso Sea
IENGIVDIVVTGGTESGTTPMTIAAFAQIRALSTQNDNPKEACKPFDKNRDGFVMGEGSTVLILESEESAKSRDAEIYAYIDGYGSTTDAYHITAPAEGGAGAVKAMEKAIEDAGITPSDIDYINAHGTSTPANDKNETEAIKTVLGEEASEVVISSTKSMTGHLLGGGGAFESMASILSIKHSKVPPTINLNDPDEECDLNYTPNNAVDLSIKTAMSNSFGFGGHNAVLVFKKS

SEQ ID NO: 114052 - protein, 288 aa, Unknown
  Bacterial polypetide isolated from the Sargasso Sea
ADILRSKGLKRIGPYRVTKAMGSTVSACLATSFGIKGINFSISSACATSAHCIGSGMEQIQLGKQDIVIAGGGEAEHWGMTSLFDAMGALSTKYNDNPQSASRAYDKDRDGFVIAGGAGTVILEEKQHAINRGAEIIAQLTGYAATSDGEDMVSPSGEGGERCMQIALEMSGNKTVDYINAHGTSTPAGDITELNAIKSVFGDSIPWISSTKSLSGHSLGAAGVQEAIYGLIMMKEGFIVGSANIENIDEGAESFPIVRENFSTELKSFLSNSFGFGGTNATLIFEKP

SEQ ID NO: 114053 - protein, 401 aa, Unknown
  Bacterial polypetide isolated from the Sargasso Sea
VVVTGLGVVSCLGNNQDEVYKSLLNAKSGITFAEEYKEYNLKSHVHGKPNIKLEDHVDRKFIRFMGPGSAYNYVSMNEAVKDSGLEEKDVSNVTTGMIMGSGGPSIENVILAADKTREKSPKRMGPFVVPRTMSSTASATLAVPFKIKGVNYTISSACATSGHCIGNAMELIQLGKQKIIFAGGSDEVHFAMTAMFDAMTALSSKYNDTPEKASRPYDKTRDGFVIAGGGGVLVLEEYEHAKSRGAKIYAELTGYGATSDGYDMVAPSGEGAIRCMKMALSTAKNKIDYINTHGTSTPVGDITELKAVGEVFNEHKPKISSTKSLAGHSLGATSVHEAIYSLIMMKNNFIAASANINDMDEEAKKYPIVTAVEKEVNLNSVMSNSFGFGGTNATLVFEKVK

SEQ ID NO: 114054 - protein, 138 aa, Unknown
  Bacterial polypetide isolated from the Sargasso Sea
MHSKILGTGSYLPNSVRTNADLEQMVETSDEWIVERTGIRERRIAGADETVATLSHQAALRALDAAGLTAADLDMIVLATTSAENAFPAAACELQGLLGVQGIPAFDVAAACAGFTYALSIADQFVKSGAARHVLVSA

SEQ ID NO: 114055 - protein, 373 aa, Unknown
  Bacterial polypetide isolated from the Sargasso Sea
MRRVVVTGIGLLSTLGNDLNTSWNNLISCKSGIKRISHFDVSDLTSKIAGYIENDPNNSDYFNKLKYLETRDLKRNDRFIQYGLVAAKMAIEDAGLNNLNEEDKLKVGVSVGSGIGGLETIYDGSITINERGSKKLSPFFIPSSLVNLLSGQISIKYGYKGPNHSVVTACATGAHSIGDSSEIIKRGAANVMVAGGSEAAVCKLGIAGFCAARSLSTSFNETPHLASRPWDKDRDGFVMGEGSGIIVLEELEFAKKRGAKIYAELIGYGMSGDAFHITAPSEDGDGGFRAMKASLDMAKITPEDVDYINAHGTSTVKGDEIELNAISRLFKNKIYVSSTKSSIGHLLGAAGSVEAIFSIMAFKQKYYACYTKS

SEQ ID NO: 114056 - protein, 299 aa, Unknown
  Bacterial polypetide isolated from the Sargasso Sea
SGGPSTRIMVQNGDIAREKGPKRIGPYGVTKSMSSSISAILATALKLKGINYSISSACATSAHCIGHAAELIKSGQQDIVIAGGSDDEHWTSSALFDAMGALSSNFNSSPSEASRPYDSDRDGFVISGGSGIVILEDEEHAKKRNANILAKLSGYFANSDGYDMVAPSGEGAVRCMQGAIDNSKCKIDYINTHGTSTPVGDIAELNAIKEVFGDDSPLISSTKSMTGHSLGATGAHEVIYSTMMINEDFVAPSININNLCEEAKGLNIVTETQEKKLNSILSNSFGFGGTNASLVISKY

SEQ ID NO: 114057 - protein, 355 aa, Unknown
  Bacterial polypetide isolated from the Sargasso Sea
MREVVVTGYGIISCLGNDVIDVTKSLKNSSSGISLNKVNKDLGLRSHISGSIENLDVKEKIDRKLYRFMGDAAAYAYLSAKEAIDNANLTDEFLTSLRTGIIMGSGGASSEDQIESADILRNKGLKRIGPYRVTKAMGSTVSACLATSFGIKGINYSISSACATSAHCIGAGMEQIQLNKQDVIIAGGGEAEHWGMTSLFDAMGALSTKYNDTPKKASRAFDKDRDGFVIAGGGGAVILEEKQHALSRGAKIYAELTGYAATSDGQDMVSPSGEGGQRCMELAWNMCGNKKIDYINAHGTSTPAGDITELNAIKKVFNDEIPAISSTKSLSGHSLGAAGVQEAIYSLIMLENGFI

SEQ ID NO: 114058 - protein, 310 aa, Unknown
  Bacterial polypetide isolated from the Sargasso Sea
SNILTGMVMGSGGPSIENVILASDKTREKNPKKMGPFIVPRTMASTASATLAVPFKIKGTNYTISSACATSGHCIGNAMELIQLGKQNIIFAGGSDEVHFAMTAMFDAMTALSSKYNNTPEKASRPYDKTRDGFVIAGGGGVLVLEEYEHAKARGAKIYAELTGYGATSDGYDMVAPSGEGAVRCMKMALSTSKNKIDYINTHGTSTPVGDITELKAVGEAFTDYKPKISSTKSLSGHSLGATSVHEAIYSLIMMKNNFISASANILEMDDEAKNYPIITQVEKDANLNAIMSNSFGFGGTNATLVFEKV

SEQ ID NO: 114059 - protein, 403 aa, Unknown
  Bacterial polypetide isolated from the Sargasso Sea
MKRVVVTGIGVVSCLGNNQEEVYQSLLNSKSGITFSEEYKEYNLKSNVHGKPNIKLEDYVDRKFIRFMGPGSAYNYISMAEAVKDSGLEEKDVSNILTGMIMGSGGPSIENVILAADKTREKNPKKMGPFVVPRTMSSTASATLAVPFKIKGVNYTISSACATSGHCIGNAMELIQLGKQKIVFAGGSDEVHFAMTAMFDAMTALSSKYNDTPDKASRPYDKTRDGFVISGGGGVLVLEEYEHAKARGAKIYAELTGYGATSDGYDMVAPSGEGAVRCMQMALNTSKNKIDYINTHGTSTPVGDITELKAVGEVFKENIPKISSTKSLSGHSLGATSVHEAVYSLIMMKNNFISASINITDMDDEAKKYPIVTKVERDTTLNSIMSNSFGFGGTNATLVFEKV

SEQ ID NO: 114060 - protein, 134 aa, Unknown
  Bacterial polypetide isolated from the Sargasso Sea
MVEQFHRTGGVVFRGSGSATPQRSISNNELGQRVETSDDWIRSRTGIAARRVIGADESLSELNARAAERALAMAGWSAETLDLILLATSTPDDLFGSAPRLQARIGAVNAAAFDLTAACSGFLFAVVTAAQYLR

SEQ ID NO: 114061 - protein, 330 aa, Unknown
  Bacterial polypetide isolated from the Sargasso Sea
KMLIWIIVPLTKSCWCLWGSGIGGLETFQIEATNFAEGDGTPRYNPFFIPKMIPDIAPGVISIRHGFKGPNFATVSACASSANALIDALNYIRLGYSDIIVSGGSEAGIIKSGIGGFNAVQALSKRNDDPKTASRPFDLDRDGFVLGEGGGCIILEELEHAKSRGAKIYAEVSGAGLSADAYHMTAPHPEGEGAINVMNNCIADSGLSYKDVDLINMHGTSTPLGDKAEAKAVKAVFKDHAYNLNINSTKSMTGHLLGAAGAVEAISCILAINNNIVPPTINHFNDDPEIDNQLNFTFNSSQKREVTVAMSNTFGFGGHNACVLLKEFVD

SEQ ID NO: 114062 - protein, 402 aa, Unknown
  Bacterial polypetide isolated from the Sargasso Sea
MKNVVITGVGIKSCIGNDYNDVLVNLKEGKSGIRFNETYSKMGFRSCISGSININLSDYIDRKLLRFMGESSGYAYLATKDALNMAGIEEKDLDSPRIGIVAGSGGASTRVMVESGDIAREKGPKRIGPYGVTKSMSSSISAIISTALKLKGVNYSISSACATSAHCIGHAADLIKNGQQDIVIAGGSDDEHWSSSCLFDAMGALSSNFNSNPSSASRPYDTNRDGFVISGGAGMIILEEEEHAKKRGAKILAKLSGYFANSDGYDMVAPSGEGAMRCMEGAMKQSKVKIDYINTHGTSTPVGDIAELNAIKELFNADKPMISSTKSMTGHSLGATGAHEAIYSIMMINENFVAPSINIESVCDEAKGIDIVTNTREVQLENILTNSFGFGGTNASLIISKY

SEQ ID NO: 114063 - protein, 404 aa, Unknown
  Bacterial polypetide isolated from the Sargasso Sea
MREVVITGIGIISSLGNNISEVTNSLRNLKSGISKNLINKELGLRSHVSGSIQNLEPKELIDRKLYRFMGDAAAYAYLSTEEAIKDASLSDSELSNHTTGLIMGSGGASTEDQIDSADILRTKGLKRIGPYRVTKAMGSTVSACLATSFGIKGINYSISSACATSAHCIGSGMEQIQLGKQDIVIAGGGEAEHWGMTSLFDAMGALSTKYNEEPEKASRAYDKDRDGFVIAGGAGSMILEEKQHAIERGAKIYAQLTGYAATSDGLDMVSPSGEGGERCMQIAWEMSGNKNIDYINAHGTSTPAGDITELNAIKNVFGDKIPWISSTKSLSGHSLGAAGVQEAIYGLIMMDEGFIAGSANIENLDEGAETFPIVSENVSTELQSFLSNSFGFGGTNASLIFEKI

SEQ ID NO: 114064 - protein, 402 aa, Unknown
  Bacterial polypetide isolated from the Sargasso Sea
MKNVVITGLGIKSCIGNEYNSVLKNLQEGKSGIIFNETYDEMNFRSCVSGSIKIDLSEYIDRKLLRFMGESAGYAYLATLDALKMAGVDNNYLDNPRIGIVAGSGGASTRIMVESSDIARNRGPKRIGPYGVTKSMSSSISAIVATALKLKGINYSISSACATSAHCIGHAADLIKNGQQDIVIAGGSDDEHWSSSCLFDAMGALSSNFNANPTIASRPYDSNRDGFVISGGAGMLILEEEEHAKKRGANILAKLSGYFANSDGYDMVAPSGEGAIRCMDGAIKEIKSEIDYINTHGTSTPVGDVAELNAIKELFGSNAPMISSTKSMTGHSLGATGAHEAIYSVMMINENFIAPSINIDNLCDEAQGLDIVRETRQSDIKNILSNSFGFGGTNASLVISKY

SEQ ID NO: 114065 - protein, 265 aa, Unknown
  Bacterial polypetide isolated from the Sargasso Sea
STASATLATPFKIKGVNYTISSACATSGHCIGNAMEMIQSGKQKIMFAGGSDEVHFAMTAMFDAMTALSSKYNDTPETASRPYDKSRDGFVISGGGGVLVLEELEYAKARGAKIYAELTGYGATSDGYDMVAPSGEGAIRCMKMALKTSRNKIDYLNTHGTSTPVGDITELKAVGEVFKNNIPKISSTKSLSGHSLGATSVHEAVYCLIMMKNNFISASANINDLDDEARNFPIVRKVEKETLQAVMSNSFGFGGTNATLVFEKI

SEQ ID NO: 114066 - protein, 328 aa, Unknown
  Bacterial polypetide isolated from the Sargasso Sea
IKDSDIDNSSYDPNRIGVSVGSGIGGLKTIEENSNLLKEKGPKRISPFFVPGSIINMVSGYISIKTGFMGPNISIASACSSASHSIGYSFRNIQHGDADMMLTGGAEMATTPLGLSGFNSAKALSTRNDDPTAASRPWDKDRDGFVLGEGAACLMLEELNHAKSRGAKIYGEIIGFGMSSDAFHMTAPPEDGKGASLSMSSALLDAKLDAKDIDYINAHGTSTPAGDLAETMAIKNVFKESSNTLIVSSTKSMTGHLLGAAGAIEAIFSLLAIRDNISPPTINLDNPDKLCDLNYSANNPSEKRISKSMSNSFGFGGTNATLVFSDIE

SEQ ID NO: 114067 - protein, 254 aa, Unknown
  Bacterial polypetide isolated from the Sargasso Sea
KLKGINYSISSACATSAHCIGHAADLIKSGQQDVVIAGGSDDEHWSSSCLFDAMGALSSNFNSTPTIASRPYDSNRDGFVISGGAGMIILEDEEHAKKRGANILAKLSGYFANSDGYDMVAPSGEGASRCMQGAIDNSKIKIDYINTHGTSTPVGDVAEINAIKTLFNSETPMISSTKSMTGHSLGATGAHEAIYSIMMINENFIAPSINIESLCDEAVGLDIVTETRNISINNVLSNSFGFGGTNASLVISRY

SEQ ID NO: 114068 - protein, 252 aa, Unknown
  Bacterial polypetide isolated from the Sargasso Sea
GINYSISSACATSAHCIGHAADLIKSGQQDVVIAGGSDDEHWSSSCLFDAMGALSSNFNSTPTIASRPYDSNRDGFVISGGAGMIILEDEEHAKKRGANILAKLSGYFANSDGYDMVAPSGEGASRCMQGAIDNSKIKIDYINTHGTSTPVGDVAEINAIKTLFTSEQPMISSTKSMTGHSLGATGAHEAIYSIMMINENFIAPSINIESLCDDAEGLDIVTETRNISINNVLSNSFGFGGTNASLVISRYQ

SEQ ID NO: 114069 - protein, 275 aa, Unknown
  Bacterial polypetide isolated from the Sargasso Sea
PFIVPRTMASTASATLAVPFKIKGTNYTMSSACATSGHCIGNSMELIQMGKQDIVFAGGSEEIHWAMTAMFDAMTALSSKYNDTPEKASRAYDKTRDGFVIAGGAGVLVLEEYEHAKARGAKIYAELTGYGATSDGYDMVAPSGEGAVRCMQMAIATSKNKVDYINTHGTSTPVGDITELNAVKEVFGNEIPKISSTKSLSGHPLGAASVHEAIYCLIMMKNNFITGSANISEMDEEAKRFPIVAKTETEVTLNTVMSNSFGFGGTNATLVFEKV

SEQ ID NO: 114070 - protein, 385 aa, Unknown
  Bacterial polypetide isolated from the Sargasso Sea
QEEVHQSLVNSKSGISYAKEYKEHNLKCHVHGKPNIKLEDHIDRKTIRFMGSGSAYNYIAMKEAIKDSGLEESEVSNFKTGIVMGSGGPSIENVILAADKTRAKTPKLMGPFIVPRTMASTASATLAVPFKIKGTNYTMSSACSTSGHCIGNSMELIQMGKQDIVFAGGSEEVHWAMTAMFDAMTALTSKYNDTPETASRAYDKTRDGFVIAGGGGVLVLEEYEHAKARGAKIYAELSGYGATSDGYDMVAPSGEGAVRCMKMAMATSKNKIDYINTHGTSTPVGDITELNAIKNTFGDDIPKISSTKSLSGHPLGAASVHEAIYCLIMMKNNFIAGSANISEMDEEAKKFPIVAKNETGATLNTVMSNSFGFGGTNAALIFEKV

SEQ ID NO: 114071 - protein, 288 aa, Unknown
  Bacterial polypetide isolated from the Sargasso Sea
WITERTGIKERRIADDSETTSSLGIEAAKKAIQNAGISSKDIDLIVVATTTPDNTFPATATSIQSGLGIKKGYAYDVQAVCSGFVYALELADNAIRLGKADYALVIGSETFSRIIDWNDRSTCVLFGDGSGAVILKSTDEGSSSSILSNHLYSDGDYKEMLFVDGGPSTSNNVGLLRMDGGGVFKHAVKNISSAIIDALEANEMTIEDVDWFVPHQANSRILEAVAKKININKEKIIVTVDKHANTSAASIPLALNEANKNNKIKKGDIVLLAAMGGGFTWGASLIRW

SEQ ID NO: 114072 - protein, 183 aa, Unknown
  Bacterial polypetide isolated from the Sargasso Sea
MSGEKFFRSKVIGVGGYLPDKVVTNDELSKIVETSDEWIKERTGIQERRVADESETTSSLGIEAAKNAIKNAGISSQDIDLIILATATPDNTFPATATSIQSGLGIKKGYAYDVQAVCSGFVYALELADNAIRLGKSNYALVIGSETFSRILDWNDRSTCVLFGDGSGAVVLKSTNDNSSSQI

SEQ ID NO: 114073 - protein, 308 aa, Unknown
  Bacterial polypetide isolated from the Sargasso Sea
QKISQKGDTSNEWIQSRTGISERRISSVEDNVTEMGYKAALTAIEMANWDIKTIDLIVLATSTPHDLFGSAPSIQAKLGAANAVAFDLTAACSGFLFALITASQFLKGGSFKRAIVIGADQLSSFVDWNDRRSCILFGDGAGALAIEATNEFDNFIGFDMRTDGGRGSFLNLPSKNNKDSIVDEIDFLSGGFSPIQMNGQEVYKFAVKEVPLILQKLLKKMNYNSNQVDWLLLHQANQRILDSVGERLKIPREKILSNLEKYGNTSAATIPLMMDEAVRDYRIKQNDIIATSGFGAGLSWGAALIKWG

SEQ ID NO: 114074 - protein, 208 aa, Unknown
  Bacterial polypetide isolated from the Sargasso Sea
MNNILITGVGSYLPKKIILNDSLPSNLNTSDEWIRKRTGITQRHIVSENELTSTMAIEASKKALINANLNSKEIDLVVLATTTPDNTFPATAVKVQSELNLKIGPAFDIQAVCAGFIYALKVASSILQTTNLNKAIVIGSESFSKILDWGDRSTSVLFGDGAGAVILEKYKDYNNWGLLASNFYSDGNVSDILYTDNGPGTDQKLKVE

SEQ ID NO: 114075 - protein, 251 aa, Unknown
  Bacterial polypetide isolated from the Sargasso Sea
MKSKIKSIGSYTPNNIVTNKDLEKKVDTTDEWIVSRTGIKERPIADDSQATSDLAFEAAKIAIERADIDKNEIDLIIVGTCTPDVATPNVGTIVQKRLELKNFPAFSIEAACSGFIYALNIADKFIKSGESKCALVIGAETLSRITNWDDRNTCVLFADGAGAAILKPSDDRGIVFSELGANGEYAELLHVPYGTSRKPETPNADDYKLKMSGNEVFKVAVKTLEEIAIDALVKANLKAKISIGSYHIRPT

SEQ ID NO: 114076 - protein, 288 aa, Unknown
  Bacterial polypetide isolated from the Sargasso Sea
MEGIDFNQIGVSFKGSGSYVPDQILTNQKISQKVDTSNEWIKSRTGISERRISSLGDNVNEMGYKAALAALEMANWDIKTIDLIVLATSTPHDLFGSAPSIQAKLGAANAVAFDLTAACSGFLFALITASQFLKGGSFKRAIVIGADQLSSFVDWNDRRSCILFGDGAGALAIEATNQFDNLIGFDMRTDGERGSFLNLPSKNNKDLIIDNIDFLNGTFSPIQMNGQEVYKFAVREVPIILEKLFNKTHYTSDEVDWLVLHQANQRILDSVGDRLKIPREKILSNLEK

SEQ ID NO: 114077 - protein, 228 aa, Unknown
  Bacterial polypetide isolated from the Sargasso Sea
MKSAITGWGKCTPDNIMTNDDLSKFVDTSDEWIQQRTGVKERRFSHVNTSDMAEIAGKHAIACAGLNPEDIDVVILATCTPDSIVPSAAAHVQKKLGAVNASVYDVNAACAGFLYALEQGKAFVESNLYKRALVIGAEHITWLLDWSDRNTAVLFGDGAGAVVIEESKNESDGEIYSFSNGLSSDNLEILEIPNFGSAMDRFNPDEAARVRWTFDGQEIFKSGVRAMA

SEQ ID NO: 114078 - protein, 246 aa, Unknown
  Bacterial polypetide isolated from the Sargasso Sea
VHNIGHAARIIAYGDADAMVAGGAEKASTPLGVGGFGAARALSTRNDNPQAASRPWDKERDGFVLGDGAGMVVLEEYEHAKARGAKIYAEVVGFGMSSDAYHMTSPPENGAGAALAMVNALRDAAIEAGQIGYVNAHGTSTPAGDKAETQAVKSVFGDAASRVMVSSTKSMTGHLLGAAGAVESIFSILALRDQAIPPTINLDNPDEGCDLDFVPHEARQVSGLEYALCNSFGFGGTNGSLIFKKI

SEQ ID NO: 114079 - protein, 319 aa, Unknown
  Bacterial polypetide isolated from the Sargasso Sea
HKYNAHRVGVAIGSGIGGLEQIEQNHLKLTNSGPKRVSPFFVPSTITNMISGFLSIMEGLKGPNLNVVTACTTGVHNIGIAARTIAYGDADAMLAGGAEASITPLGMAGFAAARALSSRNDNPQAASRPWDKDRDGFVMGEGAGVVMLEEYEAAKARGATIYAELVGFGMSGDAYHMTSPPEDGEGAAASMQNAINDAKLDASEIGYVNAHGTSTPAGDIAEVAAVKRVFNDHAHKLLVSSTKSMTGHLLGAAGSVEAIFTILALRDKMAPPTINLDEPGEGCDLDFVAHKAKAFSEDYALCNSFGFGGTNGSLIFKRI

SEQ ID NO: 114080 - protein, 274 aa, Unknown
  Bacterial polypetide isolated from the Sargasso Sea
IEGSGRHLPEKILTNHDLEKLVDTSDEWIKTRTGVERRHIASQEQATSDLGIEAAKKAIIDADISKEDIDLIVLGTTTPDYVFPNTATLIQEGLGIHGCPAFSLEAACSGFVYALSTADKFIRSGSSKCALVIGAEVMTKLIDWEDRSTCVLFGDGAGALILKPSEEQGIIDCKLGADGKYKDLLWYPAGVSKNFDKLGGNQTNLEMSGNDVFKVAVKTLGNVAVDTLNKNNIDKDELDWLVPHQANLRIIQATAKRLELPMDKVILTVQDHGN

SEQ ID NO: 114081 - protein, 297 aa, Unknown
  Bacterial polypetide isolated from the Sargasso Sea
NHKWIQSRSGINTRHIKNQVEKTSDLAVNATINALKSSKINKDQIDFIIVATVTADHTGFPSTACIVQKKLNLKRSIPCFDISAACSGFVYALSIGYCKILADQGQYGLIIGAESLSDILDWSDRKTCILFGDGAGAAIIGPVESGGFNTFIEGANGAQSEILKVEKKSNSKNINNENQAFPKDILTMDGKSVFKQGIQSIEDCINELISTKKIDINDIRYFVLHQANIRIIESIANKFKLPMERFLTNIENVGNTSAASIPIVLSENIKANTFKKGDNILLIGFGAGFTWSSILLQ

SEQ ID NO: 114082 - protein, 322 aa, Unknown
  Bacterial polypetide isolated from the Sargasso Sea
VYLDTDDEWITTRTGVKQRRIAEAPLSEIGTIAAKHALAAADKDPNEIDAVMMATCTPEFLIPSTASRVQMNIGNNTAAAFDFNSACSGFVYGLTTAYSMIHSGIFNNVLLVGGEKVSYFLDWTARDTAVLFGDGAGAVLIEKTNTDSKLHSSKMTCDPFLGEALMLKNFGTSMEIKDPKEGYFFGISFEGQEIFKNAVKTMARLAEEALEESGLSVDDIDLCIPHQANRRILEATAKRCNFPMEKMIINLDQYGNTSAGSIPIALTEALDEGKVKPNSKILFLAFGGGLTGAAAVIDWGGRSHALKTSNEQLPDSGKTALE

SEQ ID NO: 114083 - protein, 241 aa, Unknown
  Bacterial polypetide isolated from the Sargasso Sea
FGSAPSIQAKLGAANAVAFDLTAACSGFLFALITASQFLKGGSFKRAIVIGADQLSSFVDWNDRSSCILFGDGAGALAIEANNEFNNLIGFDMRTDGERGCFLNLPSKNNKDSIIDNIDFLSGDFSPIQMNGQEVYKFAVREVPLILEKLFKKMNYTSDEVDWLVLHQANQRILDSVGDRLKIPGEKILSNLEKYGNTSAATIPLVMDEAIRNNIIKQNDIIATSGFGAGLSWGAALIKWG

SEQ ID NO: 114084 - protein, 265 aa, Unknown
  Bacterial polypetide isolated from the Sargasso Sea
MGIEITGWGKCTPSAVLTNSDLESILDTDDEWITTRTGVKQRRIAEAPLSEIGTVAAKHALAAADKDPNEIDAVMMATCTPEFLIPSTASRVQMNIGNNTAAAFDFNSACTGFVYGLTTAYSMIHTGIFNNVLLVGGEKVSYFLDWTARDTAVLFGDGAGAVLIERTDSESKLHSSKMTCDPFLGDALMLKNFGTSMELKDPKEGYFFGISFEGQEIFKNAVKTMARLAEEALEEAGLSVDDIDLCIPHQANLRILEATAKRCSF

SEQ ID NO: 114085 - protein, 264 aa, Unknown
  Bacterial polypetide isolated from the Sargasso Sea
MGIEITGWGKCTPSAVLTNSDLETILDTDDEWITTRTGVKQRRIAEAPLSAIGTVAAKHALASADKDPKEIDAVMMATCTPEFLIPSTASRVQMNIGNNTAAAFDFNSACTGFVYGLTTAYSMIDTGIFNNVLLVGGEKVSYFLDWTARDTAVLFGDGAGAVLIERTDSESKLHSSKMTCDPFLGDALMLKNFGTSMELKDPKEGYFFGISFEGQEIFKNAVKTMARLAEEALEEAGLSVDDIDLCIPHQANLRILEATAKRCS

SEQ ID NO: 114086 - protein, 230 aa, Unknown
  Bacterial polypetide isolated from the Sargasso Sea
MRQVGAFDLAAACSGFNYGLTTAVQYIKSGLAKHILVVATDCLSRYVDQDDRSIAVLFGDGAGAAVLGQVDEGYGIISSQLCADGSHADILKIEGGGSRNRFSEDVLSSQSHLIHMDGKSVFKVAVNCIMTQIQNDLEQNQLNKDDIDWYIFHQANFRIIHSVCEKFGIPEEKTINTLHKYGNTSAASIPIVLTEAQTEKKFKKGQLIYTIGFGAGFTWASNIMKWSKDS

SEQ ID NO: 114087 - protein, 188 aa, Unknown
  Bacterial polypetide isolated from the Sargasso Sea
TKYALVIGAEKLSSIINWKDRSTCVLFGDGAGSVIISRADAPGILDFKLSAEGSFTEMLNAPGYIHQGSIIGDPFIKMDGKGVFKKAVDVLYYDALSVLNELNLSISDIDWYVPHQANIRIIRMVGKKLGFSPNQIIETVNKHANTSAASVPLALDSAISDGRIKSGDRVLLQGVGGGFTWGSLVLIV

SEQ ID NO: 114088 - protein, 207 aa, Unknown
  Bacterial polypetide isolated from the Sargasso Sea
AYSLVTAGQFFATGSSNLAMVIGVDTNSRVVDPNDIKTWPLFGDGAGAVLLERVEENQQNAGLLAWSLGSDGRGSNLLVCPMSGTRQPVTVEGVTAGEQYMKMDGRAVFKWAIRLVEENVQQVVHHSGVPMESIDLFILHQANLRIIDGIRSSLGLDEEKFLVNLDRYGNTSSGSIPLALDEAWRAGRIGPGSTVLICGFGGGLAWG

SEQ ID NO: 114089 - protein, 204 aa, Unknown
  Bacterial polypetide isolated from the Sargasso Sea
FLKGGSFKRAIVIGADQLSSFVDWNDRRSCILFGDGAGALAIEATNEFDNFIGFDMRTDGERGSFLNLPLKKNKDSIVDEIDFLSGGFSPIQMNGQEVYKFAVKEVPLILEKLLKKMRYKSDQVDWLLLHQANQRILDSVGERLKIPREKILSNLEKYGNTSAATIPLMMDEAVRDYRIKQNDIIATSGFGAGLSWGAALIKWG

SEQ ID NO: 114090 - protein, 169 aa, Unknown
  Bacterial polypetide isolated from the Sargasso Sea
RSMVILFGDAAGAVILEASEQPGILSTHIHADGKHSELLYVDNPIRGVEASVHTSWGSMKGNEVFKVAVTRLSEVVEQTLAANQMDKSQIDWLVPHQANLRIISAVARKLEMSMDQVVINLDRYGNTSAATVPTALDEAVRDGRIQRGQTILLEAFGSGFAWASALIRY

SEQ ID NO: 114091 - protein, 218 aa, Unknown
  Bacterial polypetide isolated from the Sargasso Sea
LEAACSGFLYALDVADGMLSSGRYECALVVGAEKLSSIMDWEDRTTCVLFGDGAGAAVLTKEGEGAEMIGFQCGADGSNPSLLHQPAGGSMQPASQETVDSRGHFLKMNGREIFKSAVRVMERAAIELLEKHGFDKNEVDHVIPHQANARIVESLSQRLEIPLDKFYCNLYKFGNTSAASIPLALDEAYKSETFKKGDLGLLVAFGAGLTWSATLVRF

SEQ ID NO: 114092 - protein, 277 aa, Unknown
  Bacterial polypetide isolated from the Sargasso Sea
DLATEAAKRALDNTKLKSKDIDLIIVGTTTPDNTFPATAAKVQKNLDSDAISFDIQAVCAGFVYALSVGVSMLKDGYGSKCLIIGADSMSRILDWQDRSTSVLFGDGAGAIILEKFQIKENNPLDWGVLSNVIYTEGKHYDLLFTDGGVSLNKSTGYIRMHGKEVFKHAVEKLSNSFIDALKKTNYKIEDVDWLIPHQANQRIINAVAEKLGFSKTKVVSTVSKHGNTSAASIPIALDYALKKNMIKNGEILGFQAIGGGLSWGSSIIKFGKPKNLL

SEQ ID NO: 114093 - protein, 182 aa, Unknown
  Bacterial polypetide isolated from the Sargasso Sea
MTRQSVVIGCGSYLPDRIVTNEELAFGVDTSDEWIRKRTGIRERRIAADKQKTSDLAINAAQEALKAAGIESNDIDLIVLATTTPDETFPATATRVQAALGMTRGAAFDVQAVCTGFIYALNVADNFIRLGQADTVLVIGAETFSRILDWEDRTTCVLFGDGAGAVVLQSLEQDNEREMRGI

SEQ ID NO: 114094 - protein, 233 aa, Unknown
  Bacterial polypetide isolated from the Sargasso Sea
SIDLLIIATTTPDDQVPATSSKVQHELGLSCGAMDINAACSGFVYSLITGCGFLQAGCNRILVIGSETLSGITDWEDRSTAILFGDGAGAIVLESSSGGGKLLGWDLSSSGELRDILHAPIGGKIYMEGREVFRKAVTAMTESGKKAIANSGISPDEISLVIPHQANIRIIETSMKKLGIPFERAVWVGDKTANTSSASIPIALGHALDNNQIAENDLILLVGFGAGMTAAGA

SEQ ID NO: 114095 - protein, 269 aa, Unknown
  Bacterial polypetide isolated from the Sargasso Sea
MKSTITGWGKCTPDNIMTNEELSKFVDTSDEWIQQRTGIKERRFSHVNTSDMAAVAGKHAIACAGLNPEDIDVVILATCTPDSIVPSAGAHVQKKIGAVNASVYDVNAACAGFVYALEQGKAFVESGLHKKALIIGAEHITWLLDWSDRNTAVLFGDGAGAVVLERSNDYSDGEIYSFENGLSSENLEILEIPNMGSAMDRFEPDEAAKVRWTFDGQEIFKSGVRAMAKASAAAIEKSGLKKEDIDIFIPHQANLRIVEALEKKLGLPN

SEQ ID NO: 114096 - protein, 283 aa, Unknown
  Bacterial polypetide isolated from the Sargasso Sea
DSIVPSAAAHVQKKLGAVNASVYDVNAACAGFLYALEQGKAFVESNLYKRALVIGAEHITWLLDWSDRNTAVLFGDGAGAVVIEESKNESDGEIYSFSNGLSSDNLEILEIPNFGSAMDRFNPDEAAKVRWTFDGQEIFKSGVRAMAQASAEAIEKSGLSKEDVDIFIPHQANIRIVEALEKKLGLPNATTIKKVHRYGNTSAASIPTAFVDALEEGEIKGGEIAVFTAVGAGLAWGACAVRLGDRVTPINKSDAKLPDFDGTATDTIKRAIEYQVPNKLDKI

SEQ ID NO: 114097 - protein, 260 aa, Unknown
  Bacterial polypetide isolated from the Sargasso Sea
SVDLAYNAAIDAIKKSGINKNDIGAIFLATCTPERKFPSTAVLLQNKLDIKGAFSFDINAACTGFVYALDVAKKYIETGQVKYALVVGTEKITSLLDWTDRNTCVLFGDGSGAMIVGASEKPGIISSTIGSDGSYKDLLTVNTDLEYIEMKGSDVFKTAVNTLGKLAKHTLEKNNVGKDELDWLVPHQANERIILAIAKKINLPREKIIITVSKHGNTSAASIPLAFDEANSKGIFKNGDMIMLEAFGAGFTWESVLFRY

SEQ ID NO: 114098 - protein, 224 aa, Unknown
  Bacterial polypetide isolated from the Sargasso Sea
MKSKITSIGSYTPNNIVTNKDLEKKVDTTDEWIVSRTGIKERPIADDSQATSDLAFEAAKIAIERADIDKNEIDLIIVGTCTPDVATPNVGTIVQKRLELKNFPAFSIEAACSGFIYALNIADKFIKSGESKCALVIGAETLSRITNWDDRNTCVLFADGAGAAILKPSDDRGIVFSELGANGEYAELLHVPYGTSRKPETPNADDYKLKMSGNEVFKVAVKTL

SEQ ID NO: 114099 - protein, 233 aa, Unknown
  Bacterial polypetide isolated from the Sargasso Sea
DKIGASNAWGYDIVAACTGFVYAMETGAKLVESGQYKNVMVIGADTMSSIVDYTDRNTCVIFGDGGGGVLLEPSKDQTGIIDSILHADGSGSKYLTVPAGGSLHPASKDTVDKRMHYVYQDGKTVFKFAVKNMAEVSKRILDRNQLTGDDIKLFIPHQANQRIIDAAAKRCGLDDEKVFININKYGNTTAGTIPIALDEAVESNRLTKNDMLLFAAFGGGFTWGSMLIKWSNK

SEQ ID NO: 114100 - protein, 219 aa, Unknown
  Bacterial polypetide isolated from the Sargasso Sea
ACSAFIYSLSIADQYIKTGAAETVLVIGAETQTKLIEKSTEGRDVAVLFGDGAGAAIVQRSDDSSQILSTHLHSQGKDLKNLWMEAPGTSKGSWFIENKFDQKKFTPKMNGREVFKNAVRRFPEVIHEALDNNNLDINDIKLIIPHQANYRISKAVAKKLEVGMDKVYSNIHKYGNTTAASIPIALTEAIYSKKINKGDLIILAAFGAGYTWASAAIKW

SEQ ID NO: 114101 - protein, 169 aa, Unknown
  Bacterial polypetide isolated from the Sargasso Sea
MTVRAVIQGCGHYLPKRVVDNSEFERTLDTSDDWISSRSGIKRRHFANKDETTSVMATLAAKEALADANLRADDIDAIILATSTSDLTFPSSATMVQANLGIAKGFAYDVQAVCAGFVFALANANALIISGQAKKILVIGSETFSKLMDWEDRSTCVLFGDGAGAVILS

SEQ ID NO: 114102 - protein, 288 aa, Unknown
  Bacterial polypetide isolated from the Sargasso Sea
MNGYFQELGIKQRHIALKKELTSDLAINAAKEAFENSTISPGDIDCVIVATTTPDDTFPSTATKVQHFFKMKDTPAFDIQAVCSGFIYSLQVADTFLKCGNAKNILVIGAETLSKIVDWEDRRTCVLFGDGAGAVIISASKESRGILATKLYSDGSWHDSLFSDGGPSFNQKVGKIRMNGQDIFKQAVNKLSESTSKALDECNLSVKDIDWFIPHQANQRIISSTAKKLGISEDKTISTVKFHANTSAASIPLALSSAIKDGKIKENHLIAMCAIGGGLTWGSCILKF

SEQ ID NO: 114103 - protein, 284 aa, Unknown
  Bacterial polypetide isolated from the Sargasso Sea
PEKVLTNEDLAEMVDTNSEWIVERTGIHERRVGGSTSDLAAEAGKIAIERAGIDPATIDLLILATTSPDRRVPASASTVQELLGLQCGAMDLNAACSGFVYSLVAAHGFIEMGHQRVLVIGAETLSRMTDYTDRTTCILFADGAGAAVVEKADGPGDLHGWHVDSNGALEEALFCEFDGKIEMAGQAIFKNAVLAMENAALKSLAMAGISADDIDLVVPHQANVRIVEASCKRLGIPYEKTSMVIHRTGNTSSASIPLALEDAWAGGRVNQGDNILLVGFGAGM

SEQ ID NO: 114104 - protein, 193 aa, Unknown
  Bacterial polypetide isolated from the Sargasso Sea
CYGADQLSSFVDWNDRRSCILFGDGAGALAMEATNEFDNFIGFDMRTDGGRGSFLNLPSKKDKNSIVDEIDFLSGGFSPIQMNGQEVYKFAVKEVPLILEKLLKKMRYKSDQVDWLLLHQANQRILDSVGERLKIPREKILSNLEKYGNTSAATIPLMMDEAVRDYRIKQNDIIATSGFGAGLSWGAALIKWG

SEQ ID NO: 114105 - protein, 308 aa, Unknown
  Bacterial polypetide isolated from the Sargasso Sea
DLEKMVDTTNEWIISRTGIENRHIVDDGEATSDMATQIAKQLLEKSGKSPQDIDLILVATSTPDFPVISTAALVQDKIGAINAWGYDIVAACTGFIYAMETGAKLIESGRYKNVIVIGSDTMSSIIDYTDRNTCVIFGDGGGGVILEPTQRDIGILDSILHTDGSGNKYLTVPGGGSFNPTSRETIDNRMHYLYQDGKTVYKFAVKNMADVSKKILDNNNLNGTDIKLFIPHQANIRIIDAAAKRCGLKDEQVLININKYGNTTAGTIPIALDEAVETNRLDEGDLLLLSTFGAGFTWGSMLIRWGNT

SEQ ID NO: 114106 - protein, 281 aa, Unknown
  Bacterial polypetide isolated from the Sargasso Sea
MEGIDFNQIGVSFKGSGSYVPDQILTNQKISQKVDTSNEWIKSRTGISERRISSFGDNVNEMGYKAALTAIEMANWDIKTIDLIVLATSTPHDLFGSAPSIQAKLGAANAVAFDLTAACSGFLFALITASQFLKGGSFQRAIVIGADQLSSFVDWNDRRSCILFGDGAGALAIEATNQFDNLIGFDMITDGERGSFLNLPSKNNKDLIIDNIDFLSGAFSPIQMNGQEVYKFAVREVPIILEKLFNKTHYTSDEVDWLVLHQANQRILDSVGDRLKIPRRK

SEQ ID NO: 114107 - protein, 264 aa, Unknown
  Bacterial polypetide isolated from the Sargasso Sea
AAKIAIERANIDKNEIDLIIVGTCTPDVATPNVGTIVQNRLELKNFPAFSIEAACSGFIYALNIADKFIKSGESKCALVIGAETLSRITNWDDRNTCVLFADGAGAAILKPSDDRGIVFSELGANGEYADLLHVPYGTSRKPETPNADNYTLKMSGNEVFKVAVKTLEEIAIDALVKANLESEDIDWFIPHQANMRIIQAVAKRLELPEEKVILSMDIHGNTSAASIPLAFDRAIQDGRIKEGDTILMQSFGAGFTWGSVILDL

SEQ ID NO: 114108 - protein, 293 aa, Unknown
  Bacterial polypetide isolated from the Sargasso Sea
FINFVDTSDEWIYTRTGIKQRHIALENELTSDLAVKASQRALDSANLKSDDIDCIILATTTPDETFPSTATKVQTQLKMRNIPSFDVQAVCSGFIYSLQIADSLIKCQKAKNILVIGAETLSKIVDWKDRRTCVLFGDGAGAVILGQSKSFCGILSTKLYSDGSWHDSLFSDGGPSKNQEVGKIRMNGKDIFKQAVNKLTEATNEALNECNLDVKDINWFVPHQANQRIISSTAKKIGLGEDKTISTVRYHANTSAASIPLALSSSIENGKIKSNDILALCAIGGGLTWGSCI

SEQ ID NO: 114109 - protein, 207 aa, Unknown
  Bacterial polypetide isolated from the Sargasso Sea
GFLASRALSKSDDPKTASRPWDKDRDGFVLSDGAAILILEEYEHAKNRSANIYAEIIGFGMSSDAYHMTAPSEDGTGASLSISRAISDAGISTNDIDYINAHATSTPLGDLAECNAVKSIFDSPPPISSTKSMTGHTLGAAGAIESIFSILSIVNNISPPTINLNNPDEGCDLDFIPNEARDMKIDISLNNSFGFGGTNSTLIFKSV

SEQ ID NO: 114110 - protein, 151 aa, Unknown
  Bacterial polypetide isolated from the Sargasso Sea
SPGILSSHIHADGAFKDLLCVPVGVSTAYQEVLGGRAYTEMQGKEVFRWAVSTLGDAVIEILEANGIEKGEIDWLVPHQANIRIIKAIAKRLDLSMDQVVVTIDQHGNTSAASVPLAFDSAVKDGRIRSGDKVVFEAFGGGFTWGSMLVEI

SEQ ID NO: 114111 - protein, 195 aa, Unknown
  Bacterial polypetide isolated from the Sargasso Sea
VIGADQLSRWVDWDDRRSCVLFGDGAGAVAIEACPAENDGLLGFRLNSDGARGDCLTLAQTSERAELLPGMSHQRGGYAPIGMNGQEVYKFAVREVPAILKQLLADTNTEAASIDWLLLHQANQRILDAAAERLGIAADKVLSNLANYGNTSAATIPLMLHEAVSDGRIQCGQLIASSGFGAGLSWGAALLRWDG

SEQ ID NO: 114112 - protein, 265 aa, Unknown
  Bacterial polypetide isolated from the Sargasso Sea
LEKKVDTTDEWIVSRTGIKERPIADDSQATSDLAFEAAKIAIERADIDKNEIDLIIVGTCTPDVATPNVGTIVQKRLELKNFPAFSIEAACSGFIYALNIADKFIKSGESKCALVIGAETLSRITNWDDRNTCVLFADGAGAAILKPSDDRGIVFSELGANGEYAELLHVPYGTSRKPETPNADDYKLKMSGNEVFKVAVKTLEEIAIDALVKANLESKDIDWFIPHQANMRIIQAVAKRLELPEEKVILSMDIHGNTSAASIPL

SEQ ID NO: 114113 - protein, 258 aa, Unknown
  Bacterial polypetide isolated from the Sargasso Sea
ILTNQKISQKVDTSNEWIKSRTGISERRISSLEDNVTEMGYKAALTAIEMANWDIKTIDLIVLATSTPHDLFGSAPSIQAKLGAANAVAFDLTAACSGFLFALITASQFLKGGSFKRAIVIGADQLSSFVDWNDRRSCILFGDGAGALAIEATNECDNLIGFEMRTDGERGSFLNLPSKNNKDSIIDNIDFLSGAFSPIQMNGQEVYKFAVREVPIIIEKLFKKMNYTSDEVDWLVLHQANQRILDSVGDRLKIPREK

SEQ ID NO: 114114 - protein, 243 aa, Unknown
  Bacterial polypetide isolated from the Sargasso Sea
FPGVSAQLQEKLNLNLVGAFDIKAACSAFIYSLSIADQYIKTGAAETVLVIGAETQTKLIEKSSEGRDVAVLFGDGAGAAIVQRSDDESQILSTHLHSQGKDLKNLWMEAPGTSKGSWFKENKFDQKKFTPKMNGREVFKNAVKRFPEVIHEALEYNNLNFNDIKLIIPHQANYRISQAVAKKLGVGMDKVYSNIHKYGNTTAASIPIALTEAVNAKKINKEDLIILAAFGAGYTWASAAIKW

SEQ ID NO: 114115 - protein, 265 aa, Unknown
  Bacterial polypetide isolated from the Sargasso Sea
MSNILITGVGSYLPKKVISNNELPVNLDTNDEWIKKRTGIRQRHFVTEGELTSTMAIAAAKKALQNANIDNKDIDLIIVATTTPDKTFPATAVMVQSELNIGIGPAFDIQAVCAGFIYALNVGSSLLKTSNFSKALIIGSESFSKILDWSDRSTSVLFGDGAGAFVLEKSNENSEWGILSSNFYSNGNFSNILHTDGGPSINLQVGKVRMNGKEVFKHAVEKLSSCLIEAINSGNLKIQDIDFLVPHQANIRIIEALSKKLDIPT

SEQ ID NO: 114116 - protein, 289 aa, Unknown
  Bacterial polypetide isolated from the Sargasso Sea
MFDHFDPEAYTTKFAGLVKNFDVEQFFPAKEAKKMDLFIQYGVAAGVQAFKDSGLEINEENAERIGVAVGSGIGGLGLIEENHTKLLNSGPRRLSPFFVPSTIINMISGHLSIMLGLQGPNISIVTACTTGVHNIGQAARMIAYGDADAMIAGGAEKASTPLGMGGFGAARALSTRNDAPQQASRPWDKDRDGFVLGDGAGVVVLEEYEHAKARGAKIYAELVGFGMSGDAYHMTSPPENGRGAALAMKNALRDAGVNADQVQYINAHGTSTPAGDIAETMAIKSIFGA

SEQ ID NO: 114117 - protein, 240 aa, Unknown
  Bacterial polypetide isolated from the Sargasso Sea
MFKSKIFGMGYSVPENIITNHDLSKIMDTSDDWIQSRSGIKERRWATDNVTTSDLAYEACKQTIENSKINPIDIDMIIVGTLSSDYFFPGVSAQLQEKLNLKNVGAFDIKAACSAFIYSISIADQFIRTGAAKTILVVGAETQTKLIEKSTEGRDVAVLFGDGAGAAILTRSDSKSEILSTHLHSDGKHLKDLWMEAPGTNKDSWIDDPINLSKFTPKMNGREVFRNAVTRFPEVINEAL

SEQ ID NO: 114118 - protein, 279 aa, Unknown
  Bacterial polypetide isolated from the Sargasso Sea
ILTNKELESIVDTTDEWITERTGIKERRVSSDDETSVDMAYQASIDAINKSGLKKDEIGAIFLATCTPERKFPSTAVLLQNRLNIKNAFSVDLNAACTGFVYALDIAKKYIESKQVKYALVVGTEKITSLLDWTDRNTCVLFGDGAGAMIVGSSDIAGILSSTIGSDGSYKDLLTVNTDLEYIEMKGSDVFKTAVNTLGKLAKHTLELNNLEQGQLDWLVPHQANERIILAIAKKISLSHDKIIITVNKHGNTSAASIPLAFDDANTKNTFKSGDYIMM

SEQ ID NO: 114119 - protein, 237 aa, Unknown
  Bacterial polypetide isolated from the Sargasso Sea
MKNKNILYANITAVGKYVPEKIITNYDLEQKMDTTNEWITSRTGIEQRRKASNEETSVSMSVNAIKEIIKNKNINPKDIDAIIVATITPDMFFPSCACLIQQQIKATNAWGFDLSAACSGFVFALETASNMIQSKKYKKIIVVGVDTMSSIIDYNDRNTAVLFGDGAGAVLIEPSETNGIIDSKMKIDGDGGKFLYMPAGGSLNPATEKTVKNNMHFVKQDGASVFKNAVKGMTDIT

SEQ ID NO: 114120 - protein, 274 aa, Unknown
  Bacterial polypetide isolated from the Sargasso Sea
GPKRLSPFFVPSTIINMISGQLSIMLGLQGPNISIVTACTTGVHNIGHAARMISYGDADVMIAGGAEKASTPLGMGGFGAARALSTRNDAPQQASRPWDKDRDGFVLGDGAGVMVLEEYEHAKARGAKIYAELVGFGMSGDAYHMTSPPENGAGAAASMRNALNDAKVNAEQVAYINAHGTSTPAGDIAETKAIKSVFGDHASKVMVSSSKSMIGHLLGAAGSVESIITVLSLQENIVTPTINLDNPDDGCDLDYVPHEARQVSMEYALCNSFG

SEQ ID NO: 114121 - protein, 218 aa, Unknown
  Bacterial polypetide isolated from the Sargasso Sea
MYSRIISTGSYLPEKRLTNFDFEQMLDTSNSWIVERSGIESRRVAGADELASDLGYKAAYRALKRANLEPNDLDLIIVATTTPDMIFPSTACIVQSKLGVKDCIAFDVQAVCSGFVYGLNIADLFIKSGQAKTALVIGSEVYSRILDYNDRGTCVLFGDGAGAAIVANSKKAGLMAAKLHANGDYKDKLSVPGSIYQGKVSGKPFVQMDGPAVFKFAV

SEQ ID NO: 114122 - protein, 234 aa, Unknown
  Bacterial polypetide isolated from the Sargasso Sea
KVQADLGIINGAAFDIQAVCAGFVYAMTVADNFLRSGQSSRALVIGAETFTRLLDWTDRGTCVLFGDGAGAVVLDSHKIDPETLQYGVLSTHLHSDGRNRDILYVDGGPSMTSETGFVRMSGKEVFRHAVSKLGSVIKETLVANDLSSDDIDWLVPHQANRRIIESMAKKLDMPMDKVICCIDRHANTSAASVPLALSEGVSDGRIVDGNLVLFEAIGGGLAWGAGLVRMGYPK

SEQ ID NO: 114123 - protein, 249 aa, Unknown
  Bacterial polypetide isolated from the Sargasso Sea
IKEAKIEASDLDAIILATSTADLTFPSAATMVQAGLGIRHGFAYDIQAVCAGFIFALSTANAQIVSGQANRILVIGSETFSNLMDWSDRSTCVLFGDGAGAVVLEAQNSTGTKEDRGILSVDLNSDGSYKDILYVDGGVSQKTTGYLRMEGKEVFKHAVDKLAKTSANAMAKAGIEFSEVDWVVPHQANVRIIQGTARKMGISDEKVIKTVQDHGNTSAASIPLALSVASKSGQIRQNDLIVTEAIGGG

SEQ ID NO: 114124 - protein, 229 aa, Unknown
  Bacterial polypetide isolated from the Sargasso Sea
MKSAITGWGKCTPDNIMTNDDLSKFVDTSDEWIQQRTGVKERRFSHVNTSDMAEIAGKHAIACAGLNPKDIDVVILATCTPDSIVPSAAAHVQKKLGAVNASVYDVNAACAGFLYALEQGKAFVESNLYKRALVIGAEHITWLLDWSDRNTAVLFGDGAGAVVIEESKNESDGEIYSFSNGLSSDNLEILEIPNFGSAMDRFNPDEAARVRWTFDGQEIFKSGVRAMAQ

SEQ ID NO: 114125 - protein, 236 aa, Unknown
  Bacterial polypetide isolated from the Sargasso Sea
MNLNQNKPVGILGLGHFLPDQIINNQYFVDRGLDTSDEWITTRSGIQSRHIATDSKTSDLAYQAAKKAISNSPVSPDDIDFIIVATATPDHSGFPSTACIVQKKLNLSRNIPAFDITVACSGFTYALGIANSYIQTGMGTHGLIIGAETLSSVVNWADRSTCVLFGDGAGAAIVGPVSGQGIIAIDQGADGNYSDILTISNQPNREDFNMNTTDDESSTIFMDGPAVFKQGIQCVQ

SEQ ID NO: 114126 - protein, 255 aa, Unknown
  Bacterial polypetide isolated from the Sargasso Sea
KIEVSDLDAIILATSTADLTFPSAATMVQAGLGIRHGFAYDVQAVCAGFIYALSTANAQIVSGQANRILVIGSETFSNLMDWSDRSTCVLFGDGAGAVVLEAQNSNGTKEDRGILSVDLNSDGSYKDILYVDGGVSQKTTGYLRMEGKEVFKHAVDKLAKTSENAMAKAGIDSSEVDWVVPHQANVRIIQATARKMGIPDEKVIKTIQDHGNTSAASIPLALSVASKSGQIKQNDLVVTEAIGGGLAWGAIVLRW

SEQ ID NO: 114127 - protein, 295 aa, Unknown
  Bacterial polypetide isolated from the Sargasso Sea
MVETSDQWIVERTGISERRIAAQDETVSTMGYQAALNALEMAGIEASDLDMIICGTTSAANAFPAAACEIQAMLGVHTIPAFDIAAACSGFVYALSVADQFVKNGTAKKVLVIGADVLSRLCEPEDRTTIILFGDGAGAAVIGASDEPGIISTHIYADGRQGDLLKCAFPPRQGETSEAVGFMTMKGNDVFKVAVTQLSHVVTETLRLNNIDKSEIDWLVPHQANFRIINATAKKLDMSLDKVVLTLAKHGNTSAASVPIALDEAVRDGRIQRGQLLLLEAFGAGFAWGSALVRF

SEQ ID NO: 114128 - protein, 304 aa, Unknown
  Bacterial polypetide isolated from the Sargasso Sea
FDCSNYSTRFAGQINDFDPQEYIEKKETKKMDRFIQLGIAAGKQALVDSGLTISQNNAHRVGVAIGSGIGGLEQIEQNHLKLTNSGPKRVSPFFVPSTITNMISGFLSIMEGLKGPNLNVVTACTTGVHNIGIAARTIAYGDADAMLAGGAEASITPLGMAGFAAARALSSRNDNPQAASRPWDKDRDGFVMGEGAGVVMLEEYEAAKARGATIYAELVGFGMSGDAYHMTSPPEDGEGAAASMQNAINDAQMDASEIGYVNAHGTSTPAGDIAEVAAVKRVFNDHAHKLSVSSTKSMTGHLLG

SEQ ID NO: 114129 - protein, 306 aa, Unknown
  Bacterial polypetide isolated from the Sargasso Sea
CKFVDTSDEWISKRSGIKYRHFISDNETTSEMSYNAAKKAIKNAKISKNNIDLIIVATTSPDNTFPSTATLVQKKLRINAVSFDIQAVCAGFVFALSVAKSMMSNGYYKNCLVIGADSMSKLLDWKDRSTSVLFGDGAGAVILQRVENINDAYKDWGILSSVIHSDGQFYDLLKTNGGVSTNQKTGFIEMVGKEVFKHAVDKLSSSLEEALLSSNKKIEDVDWLVPHQANQRIISAVADRMNFDINKVISTVKYHGNTSAASIPLALDKAMSSKTIINGNLIGVHAIGGGLSWGASIIRIGKPKIL

SEQ ID NO: 114130 - protein, 272 aa, Unknown
  Bacterial polypetide isolated from the Sargasso Sea
QKKLGAVNASVYDVNAACAGFLYALEQGKAFVESSLYKRALVIGAEHITWLLDWSDRNTAVLFGDGAGAVVIEESKNESDGEIYSFSNGLSSDNLEILEIPNFGSAMDRFNPDEAARVRWTFDGQEIFKSGVRAMAQASAEAIEKSGLSKEDVDIFIPHQANIRIVEALEKKLGLPNATTIKKVHRYGNTSAASIPTAFVDALEEGEIKGGEIAVFTAVGAGLAWGACAVRLGDRVTPINKSDAKLPDFDGTATDTIKRAIEYQVPDKLDKI

SEQ ID NO: 114131 - protein, 335 aa, Unknown
  Bacterial polypetide isolated from the Sargasso Sea
MEGIKFNQIGVSFKGSGSYVPDQILTNQEISQKVDTSDEWIKSRTGISERRISSLGDNVTEMGYEAAMAAIEMANWDIKTIDLIVLATSTPHDLFGSAPSIQAKLGAYNAVAFDLTAACSGFLFALITASQFLKGGSFKRAIVIGADQLSSFVDWNDRRSCILFGDGAGALAIEATNEFDNLIGFDMRTDGERGSFLNLPSTNNKDSIIENIDFLNGGFSPIQMNGQEVYKFAVREVPIILEKLFRKTNYSSDEVDWLVLHQANQRILDSVGDRLKIPREKILSNLEKYGNTSAATIPLMMDEAIRNNRIKQNDIIATSGFGAGLSWGAALIKWG

SEQ ID NO: 114132 - protein, 179 aa, Unknown
  Bacterial polypetide isolated from the Sargasso Sea
MKSAITGWGKCTPDNIMTNDDLSKFVDTSDEWIQQRTGVKERRFSHVNTSDMAEIAGKHAIACAGLNPEDIDVVILATCTPDSIVPSAAAHVQKKLGAVNASVYDVNAACAGFLYALEQGKAFVESSLYKRALVIGAEHITWLLDWSDRNTAVLFGDGAGAVVIEESKNESDGEIYSSQ

SEQ ID NO: 114133 - protein, 328 aa, Unknown
  Bacterial polypetide isolated from the Sargasso Sea
MATRSILAGCGAYLPDRVIDNNELAKLVDTSDDWIKQRTGIEKRHVVADGELTSDLAVKAADRALTRANIPANDIDLIIVATTTPDRTFPATATKVQADLGITSGAAFDIQAVCAGFVYALSIADNLLRAGQSRRAIVIGAETFTRLLDWTDRGTCVLFGDGAGAIILDSYEIEPAAKQFGVLSTHLHSDGRHRDILYVDGGPSMNSKTGHVRMSGKEVFRHAVSKLGSVINEALVANNLSSNDIDWLVPHQANKRIIESMAKKLNMPMDKVICSIDRHANTSAASVPLALTEGVSDGRIVDGDLVLFEAIGGGLAWGAGLVRMGYPK

SEQ ID NO: 114134 - protein, 307 aa, Unknown
  Bacterial polypetide isolated from the Sargasso Sea
MFSKINGTGSYLPEKKLTNKDLESMVDTTDEWIFERTGIKQRHISSEKETSSFMGFKAAEDAIKSSNISKSDIDLIIVATTTPDHVFPSNACLIQQKLGIQTPAFDIAAACTGYIYALSVADSFIKSGVYENILVIGTEQYSKIIDWDDRTTCVLFGDGAGATIISRSKTKGIISTNIDADGKFSNLLCVPDKYITMKGNEVFKVAVNTMGKLVDDTLNQSGLKKEEINWLVPHQANYRIISATAKKLNMPMENVVVTVDKHGNTSAASIPLALDYAIKKGDIKQNELLLLEAFGSGFTWGSALIRY

SEQ ID NO: 114135 - protein, 354 aa, Unknown
  Bacterial polypetide isolated from the Sargasso Sea
MQYATITGWGKCVPPATLTNDDLATFIETSDEWIKSRTGISQRHISHVNTSELASVAAKRALAAAGIDGSEIDMIILASASPDTLIPNIASTVQANIGASCAAFDINAACSGFLYGLGLASSQIKSGQCKKVLVVGAERLSFYLDWSRRETAVLFGDGAGAVVVEATDVPGGVLGYELNNDPDGRDILKAGFGTAMDRFSAESLDFYIQFDGQEIFKRAINGMNKLSTQVLEKCGVDKDEVDLVIPHQANERIIDTLVSRMKIPKEKAFVNIANYGNTSAATIPIAICDALEKGLIKPNQTILSCAFGAGLTSAALLLQWGERVTPVQVSDAQLPPCELSGIELVKRAVDYFCK

SEQ ID NO: 114136 - protein, 335 aa, Unknown
  Bacterial polypetide isolated from the Sargasso Sea
MYNSRISGLGMYVPENIVTNDDLSKIMDTSNEWIIERTGIKERRHIKKGDGNSTVVMGVKAAKIAIERAGIDKDDIDLILFATLSPDYYFPGSGVLAQEELDIPTCPAMDIRNQCSGFIYAISTADQFIKSGMYKNILVIGSENHSGGLDFTTRGRGVSVIFGDGAGAAVVTREEDLSKGILSSHLHSEGKHAEELSLIGPSTNRWVPEILEANDPDDISYYPYMNGQLVFKNAVVRFSEVIMEGLNHNDIKPNQIDMLIPHQANLRISQFVQKKFGLSDDQVYNNIQKYGNTTAGSIPIALTEAWQEGKIKSGDIIVLAAFGSGFTWGSTIIKW

SEQ ID NO: 114137 - protein, 265 aa, Unknown
  Bacterial polypetide isolated from the Sargasso Sea
MLREKAIEDANIQVSDLNAIILATSTADLTFPSAATMVQAGLGIRHGFAYDIQAVCAGFIYALSTANAQIVSGQANKILVIGSETFSNLMDWSDRSTCVLFGDGAGAVVLEAQNSNGNKEDRGILSVDLHSDGSYRDILYVDGGVSQKTTGYLRMEGKEVFKHAVDKLAKTSEKAMAKAGVKSGEVDWIVPHQANVRIIQGTARKMGIPDEKVIKTVQDHGNTSAASIPLALSVASKSGQIKQNDLIVTEAIGGGLAWGAIVLRW

SEQ ID NO: 114138 - protein, 207 aa, Unknown
  Bacterial polypetide isolated from the Sargasso Sea
MNHAGSSILRGVGSYAPARKLDNLELSQRVETSDEWITTRTGIKERRIAGDSESTSDLAVEASRRAIADAGLRVEDVDLVIVATITPDMAFPSTACLLQHKLGIPKVACFDLEAACSGFLYALDVADGMLSSGRYQCALVVGAEKLSTIMDWEDRTTCVLFGDGAGAAVLAREGEGAEMLGFQCGADGSNPSLLQQPAGGSLLPASN

SEQ ID NO: 114139 - protein, 364 aa, Unknown
  Bacterial polypetide isolated from the Sargasso Sea
MKSAITGWGKCTPDNIMTNDDLSKFVDTSDEWIQQRTGVKERRFSHVNTSDMAEIAGKHAIACAGLNPEDIDVVILATCTPDSIVPSAAAHVQKKLGAVNASVYDVNAACAGFLYALEQGKAFVESNLYKRALVIGAEHITWLLDWSDRNTAVLFGDGAGAVVIEESKSESDGEIYSFSNGLSSDNLEILEIPNFGSAMDRFKTDEAARVRWTFDGQEIFKSGVRAMAQASAEAIEKSGLSKDDVDIFIPHQANIRIVEALEKKLGLPNATTIKKVHRYGNTSAASIPTAFVDALEEGEIKGGEIAVFTAVGAGLAWGACAVRLGDRVTPINKSDAKLPDFDGTATDTIKKAIEYQVPDKLDKI

SEQ ID NO: 114140 - protein, 355 aa, Unknown
  Bacterial polypetide isolated from the Sargasso Sea
MGIEITGWGKCTPSAVLTNSDLESILDTDDEWITTRTGVKQRRIAEAPLSEIGTIAAKHALAAADKDPNEIDAVMMATCTPEFLIPSTASRVQMNIGNNTAAAFDFNSACSGFVYGLTTAYSMIHSGIFNNVLLVGGEKVSYFLDWTARDTAVLFGDGAGAVLIEKTNTDSKLHSSKMTCDPFLGEALMLKNFGTSMEIKDPKEGYFFGISFEGQEIFKNAVKTMARLAEEALEESGLSVDDIDLCIPHQANRRILEATAKRCNFPMEKMIINLDRYGNTSAGSIPIALTEALDEGKVKPNSKILFLAFGGGLTGAAAVIDWGGRSHALKTSNEQLPDSGKTALELVQDILNMYQ

SEQ ID NO: 114141 - protein, 298 aa, Unknown
  Bacterial polypetide isolated from the Sargasso Sea
MEKMVETSDQWIVERTGISERRIAAQDETVSTMGYQAALKALEMAGIEASELDMIICGTTSAANAFPAAACEIQAMLGVHTIPAFDIAAACSGFVYALSVADQFVKNGTAKKVLVIGADVLSRLCEPEDRTTIILFGDGAGAAVIGASDEPGIISTHIYADGRQGDLLKCAFPPRQGETSEAVGFMTMKGNDVFKVAVTQLSHVVTETLRLNNIDKSEIDWLVPHQANFRIINATAKKLDMSLDKVVLTLAKHGNTSAASVPIALDEAVRDGRIQRGQLLLLEAFGAGFAWGSALVRF

SEQ ID NO: 114142 - protein, 325 aa, Unknown
  Bacterial polypetide isolated from the Sargasso Sea
MSGEKFFRSKVIGVGGYLPDKVVTNDELSKTVETSDEWIKERTGIQERRIADESETTSSLGIQAAKNAIKNAGISSQDIDLIILATATPDNTFPATATSIQSGLGIKKGYAYDVQAVCSGFVYALELADNAIRLGKSNYALVIGSETFSRILDWNDRSTCVLFGDGSGAVVLKSTDYSSSSQILSNHLYSDGDYKDMLYVDGGPSTSNNVGFLRMDGGGVFKHAVKNISSSIIEALNTNNMTIEDIDWFVPHQANSRILDAVAKKIGIEKDKIIVTVDKHANTSAASIPLALNEAVYNNNISKGDIVLLAAMGGGFTWGSSLIRW

SEQ ID NO: 114143 - protein, 364 aa, Unknown
  Bacterial polypetide isolated from the Sargasso Sea
MKSTITGWGKCVPDNVVTNDDLATFVDTSDEWIQQRTGVKERRFCHVNNSDMATVAGLRAVACAGLKPQDIDVVILATCTPDSIVPSAAAHVQQKMECVNATAYDVNAACAGFLYALEQAKAFVESGLYKNAVVIGSEHITWLLNWSDRNTAVLFGDAAGAVVVEESKNEEDGEIYSFSNGMSSDKLDILEIPNFGSAMNRFTPNAAADVVWTFEGQEIFKSGIRAMAKSSEEAIEKSGLKKEDIDILIPHQANVRIIEGLERTLKLPNATTLKYGYKYGNTSAASIPTAFVDAIEDGTIKGNETLVITAVGAGLTWGGAALKLGNRITPLDETDVDLPPYEGTGIDVIRESINYFVPEKAEEK

SEQ ID NO: 114144 - protein, 129 aa, Unknown
  Bacterial polypetide isolated from the Sargasso Sea
MLYVDGGPSTSNNVGFLRMDGGGVFKHAVKNISSSIIEALNTNDMTIEDVDWFVPHQANSRILDAVAKKIGIEKDKIIVTVDKHANTSAASIPLALNEAVYNNNISKGDIVLLAAMGGGFTWGSSLIRW

SEQ ID NO: 114145 - protein, 326 aa, Unknown
  Bacterial polypetide isolated from the Sargasso Sea
MKAKITATAKYLPERTLTNSDLEKMVETTDEWIKSRTGIEKRHLVGEGEATSDMGKEVALKLLKKSGKSADEIDLILVATSTPDFPVVSTAALVQDKIGAKNAWGYDIVAACTGFVYAMETGAKLVESGKYKNVIVIGADTMSSIIDYTDRNTCVIFGDGGGGVLLEPSKNDCGILDSILFADGSGHKYLTVPAGGSLHPASKDTVNKGLHYVYQDGKTVFKFAVKNMADVSKQILDNNNLSGKDLKLFIPHQANKRIIDAAAKRCQLTDDQVLINVNKYGNTTAGTIPIALDDAVEANILEKNDLLLFAAFGGGFTWGSMLIKWA

SEQ ID NO: 114146 - protein, 330 aa, Unknown
  Bacterial polypetide isolated from the Sargasso Sea
MYKSKIIGMGFKVPDNIISNDDLSKIMDTSDEWIQSRSGIKERRWATEEVTTSDLAFSAANNAIKNAEINNKEIDLVIVGTLSSDYFFPGVSAQLQEKLNLNLVGAFDIKAACSAFIYSLSIADQYIKTGAAETILVVGAETQTKLIEKSSEGRDVAVLFGDGAGAAIVQRSDDESQILSTHLHSQGKDLKNLWMEAPGTSKGSWFKENKFDQKKFTPKMNGREVFKNAVKRFPEVIHEALDHNNLDFNDIKLIIPHQANYRISEAVAKKLEVGMDKVYSNIHKYGNTTSASIPIALTEAIYSKKINKGDLIILAAFGAGYTWASAAIKW

SEQ ID NO: 114147 - protein, 325 aa, Unknown
  Bacterial polypetide isolated from the Sargasso Sea
MSENLYKRSKIIGVGGYLPSKVLTNNDLSKDVDTSDEWITERTGIKERRIADESETTSSLGIEAAKKAIQNAGISSKDIDLIVVATTTPDNTFPATATSIQSGLGIKKGYAYDVQAVCSGFVYALELADNAIRLGKADYALVIGSETFSRIIDWNDRSTCVLFGDGSGAVILKSTDEDSSSSILSNHLYSDGDYKEMLFVDGGPSTSNNVGLLRMDGGGVFKHAVKNISSAIIDALEANEMTIEDVDWFVPHQANSRILESVAKKININKEKIIVTVDKHANTSAASIPLALNEANKNNQIKKGDIVLLAAMGGGFTWGSSLIRW

SEQ ID NO: 114148 - protein, 362 aa, Unknown
  Bacterial polypetide isolated from the Sargasso Sea
MKYANITGWGKCLPPSVLTNDDLSTIMDTSDEWIYPRTGIKARRISHVSTSDLATLAGRRALACAGLEASDLDGIILATATPDNLLPSAASAVQKKLGAVNAAVFDLNAACTGFVYSLSVATSLVQTGMMKKVLVIGAERLTYLLDWARRDTAVLFGDGAGAVVIEASEQESGLIANKLGCDSEAREILHVPNFGTDRVRFADIDGLFTFNFEGQEIFKRAVRGMGEATNTVLAQAGIAPEQIDLIVPHQANIRIIETLAKRMNAPMEKVMVNIEHYGNTSAATVPIALCEALEQGRVQPNSYLLTAAFGAGLTWGAAIIKWGDRVTPIKACEAELPPCDKSALELIAHAVEGCQKAHADEA

SEQ ID NO: 114149 - protein, 364 aa, Unknown
  Bacterial polypetide isolated from the Sargasso Sea
MKSAITGWGKCTPDNIMTNDDLSKFVDTSDEWIQQRTGVKERRFSHVNTSDMAEIAGKHAIACAGLNPEDIDVVILATCTPDSIVPSAAAHVQKKIGAINASVYDVNAACAGFLYALEQGKAFVESNLYKRALVIGAEHITWLLDWSDRNTAVLFGDGAGAVVIEESKNESDGEIYSFSNGLSSDNLEILEIPNFGSAMDRFNPDEAARVRWTFDGQEIFKSGVRAMAQASAEAIEKSGLSKEDVDIFIPHQANIRIVEALEKKLGLPNATTIKKVHRYGNTSAASIPTAFVDALEEGEIKGGEIAVFTAVGAGLAWGACAVRLGDRVTPINKSDAKLPDFDGTATDTIKRAIEYQVPDKLDKI

SEQ ID NO: 114150 - protein, 335 aa, Unknown
  Bacterial polypetide isolated from the Sargasso Sea
MTSNNKKHIKASITAVGGYLPEDSLSNKDLETMVDTSDEWIKARTGIKKRRVLKEKGKGTSYLAVNAANNLLARKEIDPTTIDLVIVATITPDFHCASTAPTVASAINAINAYAYDISAACSGFLFGMSTASSFIESGRYKKILLIGADMMSSIVDYTDRSTSILFGDGAGAVLVEPSTNGYGWEDEYLRSDGIGAEWLKVKSGGSLFPVSSETLNNKWHFITQDGKTVFKYAVSEMANATEQIMIRNKLKSDDIKYLLPHQANKRIIDATAEKINLDKKKVLMNIEQYGNTTAATIPLLMYDYEDNFKEGDKLIIAAFGAGLTWGAAYLTWAYN

SEQ ID NO: 114151 - protein, 354 aa, Unknown
  Bacterial polypetide isolated from the Sargasso Sea
MQYATITGWGKCVPPATLTNDDLATFIETSDEWIKSRTGISQRHISHVNTSELASVAAKRALAAAGIEGSEIDMIILASASPDTLIPNIASTVQANIGASCAAFDINAACSGFLYGLGLASSQIKSGQCKKVLVVGAERLSFYLDWSRRETAVLFGDGAGAVVVEATDIPGGVLGYELNNDPDGRDILKAGFGTAMDRFSAESLDFYIQFDGQEIFKRAINGMNKLSTQVLEKCGVDKDEVDLVIPHQANERIIDTLVSRMKIPKEKAFVNIANYGNTSAATIPIAICDALEKGLIKPNQTILSCAFGAGLTSAALLLQWGERVTPVQISDAQLPPCDQSGIELVKRAVDYFCK

SEQ ID NO: 114152 - protein, 190 aa, Unknown
  Bacterial polypetide isolated from the Sargasso Sea
ADQLSSFVDWNDRRSCILFGDGAGALAIEATNEFDNFIGFDMRTDGGRGSFLNLPSKNNKDSIVDEIDFLSGGFSPIQMNGQEVYKFAVKEVPLILQKLLKKMNYNSNQVDWLLLHQANQRILDSVGERLKIPREKILSNLEKYGNTSAATIPLMMDEAVRDYRIKQNDIIATSGFGAGLSWGAALIKWG

SEQ ID NO: 114153 - protein, 243 aa, Unknown
  Bacterial polypetide isolated from the Sargasso Sea
SSNHAIGTSARLIAYGDADVMVTGGSEMATTPLGVSGFLASRALSKSDDPKTASRPWDKDRDGFVLSDGAAILVLEEYEHAKKRSANIYAEVIGFGMSSDAYHMTAPSEDGTGASLSISRAISDAGISTNDIDYINAHATSTPLGDLAECNAVKSIFDSPPPISSTKSMTGHTLGAAGAVESIFSILSIVNNISPPTINLNNPDEGCDLDFIPKEARDMKIDVSLNNSFGFGGTNSTLIFKSV

SEQ ID NO: 114154 - protein, 328 aa, Unknown
  Bacterial polypetide isolated from the Sargasso Sea
MRATITATAKYLPKKTLSNYDLEKMVDTTDDWIISRTGIENRHIVDDNEATSDMGAQIANQLLEKSGKSPEDIDLILVATSTPDFPVVSTAALVQDKIGARNAWGYDIVAACTGFVYAMETGARLIESGRYKNIIVIGSDTMSSIIDYTDRNTCVIFGDGGGGVILEPTQKEVGILDAILHIDGSGHKFLTVPAGGSSNPASKETIDNKMHYVYQDGKTVYKFAVKNMADVSKKILDNNNLQGSDIKLFIPHQANRRIIDAAAKRCGLEDKQVFVNINKYGNTTAGTIPIALDEAVETNRLEEKDLLLLSAFGGGFTWGSMLIRWGRP

SEQ ID NO: 114155 - protein, 311 aa, Unknown
  Bacterial polypetide isolated from the Sargasso Sea
MAFGRITGWAIDLPERILTNDELSQMVDTSDEWIKERSGISSRHIDGKVSEMSTNAGKAALEKAGVKPDEIDLFILATTTADKVVPATSSIVQNNLGLSCGAFDLNAACSGFVYGLVTAMQFADSGMEKILLIGSDSLSTFTDWEDRTTCVLFGDGAGAVVIERTSDQPCFLGWDLMADGSAADLLYCEHGGKIVMHGQEVFRRAVIAMENAANTAMEKAGVTSDDISLVVPHQANVRIIDAAMKRLGIANEKAALVMDKTGNTSAASIPLALIDSIDSGRVKQDDLLLLVGFGAGMTSAAAVVRWNSEGN

SEQ ID NO: 114156 - protein, 335 aa, Unknown
  Bacterial polypetide isolated from the Sargasso Sea
MEGINFNQIGLSFKGSGSYVPDQILTNQKISQKVDTSNEWIKSRTGISERRISTLGDNVTEMGYKAALTAIEMANWDIKTIDLIVLATSTPHDLFGSAPSIQAKLGAANAVAFDLTAACSGFLFALITASQFLKGGSFKRAIVIGADQLSSFVDWNDRRSCILFGDGAGALAIEATNEFDNLIGFDMRTDGERGSFLNLPSKNNKDSIIDNIDFLSGSFSPIQMNGQEVYKFAVREVPIILEKLFKKMNYTSDEVDWLVLHQANQRILDSVGDRLKIPGEKILSNLEKYGNTSAATIPLVMDEAIRNNRIKQNDIIATSGFGAGLSWGAALIKWG

SEQ ID NO: 114157 - protein, 335 aa, Unknown
  Bacterial polypetide isolated from the Sargasso Sea
MEGINFNQIGVSFKGSGSYVPDQILTNQKISQKVDTSNEWIQSRTGISERRISSVEDNVTEMGYKAALTAIEMANWDIKTIDLIVLATSTPHDLFGSAPSIQAKLGAANAVAFDLTAACSGFLFALITASQFLKGGSFKRAIVIGADQLSSFVDWNDRRSCILFGDGAGALAIEATNDFDNFIGFDMRTDGGRGSFLNLPSKNNKDSIVEEIDFLSGGFSPIQMNGQEVYKFAVKEVPLILQKLLKKMRYNSDQVDWLLLHQANQRILDSVGERLKIPREKILSNLEKYGNTSAATIPLMMDEAVRDYRIKQNDIIATSGFGAGLSWGAALIKWG

SEQ ID NO: 114158 - protein, 334 aa, Unknown
  Bacterial polypetide isolated from the Sargasso Sea
MKPNKTNIKAAITAVGGYVPKDFISNKDLEKLVDTNDDWITARTGIKKRRILKDKGKGTSFLAINAAKDLIAKKKIDPETIDLVIVSTITPDFHVASTAPTVASAIKAKNAYAYDLSAACSGFLYGMSTATSFIESGRYKKVLIIGADMMSSIVDYTDRSTSILFGDGAGAVLVEPSINGYGWEDEYLRSDGIGAEWLNIKSGGSLHPISSETIENKWHYIAQDGKTVFKSAVSEMANATEQIILRNRLKSQEIKYLIPHQANKRIIDATAEKINLDKNKVLMNIENYGNTTAATIPLLMYDYEKNLNKGDKLILAAFGAGLTWGAAYLTWAYN

SEQ ID NO: 114159 - protein, 355 aa, Unknown
  Bacterial polypetide isolated from the Sargasso Sea
MGIEITGWGKCTPSAVLTNSDLESILDTDDQWITTRTGVKKRRIAEAPLSEIGTIAAKHALAAADKDPNEIDAVMMATCTPEFLIPSTASRVQMNIGNNTAAAFDFNSACTGFVYGLTTAYSMIQTGIFKNVLLVGGEKVSYFLDWTARDTAVLFGDGAGAVLIEKTDSESKLHASKMTCDPFLGDALMLKNFGTSMELKDPKEGYFFGISFEGQEIFKNAVKTMARLAEEALEESGLSVDDIDLCIPHQANLRILEATAKRCNFPMEKMIINLDQYGNTSAGSIPIALTEALDEGKVKPNSKILFLAFGGGLTGAAAVIDWGGRSHALKTSNEKLPDSNKTALELVQDILNMYQ

SEQ ID NO: 114160 - protein, 331 aa, Unknown
  Bacterial polypetide isolated from the Sargasso Sea
MKTIFKAVVEGTGFYVPEKTLTNKDLELSLNTTDEWITTRTGIKERRIASKDESASTMAARAGKQALEFAALNADQVDMIIVCTSSPDILFPSTACFVQKELEAFNSAAYDISAVCSGFVFGLSIAEQYIKAGRYEHILVIGSEVNSRIVDWSDRSTCILFGDGAGAVLLKRIEQSESIGILSTHIYSDGSLSDLISVPGGVGKTGINKQDIDDKKYFIKMAGNATFKVAVKRMTNVILEALEYNNIKIEDINLFIPHQANQRIISAVAEKLNLPEDKIHMTIQKFGNTSAASIPIGIENARLEGKIKPGDVSVLGVVGAGLTWGAGVIKW

SEQ ID NO: 114161 - protein, 138 aa, Unknown
  Bacterial polypetide isolated from the Sargasso Sea
MAQASAEAIEKSGLSKEDVDIFIPHQANIRIVEALEKKLGLPNATTIKKVHRYGNTSAASIPTAFVDALEEGEIKGGEIAVFTAVGAGLAWGACAVRLGDRVTPINKSDAKLPDFDGTATDTIKRAIEYQVPNKLDKI

SEQ ID NO: 114162 - protein, 272 aa, Unknown
  Bacterial polypetide isolated from the Sargasso Sea
MVSGLVSIEYGLHGPNLSIVTACSSGNHSIGFSARSISHGDCDVMITGGSEMAITPLGLGGFSAVTALSTNNENPTKASRPWDKDRDGFVLGDGAGVLVLEEYEHAKARSANIYAEVSGFGMSSDAFHMTAPAEDGKGAKQAMISALKDADLDSSKIDYINAHGTSTPLGDIIEANAIADIFSTSQEQIAVSSTKSMTGHLLGAAGAIESIFSILSLRDNHLPPTINLDNLDADAPKLNYVANESQEKEINYVLNNSFGFGGTNASLVFSKI

SEQ ID NO: 114163 - protein, 358 aa, Unknown
  Bacterial polypetide isolated from the Sargasso Sea
MQLPRRVVVTGMGLISPLGNSVNESWSNCIKGCSGISENVVDLEDMPIKVGGRIHDFDPTQYIDSKDIRRLDTFVQYGVSAGIQAIEDAGLDNNVDKDRVGLNIGSGIGGLDSIEKNKDILNKKSFKRVSPFFVPGSIINMTPGYLSIIKGYTGPNLSIVTACASSNHAIGTSARLIAYGDADVMVTGGSEMATTPLGVSGFLASRALSKSDDPKTASRPWDKDRDGFVLSDGAAILVLEEYEHAKKRSANIYAEVIGFGMSSDAYHMTAPSEDGTGASLSISRAISDAGISTNDIDYINAHATSTPLGDLAECNAVKSIFDSPPPISSTKSMTGHTLGAAGAVESIFSILSIVNNIL

SEQ ID NO: 114164 - protein, 333 aa, Unknown
  Bacterial polypetide isolated from the Sargasso Sea
MHKSIIKGLGYYVPENVVTNNDLTKMMDTSDEWIRERTGIEERRWVNDNKLSTSLMGTFAAEKAIKNANIDKNDIDFIIFATLSPDYYFPGSGVLLQRNLEIKEVGALDVRNQCSGFVYALSIADQYIKSGMYKNILVVGSEIHSGALDKTSRGRSVSVIFGDGAGAAVISASNDDSGILSTHLHSEGKFAEELAVIKPATTFWIDKIKNDDNEDGSGYSPYMNGNFVFKNAVVRFEQVIFEALNHSNLKKEDISLLITHQANLRISQYIQKRLNLSDSQVFNNIMKYGNTTAASIPIALSEAYESNLIKKGDIIVLAAFGSGFTWGSALIKW

SEQ ID NO: 114165 - protein, 266 aa, Unknown
  Bacterial polypetide isolated from the Sargasso Sea
ENASVAAIEMAGKSVNDIDLIIVATTTPDVIFPSTACLLQQRLDIHGCPAFDLQAVCTGFVYALHVADLFIKNGNSKCALVVGSETMSRIIDWNDRNTCVLFGDGAGAVILEKSNDPGILSTHIHADGAYQELLSVPAGISSNYELVKSNKAFIKMQGNEVFKVAVNTLGDIVDETLKANSMKNTEIDWLVPHQANTRIISAMAKKLDMPIENVVVTVGQHGNTSAASIPLALDVGINDGRIKDNDILLLPAFGGGFTWGSVLLQY

SEQ ID NO: 114166 - protein, 407 aa, Unknown
  Bacterial polypetide isolated from the Sargasso Sea
MQLPRRVVVTGMGLISPLGNSVNESWSKCIKGSSGISKNIVDLEDMPIKVGGRIHSFDPTQYIDSKDIRRLDTFVQYGVSAGIQAIEDAGLDNNVDKDRVGLNIGSGIGGLDSIEKNKDILNKKSFKRVSPFFVPGSIINMTPGYLSIIKGYTGPNLSIVTACASSNHAIGTSARLIAYGDADVMVTGGSEMATTPLGVSGFLASRALSKSDDPKTASRPWDKDRDGFVLSDGAAILVLEEYEHAKNRSANIYAEVIGFGMSSDAYHMTAPSEDGTGASLSISRAISDAGISTNDIDYINAHATSTPLGDLAECNAIKSIFDSPPPISSTKSMTGHTLGAAGAVESIFSILSIVNNISPPTINLNNPDEGCDLDFIPKEARDMKIDVSLNNSFGFGGTNSTLIFKSV

SEQ ID NO: 114167 - protein, 335 aa, Unknown
  Bacterial polypetide isolated from the Sargasso Sea
MKGNSSKNIKAAITAVGGFVPNDFISNQDLEKVLDTTDEWITTRTGIKKRRILKGQGKGTSYLAIKAAEDVITKRNIDPDTIDLVIVATITPDYKGAATAPSVASAIKANNAYAFDLSAACSGFLYGMSTATSYIESGRYKKVLLIGADKMSSVVDYTRRETSILFGDGAGAVLVEPSKNEFGWEDEYLRSDGIGAEWLMVKGGGSMYPMTQEALDSGWHYITQDGKTVFKAAVSEMASATEEIVNRNNLNPEDIKFLMPHQANKRIIDAAAEKINLDKNKVLMNISEYGNTTAATIPLLMFDYESKLSKGDKLILTAFGAGLTWGAAYLTWAYD

SEQ ID NO: 114168 - protein, 348 aa, Unknown
  Bacterial polypetide isolated from the Sargasso Sea
MTNDDLAVFVDTSDEWIQQRTGIQERRFCHVNNSDMAAVAGQHAIACAGLTPEDIDVVILATCTPDSIVPSAAAHVQRKLGAVNASVYDINAACAGFVYALEQGKAFVESGLYKRALVIGSEHITWLLDWSDRNTAVLFGDGAGAVVVEESKSPEDGEIFSFVNGLSSDKLDILEVPNFGSAMDRFNKDEAARVRWTFDGQEIFKGGIRAMATASDEVITKSGLTKEDIDLLIPHQANLRIVEGLEKMLGLPNATTIKKVHKYGNTSAASIPTALVDALEEGEIKGGEVAIFTAVGAGLSWGACALRLGERTTPINTSDAKLPDFDGKAVDTIRRAIEYQIPEKLDLI

SEQ ID NO: 114169 - protein, 368 aa, Unknown
  Bacterial polypetide isolated from the Sargasso Sea
MRPVSQARSRISIPSSTVSTAKKLARWISSSQYGIAAGIQALNDAGLVINEANAERIGVAIGSGIGGLGLIEQNHSSLVNGGPRKLSPFFVPSTIINMVSGHLSIMKGLQGPNIAVTTACTTGTHAIGMAGRMIAYGDADVMVAGGAEKASTPMGMGGFAAAKALSNRNDEPTKASRPWDKDRDGFVLGDGAGVLVLEEYEHAKARGAKIYAELVGFGMSGDAYHMTAPPADGNGGARAMQNAIKDAGIAPEQVGYINAHGTSTPLGDVAELRGMKAVFGEHAKSLMISSTKSMTGHLLGAAGAIEAIITVLALRDQMAPPTINLDNPDDECDLDLVPHVAKAGNFEYALSNSFGFGGTNGSLIFKRV

SEQ ID NO: 114170 - protein, 355 aa, Unknown
  Bacterial polypetide isolated from the Sargasso Sea
MGIEITGWGKCTPSAVLTNTDLETILDTDDEWITTRTGVKQRRIAEAPLSEIGTVAAKHALAAADKDPNEIDAVMMATCTPEFLIPSTASRVQMNIGNNTAAAFDFNSACTGFVYGLTTAYSMIHTGIFNNVLLVGGEKVSYFLDWTARDTAVLFGDGAGAVLIERTDSESKLHSSKMTCDPFLGDALMLKNFGTSMELKDPKEGYFFGISFEGQEIFKNAVKTMARLAEEALEEAGLSVDDIDLCIPHQANLRILEATAKRCSFPMEKMVINLDQYGNTSAGSIPIALTEALDEKKVKPNSKILFLAFGGGLTGAAAVIDWGGRSHALKTSDEKLPDSGKTAIELIKDILDMYK

SEQ ID NO: 114171 - protein, 420 aa, Unknown
  Bacterial polypetide isolated from the Sargasso Sea
MSSNNGKEVTVSRRRVVVTGLGLISPVGNNVADGWANLVAGKSGIATVTKFDASNLACHFAGEVKGFSAEEYIPAKEARNMDTFIHYGIAAGVQAIKDSGLEVNEANAERIGVLVGSGIGGLPMIEDTHQTYVDRGARRISPFFVPGSIINMISGHLSIMFGLKGPNLAAVTACTTGLHSIGLAARLIQAGDADVMVAGGAESTVSPLGIGGFAAARALSTRNDDPATASRPWDKDRDGFVLGEGAGVMVLEEYEAAKARGAKIYAEVSGFGMTGDAYHMTAPNMDGPRRCMVAALRDAGVNPDEVQYLNAHGTSTPLGDKNESDAVKAAFGEHAYKIVVNSTKSMTGHLLGGAGGLESVFTVLALHNNVSPPTINIFNQDPECDLDYCANTARDMKIDVAVKNNFGFGGTNGTLVFKRV

SEQ ID NO: 114172 - protein, 325 aa, Unknown
  Bacterial polypetide isolated from the Sargasso Sea
MSAEKVFRSKVIGIGGYLPDKILTNDELSKIVETSDEWIKERTGIHERRIADESETTSSLGIQAAKNAIKNAGISAQDIDLIILATATPDNTFPATATSIQSGLGIKKGYAYDVQAVCSGFVYALELADNAIRLGKSNYALVIGSETFSRILDWSDRSTCVLFGDGSGAVVLKSTDDSSSSQILSSHLYSNGDYKDMLYVDGGPSTSNNVGFLRMDGGGVFKHAVKNISSSIIEALNSNKITIEDIDWFVPHQANSRILEAVAKKIGIEKDKIIVTVDKHANTSAASIPLALNEAVQNNNIRKGDIVLLAAMGGGFTWGSSLIRW

SEQ ID NO: 114173 - protein, 318 aa, Unknown
  Bacterial polypetide isolated from the Sargasso Sea
MGFAKITGTGVYIPEKILSNKDLESLVDTSDEWIKARTGISERRILDEDKATSDMCYEACLQALENSSTNPDEIDGIIVATISPDYMTPSVACLLQERLNTRKIFAFDVSAGCSGFIYCLNIAKAMIENGQTKKLLIAGAENLSKIVDYTDRGTCILFGDGAGAVVIEESDSPGIMSVCLGSSGKEAELLYTPGGGSKDPNGSRFLVMHGKEVFKEAVKVIQSNSLEAIEAANIKPSDIDLFIPHQANMRIIEAARERLDLPIEKCFVNIEKYGNTSSASVLLALHEALEESRIKKGDNILFSVFGAGFAWGSAVLKW

SEQ ID NO: 114174 - protein, 280 aa, Unknown
  Bacterial polypetide isolated from the Sargasso Sea
DGEATSDMCKEVALELMKKSDKNPDEIDLILVATSTPDVPVVSTAALVQDKIGAKNAWGYDIVAACTGFVYAMETGAKLVESGKYKNVIVIGADTMSSIIDYTDRNTCVIFGDGAGGVLLEPSDDDCGVLDSILLADGSGHKYLTVPAGGSLRPASKETIDKKMHYVYQDGKTVFKFAVKNMADVSKEILDNNNIQGKDLKLFIPHQANKRIIDAAAKRCGLSEEQVLVNINKYGNTTAGTIPIALDDAVEAKMLEKNDLVLFAAFGGGFTWGSMLIKWS

SEQ ID NO: 114175 - protein, 335 aa, Unknown
  Bacterial polypetide isolated from the Sargasso Sea
MEEIKFNQIGISFKGSGSYVPDQILTNQEISKKVDTSDEWIKSRTGISERRISSFGDNVTEMGYEAARSAIEMANWDIKTVDLIVLATSTPNDLFGSAPSIQAKLGASNAVAFDLTAACSGFLFALITASQFLKGGSFKRAIIIGADQLSSFVDWSDRRSCILFGDGAGALAIEATNEFDNIIGFDMRTDGHRGSFLNLPSKNYKDSIINNINFLSGGFSSIQMNGQEVYKFAVKEVPNILEKLFLKTNYSSDQVDWLVLHQANQRILDSVGDRLKIPREKILSNLEKYGNTSAATIPLMIDESIKNNRIKQNDIIATSGFGAGLSWGAALIKWA

SEQ ID NO: 114176 - protein, 222 aa, Unknown
  Bacterial polypetide isolated from the Sargasso Sea
LKNFPAFSIEAACSGFIYALNIADKFIKSGDSKCALVVGAETLSRITNWDDRNTCVLFADGAGAAILKPSDDTGIIFSELGANGEYAELLHVPYGTSRKPERPKEDDYTLKMSGNEVFKVAVKTLEEIAIDALVKSNLQSKDIDWFIPHQANMRIIQAVAKRLELPEEKVILSMDIHGNTSAASIPLAFDRAIQDGRIKKGDTILMQSFGAGFTWGSVILDL

SEQ ID NO: 114177 - protein, 244 aa, Unknown
  Bacterial polypetide isolated from the Sargasso Sea
CIKYHAIGTSARLIAYGDADVMVTGGSEMATTPLGVSGFLASRALSKSDDPKTASRPWDKDRDGFVLSDGAAILVLEEYEHAKKRSANIYAEVIGFGMSSDAYHMTAPSEDGTGASLSISRAISDAGISTIDIDYINAHATSTPLGDLAECNAVKSIFDSPPPISSTKSMTGHTLGAAGAVESIFSILSIVNNISPPTINLNNPDEGCDLDFIPKEARDMKIDVSLNNSFGFGGTNSTLIFKSV

SEQ ID NO: 114178 - protein, 300 aa, Unknown
  Bacterial polypetide isolated from the Sargasso Sea
TSDEWIKSRTGISQRRISGLSENVSEMGYKAALGAIEMARWDIETIDLIILATSTPNDLFGSAPEIQSKLGAINAVAFDLTAACSGFLFAAITATQFLKAGSYKRAVVIGSDQLSSYVDWNDRRSCILFGDGAGALAIEGTNKLDNLIGFSMRTDGQRGSFLNLPSQNNQDLIIDDINFSSGGFSSIKMNGQEVYKFAVREVPLIIENLFKKTNFNSEKINWLLLHQANQRILDSVGERLNVSSEKILSNLSNYGNTSAATIPLMLDEAIRNKKIKENDIIATSGFGAGLSWGAALIRWG

SEQ ID NO: 114179 - protein, 318 aa, Unknown
  Bacterial polypetide isolated from the Sargasso Sea
MSNILITGVGSYLPKKVISNNELPVNLDTNDEWIKKRTGIRQRHLVTEGELTSTMAIAAAKKALQNANIDNKDIDLIIVATTTPDKTFPATAVMVQSELNIGICPAFDIQAVCAGFIYALNVGSSLLKTSNFSKALVIGSESFSKILDWSDRSTSVLFGDGAGAFVLEKSNENSEWGILSSNFYSNGNFSDILHTDGGPSINLQVGKVRMNGKEVFKHAVEKLSSCLIEAINSANLKIQDIDFLVPHQANLRIIEALSKKLDIPINKIINTVDVHANTSAASIPLAFDSALEKRIIKNGDIIAFNAIGGWFKAGVLSS

SEQ ID NO: 114180 - protein, 313 aa, Unknown
  Bacterial polypetide isolated from the Sargasso Sea
MTDLYSKIVSTGSYLPQKIYTNHDIEKLVDTSHDWIVERTGIISRHIADENESSVDMAYEASCKALERSNLKNNDIDLILVATTTPERKFPSTAVLLQSLLNNNKASAFDVNAACTGFIYALDIADKYIKGGFAKNVLVVGTEKITSLIDWSDRNTCVLFGDGAGAVVLTASQTPGLISNTIGSDGSYKDLLTVNTDTEVIEMRGNDVFKIAVNTMGKLAKKTLENSDYSVNNIDWLIPHQANSRIIKAVAKKINLSEDKIIMTVDKHGNTSAASIPLALDYGVNTGMVKKDHLIIFEAFGAGFTWGSTLLKF

SEQ ID NO: 114181 - protein, 301 aa, Unknown
  Bacterial polypetide isolated from the Sargasso Sea
DTNDEWITARTGIKKRRILKEKGKATSYLAINAANNLIKKKKLDPKTIDLVILSTITPDFHGASTAPTVASEINASNAYAFDINAACSGFLFGMSTATSYIESGRYKKILLIGADKMSSIVDYTDRSTSILFGDGAGAVLIEPSENDFGWEDEFLRSDGVGAEWLKIKAGGSLYPITKETFEKKWHFITQDGKTVFKSAVLEMANATEQIIIRNKLDPDDIKYLLPHQANKRIIDATAEKINLDKNKVLMNIEQYGNTTAATIPLLMYDYENNFKKGDKIILAAFGAGLTWGAAYLTWAYN

SEQ ID NO: 114182 - protein, 295 aa, Unknown
  Bacterial polypetide isolated from the Sargasso Sea
SIEKNKDILNKKSFKRVSPFFVPGSIINMTPGYLSILKGYTGPNLSIVTACASSNHAIGTSARLIAYGDADVMVTGGSEMATTPLGVSGFLASRALSKSNDPKTASRPWDKDRDGFVLSDGAAILILEEYEHAKNRSANIYAEVIGFGMSSDAYHMTAPSEDGTGASLSISRAISDAGISTNDIDYINAHATSTPLGDLAECNAVKSIFDSPPPISSTKSMTGHTLGAAGAVESIFSILSIVNNISPPTINLNNPDEGCDLDFVPNQARDMKIDISLNNSFGFGGTNSTLIFKSV

SEQ ID NO: 114183 - protein, 282 aa, Unknown
  Bacterial polypetide isolated from the Sargasso Sea
KGEGKGTSYLAIKAAEDIITKRNIDPNTIDLVIVATITPDYKGAATAPSVASAIKANNAYAFDLSAACSGFLYGMSTATSYIESGRYKKVLLIGADKMSSVVDYTKRETSILFGDGAGAVLVEPSKNEFGWEDEYLRSDGIGAEWLMVKGGGSMYPMTQAALDSGWHYITQDGKTVFKAAVSEMASATEEIVNRNNLNPEDIKFLMPHQANKRIIDAAAEKINLDKNKVLMNISEYGNTTAATIPLLMFDYESKLSKGDKLILTAFGAGLTWGAAYLTWAYD

SEQ ID NO: 114184 - protein, 329 aa, Unknown
  Bacterial polypetide isolated from the Sargasso Sea
MAQSTIYSRVLGTGSYLPPGRVTNQDLAERLAREGVETSDEWIVARTGIHARHFAEPNVTTSDLALIASQRAIEAADIDPQSIDLIIVATSTPDFVFPSTACLLQNKLGIKNHGAAFDVQAVCSGFAYAVATADSFIRSGQHRTALVIGAETFSRILDFKDRTTCVLFGDGAGAVILQASEEPGVLASALHADGSHSNILCTPGNVNGGVIEGSAFLHMDGQAVFKLAVNVLEKVAVEALAKANLSAEQIDWLIPHQANIRIMQSTCRKLGLPQERMVVTVGEHGNTSAASIPLAFDVAVRDGRIKRGQNVLIEGVGGGFTWGASVIRY

SEQ ID NO: 114185 - protein, 329 aa, Unknown
  Bacterial polypetide isolated from the Sargasso Sea
MAQSTLYSRVLGTGSYLPPDRVTNQQLTDRLAKEGIETSDEWIVARTGIHARHFAAPDVTTSDLALEASRRAIEAAGIDPQSIDLIIVATSTPDFVFPSTACLLQNKLGIKNGGAAFDVQAVCSGFAYAVATADSFIRSGQHRTALVVGAETFSRILDFKDRTTCVLFGDGAGAVILSASEEPGVLGSALHADGSYSNILCTPGNVNRGVIEGSAFLHMDGQAVFKLAVNVLEKVAIEALAKANLAPEQIDWLIPHQANIRIMTSTCRKLGLPQERMVVTVDQHGNTSAASIPLALDAAVRDGRIQRGQHVLIEGVGGGFTWGASVFRY

SEQ ID NO: 114186 - protein, 288 aa, Unknown
  Bacterial polypetide isolated from the Sargasso Sea
VSRTGIKERPIADDSQATSDLAYEAAKIAIERADIDKNEIDLIIVGTCTPDVATPNVGTIVQKRLELKNFPAFSIEAACSGFIYALNIADKFIKSGESKCALVIGAETLSRITNWDDRNTCVLFADGAGAAILKPSDDTGIIFSELGANGEYEELLHVPYGTSRKPERPKEDDYTLKMSGNEVFKVAVKTLEEIAIDALVKANLESKDIDWFIPHQANMRIIQAVAKRLELPEEKVILSMDIHGNTSAASIPLAFDRAIQDGRIKEGDTILMQSFGAGFTWGSVILDL

SEQ ID NO: 114187 - protein, 309 aa, Unknown
  Bacterial polypetide isolated from the Sargasso Sea
PNNIVTNKDLEKKVDTTDEWIVSRTGIKERPIADDSQATSDLAFEAAKIAIERADIDKNEIDLIIVGTCTPDVATPNVGTIVQKRLELKNFPAFSIEAACSGFIYALNIADKFIKSGESKCALVIGAETLSRITNWDDRNTCVLFADGAGAAILKPSDDRGIVFSELGANGEFAELLHVPYGTSRKPETPNADDYKLKMSGNEVFKVAVKTLEEIAIDALVKANLESKDIDWFIPHQANMRIIQAVAKRLELPEEKVILSMDIHGNTSAASIPLAFDRAIQDGRIKEGDTILMQSFGAGFTWGSVILDL

SEQ ID NO: 114188 - protein, 364 aa, Unknown
  Bacterial polypetide isolated from the Sargasso Sea
LIYLLLISILGGFILNLMPCVFPVLSLKLLSVINTEDKNIKSSFFITVLGIISSFLILGAFFAILKQINISISWGMQFQEPYFLMFILIIISMFFLNTLGLFQINLPSFLSSSKILNSGNNFYTKNFFNGFFATLLATPCSAPYLGTAVTAAFTQSTTYLFLIFCFMGIGMSLPYLIIAFFPGLISFLPRSGKWMIYFKYFLSILLFITIVWLLSILNNYFNYFFIVTFTVLLILISAILKFRIYQIPLIISLIIIFFLTPYLNSFQKINEENYKSNNWLDFNSKSIPEIIANNEIVFLDITADWCITCKFNKINVLNSKTVSDFFDSEEVILIKADWTQPNEKINKFLKKYNKFGIPFNAFYS

SEQ ID NO: 114189 - protein, 193 aa, Unknown
  Bacterial polypetide isolated from the Sargasso Sea
MALILPRNYHKIGAVERNRISWIEPAQAELQDIRPLRIGILNIMPLGKQYEFNLLHPLGLSVLQIEPVWIRLASHAYKSWDQEHLKDLYVSWDEALDQGPLDGLIITGAPVEHLPFEQVNYWKELVDLIEEARHNCASTLGLCWAGFALAYLAGVDKIPFERKLFGIYPLRSLIPEHPLMGTQDDRFSSAEPP

SEQ ID NO: 114190 - protein, 291 aa, Unknown
  Bacterial polypetide isolated from the Sargasso Sea
MVMDDFKANRQDIRPLKIGLLNLMPKKIQTENQFARVIGATPLQIELSLIKMSTHETKNTAAEHMQTFYRSFKDVKSSGEKFDGLIITGAPIEHLDYESVSYWRELIEIFEWTKTNVHAVFGVCWGGMAMLYHFYKIKKYDLLEKAFGCFRHENIEPSSPYLRGFSDDFIIPVSRWTELRQKEVDQFKNLKTLLASTEVGPCLIEDKKHNALYILNHFEYDSDTLKQEYDRDVEEGKKIVLPQNYYPNDDPQSNPKNRWRSHAHLLYGNWINEIYQTTPYDLNQIWRLKPI

SEQ ID NO: 114191 - protein, 295 aa, Unknown
  Bacterial polypetide isolated from the Sargasso Sea
MPKNYHKVAAIERNGISWIEPELAERQDIRPLRIGIINIMPLGMQYEFNLLHPLGLSPLQIEPVWIRLQSHDYKTWDHNHLDQQYCSWEQANASAPLDGLIITGAPVEHLAYEQVTYWQEMVELIGIARTQCASTLGLCWAGFALAYLAGVDKTAFQQKLFGVFPMRSLKPGHALMGTQDDSFVCPQSRHAGLDDAAMEEAQRQGRLRLLAHGEQVGYSIFETPDQRQLMHLGHPEYSSGRLLAEMERDRARGDVPPPQNFNAELPQTLWRSHRNLFFQQWLWFCYQRISLASPS

SEQ ID NO: 114192 - protein, 275 aa, Unknown
  Bacterial polypetide isolated from the Sargasso Sea
MPIKLPSSLPAFEVLSKEGVMVMSEDQATRQDIRPLQIGLLNLMPKKIQTENQFARLIGATPLQIELSLISISNHETKNTAAEHMKSFYKPFSEVFDSGKKFDGLIITGAPIEHLDYEEVTYWKEIVKIFNWTQTHVHSTFGVCWGGMAMLKHFYDIEKQILKEKAFGCFRHKNLNPNSKYLRGFSDDFIVPVSRWTEINKDDIVSIPQLKILLGSDEVGPCLIEDPKHSSLYIFNHFEYDSETLKQEYDRDTETGKKIEVPKNIIQEMTQQQNR

SEQ ID NO: 114193 - protein, 223 aa, Unknown
  Bacterial polypetide isolated from the Sargasso Sea
MPKNYHKLAAVERNGISWIEPELAERQDIRPLRIGIVNIMPLGMQYEFNLLHPLGLSPLQIEPVWIRLKTHDYKTWDHEHLNHQYCSWDQANAASSLDGLIITGAPVEHLAYEQVTYWQEMVELVEIARSQCASTLGLCWAGFALAYLAGVDKSAFKQKLFGVFPMRSLKPGHALMGTQDDSFVCPQSRHAGLDDAGMEEAQRQGRLRLLAHGEQVGYSIFET

SEQ ID NO: 114194 - protein, 295 aa, Unknown
  Bacterial polypetide isolated from the Sargasso Sea
MALILPRDYHKIGAVERNRISWIEPAQAERQDIRPLRIGILNIMPLGKQYEFNLLHPLGLSVLQIEPVWIRLASHAYKSWDQEHLKDLYVSWEEALAQGPLDGLIITGAPVEHLPFEQVTYWTELVELIDEARHSCASTLGLCWAGFALAYLAGVDKVPFDRKLFGIYPLRSLIPGHPLMGTQDDRFLCPQSRHAGLPDSAMESAQRQGRLRLLAYGQNVGYTIFETPDQRQLMHLGHPEYNVGRILGEMERDRARGDVPPPENFDADHPQTSWRSHRNLLFQQWLWFCYQRGAE

SEQ ID NO: 114195 - protein, 267 aa, Unknown
  Bacterial polypetide isolated from the Sargasso Sea
QDIRPLRIGIINIMPLGMQYEFNLLHPLGLSPLQIEPIWIRLASHDYKTWDHEHLDELYVSWEQANATAPLDGLIITGAPVEHLPYEQVHYWAELSELVAVARSACASTLGLCWAGFALAYLAGVDKTAFEQKLFGVFPMRSLVPGHALMGTQDDVFFCPQSRHAGLNDGAMEAAQRQGRLRLLAHGEDVGYTIFETTDQRQLMHLGHPEYNSGRLLAEMERDRARGDVPPPLNFDADAPQTLWRSHRNLFFQQWLWFCYQRVSLCH

SEQ ID NO: 114196 - protein, 234 aa, Unknown
  Bacterial polypetide isolated from the Sargasso Sea
MPIRIPEQLPAQNVLLGENIFTMDMDRAANQDIRPLEVGILNLMPNKIETEVQLLRLLSNTPLQINVDLIRIDNQAPKNTPQSHMDAFYHDFSSVANKKYDGLIVTGAPLALIDYEEVKYWETMTTILEWAQRHVNSTLYLCWAAHAAMYHFYGITRELRDEKFSGVFKHKVNDPNNELLRGFDPSFYAPHSRYGHIDTSLYNSVDGLNVVAESDEVGAYIVASEDKRMVFVTG

SEQ ID NO: 114197 - protein, 217 aa, Unknown
  Bacterial polypetide isolated from the Sargasso Sea
MPIKIPSDLPAFNVLRDEGVMVMDDFKANRQDIRPLKIGLLNLMPKKIQTENQFARVIGATPLQIELSLIKMSTHETKNTAAEHMQTFYRSFKDVKSSHEKFDGLIITGAPIEHLDYESVTYWEELIEIFEWTQTNVHAVFGVCWGGMAMLYHFYKIKKYDLTAKAFGCFRHENIEPSSPYLRGFSDDFIIPVSRWTELRQNEVDKFKNLKTLLAST

SEQ ID NO: 114198 - protein, 125 aa, Unknown
  Bacterial polypetide isolated from the Sargasso Sea
MPIKVIDQLPAVEALSAENVFVMTESRALSQDIRPLKIAILNLMPNKVATEIQLLRLLANSPLQVDVELIRLDNHVSKHTPQNHLDCFYRYFSDVQQKNYDGLIITGAPLGLVNYEDVSYWPQLS

SEQ ID NO: 114199 - protein, 156 aa, Unknown
  Bacterial polypetide isolated from the Sargasso Sea
HPRHSHHRIHHSHHWIWSHHRPHSRHTHHRVHTHHHWIWSHHRPHSRHSHHRIHHSHHWIWSHHRPHSRHTHHRVHTHHHWIWSHHRPHSRHSHHRIHHSHHHRIWSHHRSHAHIHTRKHAHIHVHHSTKVCWTHHVCSHHWPHKHVTSLHCILHH

SEQ ID NO: 114200 - protein, 199 aa, Unknown
  Bacterial polypetide isolated from the Sargasso Sea
MPIRIPEQLPAQNVLLGENIFTMDMDRAANQDIRPLEVGILNLMPNKIETEVQLLRLLSNTPLQINVDLIRIDNQAPKNTPQSHMDAFYHDFSAVADKKYDGLIVTGAPLALIDYEEVKYWDTMTTILEWAQRHVNSTLYLCWAAHAAMYHFYGITRELRDEKFSGVFKHKVNDPHNELLRGFDPTLNAPHSRYGHIKT

SEQ ID NO: 114201 - protein, 297 aa, Unknown
  Bacterial polypetide isolated from the Sargasso Sea
MALILPRDYHKIGAVERNRISWIEPAQAELQDIRPLRIGILNIMPLGKQYEFNLLHPLGLSVLQIEPVWIRLASHAYKSWDQEHLKDLYVSWEEALHQGPLDGLIITGAPVEHLPFEQVNYWKELVELIEEARHSCASTLGLCWAGFALAYLAGVDKIPFERKLFGIYPLRSLIPGHPLMGTQDDRFLCPQSRHAGLADSAMESAQRQGRLRLLAYGEDVGYTIFETPDQRQLMHLGHPEYNVGRILGEMERDRARGDVPPPENFDADQPQTSWRSHRNLLFQQWLWFCYQRVSLTA

SEQ ID NO: 114202 - protein, 501 aa, Unknown
  Bacterial polypetide isolated from the Sargasso Sea
LWPDQIEFEILGLKSIGYKDKVIFPLIVDIKDNQKQTNLNLNINYLVCKDVCIPGNADIFLNLPSGDGEYTDYFFEIEKVLSTTLNNNIDFTPISNFSFNAIQNNNDIIFDIEISTNSFFDDPKIFIHTPFGLPVVETINNYSLDFQKLNTSLYYNADQFNEKKFPIEIFFYDNNHSFKIEKNVEIENVDKNIPINTSLIYLLLISLLGGFILNLMPCVFPVLSLKLLSVINTEDKKIKSSFFITVLGIITSFLILGAFFAILKQINISISWGMQFQEPYFLMFILIIISMFFLNTLGLFQINLPSFLSSSKILNSGNNFYTKNFFNGFFATLLATPCSAPYLGTAVTAAFTQSTTYLFLIFCFMGIGMSLPYLIIAFFPGLISFLPRSGKWMIYFKYFLSLLLLVTIIWLLSILNNYFNYFFIITFFVLLILISAILKFRIFQIPLIISLIIIFFLTPYLNSFQKINEENYKSNNWLDFNSKNIPEIIANNEIVFLDITA

SEQ ID NO: 114203 - protein, 288 aa, Unknown
  Bacterial polypetide isolated from the Sargasso Sea
MVEITVKAADSASAMEEIEKRLGADAMIVSTNRIDGQIEIVATNDDPSKYKKAPEPLVLDQNYKIKGFSDLLNSKLSADDKPLKSEGYEQHVQIAETAENIKAEIDKLVEFSSRSKVVEPNNTSAHEYFKMSGIKGSLLDNSEHLGSNPSIKDVSKILAKSFINGKCDNFESSSIYIITGNAGAGKTLFSKKLQTLFETQIDAKSCTVFEEFKVKKSLTEIKNWFSKNKSKIVDKKQVGIIVLSNLENIDDFMLNLSKLDSAIKISILNLMPVGNSYEYLIKNMPHRR

SEQ ID NO: 114204 - protein, 233 aa, Unknown
  Bacterial polypetide isolated from the Sargasso Sea
TPRNTSADHLLAFYRSWESVRHRNFDGLIITGAPVETMPFEHVQYWQELTQILDWSQTHVQETLNLCWGAQASLYHFHKIPKHDLPQKMFGVFQHQIVTHNTTFLRGFNDVFPVPVSRHSETRQEDIDKVSDLYVLATSQEAGLCIVRDPVHRQLDMLNHLEYEHDTLATEYRRDVANGAEIQLPAHYFPNDDPNQKPVNFWRPLAHLLFANWINYLYQTSPFEVAQIPNIEN

SEQ ID NO: 114205 - protein, 149 aa, Unknown
  Bacterial polypetide isolated from the Sargasso Sea
SGVFVHRRTCQHFPLLRGFDDEFFAPHSRFAEMDIEELKQHPELLVLAESDEAGAYLVLSRNNRNLFVMGHPEYQKSTLNDEYHRDLAQGLNPNVPQNYYRNDDPEGDAIARWHSHGSLLVSNWLNYYVYQLTPYDLSDMSAVTPWESQ

SEQ ID NO: 114206 - protein, 86 aa, Unknown
  Bacterial polypetide isolated from the Sargasso Sea
MPIKIPDQLPAAEVLGQENIFVMTESRAVTQNIRPLRVLILNLMPKKIETEIQLMRMLSNSPLQVDVDLLRIDDRESKNTPQAHLE

SEQ ID NO: 114207 - protein, 138 aa, Unknown
  Bacterial polypetide isolated from the Sargasso Sea
MPIKIPDQLPAAEVLGQENIFVMTESRAVTQNIRPLRVLILNLMPKKIETEIQLMRMLSNSPLQVDVDLLRIDDRESKNTPQAHLENFYHDFEQVRGNNYDGMIITGAPLGLVEFEEVVYWPRIVEIIEWSHQHVTST

SEQ ID NO: 114208 - protein, 87 aa, Unknown
  Bacterial polypetide isolated from the Sargasso Sea
CSSRSPEYDALTLDGEYQRDLAAGLEPVIPVNYYPDNDPTRTPRASWRSHGHLLFSNWLNYYVYQLTSYRVEDIGKVFTYQQNSPSR

SEQ ID NO: 114209 - protein, 141 aa, Unknown
  Bacterial polypetide isolated from the Sargasso Sea
VNDPNNELLRGFDSPFAAPHSRYGHIDTSLYNSVEGLNVVAESEEVGAYIVASEDKRMVFVTGHPEYEPDTLKDEYLRDVQAGQHPAVPNNYFTDNDPTKPPLVQWRSHGSLLFTNWLNYYVYQTTPYDLSQLAEKPQPKR

SEQ ID NO: 114210 - protein, 107 aa, Unknown
  Bacterial polypetide isolated from the Sargasso Sea
YQQHDDLHILAEADVTGAYLLQNSSGSRVFVTGHPEYDLTTLDDEYQRDLAAGVTAKLPENYYRNNDPMQGPQKLWQSHAFLLFSNWLNYYVYQATPFELSQIGHGA

SEQ ID NO: 114211 - protein, 105 aa, Unknown
  Bacterial polypetide isolated from the Sargasso Sea
YTDLEILAETEEGDAYLFASKDKRIAFVTGHPEYDAHTLASEFFRDVEAGLSPDIPYNYFPQNDPQNKPRATWRSHGNLLFANWLNYYVYQITPYDLRNMNPTLD

SEQ ID NO: 114212 - protein, 312 aa, Unknown
  Bacterial polypetide isolated from the Sargasso Sea
MPIRIPEQLPAQNVLLGENIFTMDMDRAANQDIRPLEVGILNLMPNKIETEVQLLRLLSNTPLQINVDLIRIDNQAPKNTPQSHMDAFYHDFSAVANKKYDGLIVTGAPLALIDYEEVKYWETMTTILEWAQRHVNSTLYLCWAAHAAMYHFYGITRELRDEKFSGVFKHKVNDPNNELLRGFDPSFYAPHSRYGHINTSLYNSVDGLSVVAESDDVGAYIVASEDKRMVFVTGHPEYDPDTLKDEYFRDIAAGQTPVIPKNYFEGDDPAKSPIVQWRSHGSLLFTNWLNYYVYQTTPYDLSQLAEKSQPKR

SEQ ID NO: 114213 - protein, 313 aa, Unknown
  Bacterial polypetide isolated from the Sargasso Sea
MPVKIPDHLPAAGILESENIFVMSETRAANQDIRPMKVLILNLMPNKIETETQLLRLLGNTPLQVDVDLLRIHDKESKHTSIDHMNTFYRDFEDVRHKNYDGLIITGAPLGQIDFEEVTYWDHIREIIDWSQQHVTSVLFLCWAAHAGLYHLYGLNRKILQQKRSGVFVHRRTCQHFPLLRGFDDEFFAPHSRFAEMDIEELKQHPELQVLAESDEAGAYLVLSRNNRNLFVMGHPEYQKSTLNDEYHRDLAQGLNPNVPQNYYRNDDPKADAIARWHSHGSLLVSNWLNYYVYQLTPYDLSDMSAVTPWESQ

SEQ ID NO: 114214 - protein, 306 aa, Unknown
  Bacterial polypetide isolated from the Sargasso Sea
MPIKVIDQLPAVEALSAENVFVMTESRALSQDIRPLKIAILNLMPNKVATEIQLLRLLANSPLQVDVELIRLDNHVSKHTPQNHLDCFYRYFSDVQQQNYDGLIITGAPLGLVNYEDVSYWPQLAEILTWADRHVTSTLFLCWAAHAALYHYYGLQREIRGEKLSGVYWQNVSQPLSPLVRGFDDEFLVPHSRYAQVPKQKYQHHPDLHVLAEADATGAYLLQNSSGSRVFVTGHPEYDLTTLNDEYQRDLAAGLEPKVPENYYKQNDPAKGPHKLWQSHAFLLFSNWLNYYVYQATPFDIQQIGQ

SEQ ID NO: 114215 - protein, 309 aa, Unknown
  Bacterial polypetide isolated from the Sargasso Sea
MPIRVQDELPAVNFLREENVFVMTTSRASGQEIRPLKVLILNLMPKKIETENQFLRLLSNSPLQVDVQLLRIDARESRNTPTEHLNNFYCNFEDICDQNFDGLIVTGAPLGLVEFNDVAYWPQIQQVLEWAKDHVTSTLFVCWAVQAALNILYGIPKQTRTDKLSGVYEHHILHPHALLTRGFDDAFLAPHSRYADFPAAIIRDYTDLEIFAETEEGDAYLFASKDKRIAFVTGHPEYDAHTLGSEYFRDVEAGLTPEVPYNYFPKDDPQNKPRATWRSHGNLLFTNWLNYYVYQITPYDLRHMNPTLD

SEQ ID NO: 114216 - protein, 307 aa, Unknown
  Bacterial polypetide isolated from the Sargasso Sea
MPIKVIDQLPAVEALSAENVFVMTESRALSQDIRPLKIAILNLMPNKVATEIQLLRLLANSPLQVDVELIRLDNHVSKHTPQNHLDCFYRYFSDVQQQNYDGLIITGAPLGLVNYEDVSYWPQLAEILTWADRHVTSTLFLCWAAHAALYHYYGLQREIRGEKLSGVYWQNVSQPLSPLVRGFDDEFLVPHSRYAQVPKQKYQHHPDLHVLAEADATGAYLLQNSTGSRVFVTGHPEYDLTTLNDEYQRDLAAGLEPKVPENYYKQNDPAKGPHKLWQSHAFLLFSNWLNYYVYQATPFDIQQIGQQ

SEQ ID NO: 114217 - protein, 308 aa, Unknown
  Bacterial polypetide isolated from the Sargasso Sea
MPIKVIDQLPAVEALSAENVFVMTESRALSQDIRPLKIAILNLMPNKVATEIQLLRLLANSPLQVDVELIRLDNHVSKHTPQNHLDCFYRYFSDVEQQNYDGLIITGAPLGLVNYEDVSYWPQLSEILTWADRHVTSTLFLCWAAHAALYHYYGLQREIRGEKLSGVYWQNVCQPLSPLVRGFDDEFLVPHSRYAQVPKQKYQHHPDLHVLAEADVTGAYLLQNSTGSRVFVTGHPEYDLTTLNDEYQRDLAAGLEPKIPENYYKQNDPAKGPHKLWQSHAFLLFSNWLNYYVYQATPFDIQQIGQQL

SEQ ID NO: 114218 - protein, 313 aa, Unknown
  Bacterial polypetide isolated from the Sargasso Sea
MPVKIPDHLPAAGILESENIFVMSETRAANQDIRPMKVLILNLMPNKIETETQLLRLLGNTPLQVDVDLLRIHDKESKHTSIDHMNTFYRDFEDVRHKNYDGLIITGAPLGQIDFEDVTYWDHIREIIDWSQQHVTSVLFLCWAAHAGLYHLYGLNRKILEQKRSGVFVHRRTCLHFPLLRGFDDEFFAPHSRFAEMDIEELKRHPELQVLAESEEAGAYLVLSRNNRNLFVMGHPEYQKSTLNDEYHRDLAQGLNPNVPQNYYRNDDPKADAIARWHSHGSLLVSNWLNYYVYQLTPYDLSDMTAMTPWESQ

SEQ ID NO: 114219 - protein, 300 aa, Unknown
  Bacterial polypetide isolated from the Sargasso Sea
IHKLLETELANWLDQEKVLLFPSGFQANIAAIQALANRNSIVIADKLIHNSLLVGVKAAQAKLVRFSHNNLKDLKDKIIKSNPTKNSILVVVESLYSMEGSIAPLREITEICKKNSVQLLVDEAHAIGILGPEGRGLSFNFRSDITMITGTFGKAFGSGGAFIASNSEIGEYLIQTSGAFRYTTALAPSLAAGALEGLKKILENKEWGNDLLSSANVWKDEIIKNFSFPVQGDSHILSIIVGQEEKAIYLQKYLEENGFLAIAIRPPTVPVGQSRIRITIRRNLDFNLLKNFIAVLKEFK

SEQ ID NO: 114220 - protein, 299 aa, Unknown
  Bacterial polypetide isolated from the Sargasso Sea
SRPIHELLETELAEWLDQQKVLLFPSGFQANIAAIQALANRNSIIIADKFIHNSLLVGVKAAQAKLVRFSHNNLKDLEDKIIKFNPTKNSILVVVESLYSMEGSIAPLREITEICKKNSVQLLVDEAHAIGILGPEGRGLSFNIRKDITMITGTFGKAFGSGGAFIASNSENGEYLIQTSGAFRYTTALAPPLAAGALEGLKKILENKEWGNDLLSSAKVWKDEIIRNFSFPVQGDSHILSIIVGQEERAIDLQKYLEKNGFLAIAIRPPTVPVGQSRIRITIRRNLDLNLLKHFIAVL

SEQ ID NO: 114221 - protein, 40 aa, Unknown
  Bacterial polypetide isolated from the Sargasso Sea
KAANKLKQQGIWLTAIRPPTVAYNTARLRVTLTAAHTLIQ

SEQ ID NO: 114222 - protein, 93 aa, Unknown
  Bacterial polypetide isolated from the Sargasso Sea
MFRKAAKNACIPITQSTSPIQPILIGDARAALAVERELKKFKIYARAIRPPTVPKGTSRLRITLSSQHTEAQILDLINALKEVLPNGNKAKSE

SEQ ID NO: 114223 - protein, 149 aa, Unknown
  Bacterial polypetide isolated from the Sargasso Sea
VAGSEDLIESLIQFARPYIYTTSQPPALACATLKSLELLRSEHWRREHLNALIRQFRRGAEQIGLALMDSFTPIQPILIGDSARALRLSQMLRERGLMVTAIRPPTVPAGSARLRVTLTAAHSEAQVQLLLDGLQACFRLLDASEPGYA

SEQ ID NO: 114224 - protein, 152 aa, Unknown
  Bacterial polypetide isolated from the Sargasso Sea
MELFGKAFGSGGAFIASNSEIGEYLIQTSGAFRYTTALAPSLAAGALEGLKKILENKEWGNDLLSYANVWKDEIIKNFSFPVQGDSHILSIIIGQEEKAIYLQKYLEENGFLAIAIRPPTVPVGQSRIRITIRRNLDFNLLNNFITVLKEFK

SEQ ID NO: 114225 - protein, 133 aa, Unknown
  Bacterial polypetide isolated from the Sargasso Sea
YIYSTSLPVNAVEATRKSLKIISKENWRREKLISLISYYKKNIKESGFKSFKSNSQIQAILIGSSKDALYVSDQLFKSGIYIPAIRPPTVEEGKSRLRISLTVDHQLSDIDYLINILQKISRNLVQSQECAKK

SEQ ID NO: 114226 - protein, 57 aa, Unknown
  Bacterial polypetide isolated from the Sargasso Sea
EKKAIYLQKYLEKNGFLAIAIRPPTVPVGQSRIRITIRRNLDFNLLKNFIAVLKDFK

SEQ ID NO: 114227 - protein, 45 aa, Unknown
  Bacterial polypetide isolated from the Sargasso Sea
EAQGLLTVAIRPPTVPEGKSRLRLVIRRNTPDQAFERLIEILKNK

SEQ ID NO: 114228 - protein, 149 aa, Unknown
  Bacterial polypetide isolated from the Sargasso Sea
FGKAFGSGGAFIGSNSEIGEYLIQTSGAFRYTTALAPSLAAGALEGLKKILENKEWGKDLLTSANVWKDEIIKNFSFPVQGDSHILSIIVGQEEKAIYLQKYLEENGFLAIAIRPPTVPVGQSRIRITIRRNLDFNLLKNFIAVLKEFK

SEQ ID NO: 114229 - protein, 111 aa, Unknown
  Bacterial polypetide isolated from the Sargasso Sea
PLVAGAQAALNLIRSHPHWSRQLQQRASRWRDALESEGWTRPAGQGPVLPLLLGDDAAALAGQAGLEDNGLLCVAIRPPTVPEGTARLRLVLRRDLPDETVEQLLKALPCP

SEQ ID NO: 114230 - protein, 197 aa, Unknown
  Bacterial polypetide isolated from the Sargasso Sea
PLREITEICKRNCVQVFFDEAHAIGILGPEGRGLSFNYRSDITMITGTFGKAFGSGGAFIASNSEIGEYLIQTSGAFRYTTALAPSLAAGALEGLKKILENKEWGNDLLSSAKVWKDAINKNFSFPVQGDSHILSIIIGQEEKAIYLQKYLENNGFLAIAIRPPTVPVGQSRIRITIRRDLDFNLLKNFIDVIKEFK

SEQ ID NO: 114231 - protein, 379 aa, Unknown
  Bacterial polypetide isolated from the Sargasso Sea
MKKIKIPKNRIRKLKTFSLGKKSFELLSLNSQNKKLIDLCSNDYFGLSRDKDLIKAAYEISMLEGIGSGSSRFITGSRPIHKLLETELAKWLDQEKVLLFPSGFQANIAAIQALANRNSIVIADKLIHNSLLVGVKAAQAKLVRFSHNNLKDLEDKIIKSNPTKNSILVVVESLYSMEGSIAPLREITEICKKNSVQLLVDEAHAIGILGPEGRGLSFNFRSDITIITGTFGKAFGSGGAFVASNLEIGEYLIQTSSAFRYTTALAPPLAAGALEGLKKILENKEWGYELLSSAKIWKDEIIKNFSFPIQGDSHILSIIVGQEEKAIYLQKYLEKNGFLAIAIRPPTVPVGQSRIRITIRRNLDLNLLKNFIAVLKEFK

SEQ ID NO: 114232 - protein, 353 aa, Unknown
  Bacterial polypetide isolated from the Sargasso Sea
MKKVKIPKNRIRKLKTFSLGKKSFELLSLNSQNKKLIDLCSNDYFGLSRDKDLIKAAYEISLLEGIGSGSSRFITGSRPIHKLLETELAKWLDQEKVLLFPSGFQANIAAIQALANRNSIVVADKLIHNSLLVGVKAAQAKLVRFSHNDLKDLKDKIIKSNPTKNPILVVVESLYSMEGSIAPLREITEICKKNSVQLLVDEAHAIGILGPEGRGLSFNYRSDITMITGTFGKAFGSGGAFIASNSEIGEYLIQTSGAFRYTTALAPSLAAGALEGLKKILENKEWGNDLLSSANLWKDEIIKNFNFPVQGDSHILSIIVGQEEKAIYLQKYLEENGFLAIAIRPPTVPVGQS

SEQ ID NO: 114233 - protein, 132 aa, Unknown
  Bacterial polypetide isolated from the Sargasso Sea
DLGDALLQTSGAFRYTTALAPPLVAGAQTALDLIRSHPHWSQQLQQRASHWRDALEGEGWTRPAGVGPVLPLLLGSDAAALAAQAVLEGHGLLSVAIRPPTVPEGTARLRLVLRRDLPDETVGQLLKALPCP

SEQ ID NO: 114234 - protein, 312 aa, Unknown
  Bacterial polypetide isolated from the Sargasso Sea
SGSSRFITGSRPIHELLETELAKWLNQERVLLFPSGFQANIAAIQALANRNSIVIADKLIHNSLLVGVKAAQAKLVRFSHNNLKDLEDKIIKSNPTKNSILVVVESLYSMEGSIAPLREIMEICKENSVQLLVDEAHAIGILGPEGRGLSFNYRSDITMITGTFGKAFGSGGAFIASNSEIGEYLIQTSGAFRYTTALAPSLAAGALEGLKKIIENKEWGNDLLSSANVWKDEIIKNFSFPVHGDSHILSIIVGQEEKAIYLQKYLEENGFLAIAIRPPTVPVGQSRIRITIRRNLDFNLLNNFITVLKEFK

SEQ ID NO: 114235 - protein, 214 aa, Unknown
  Bacterial polypetide isolated from the Sargasso Sea
VVTEGVFSMDGDSPDLSAVSALCKTNKADMLLDDAHGLGVLGNEGKGSWDAQGLESSDMLCLMANFGKALAGQGAFLAGSATVIDYLRQFARHYIYSTALSPALCWAMKTSVELSRSQEWRRDKLNDNIQLFKTLAVGAGLTLLPSSTAIQPLIIGDSDKAMLISASLKKQGIWLSAIRPPTVPQGSARLRITLSALHQSDDIHFLVQKLEQLI

SEQ ID NO: 114236 - protein, 233 aa, Unknown
  Bacterial polypetide isolated from the Sargasso Sea
QALASQLARSEARRKLVVVDGVFSMDGDEAPLVDYAEACEGHDAWLMVDDAHGIGVLDAQGRGSVFTQGVNERVPVLMGTLGKGLGTAGAFVAGSDELIETLIQFARTFIYTTAMPAAVASATLVSLRKSREENWRRDTLAELIARFREGARALGYTLMPSQTPIQPLLIGSDVDATALSEALREKGFLITAIRPPTVPEGEARLRVTLSAAHEVEDVDALLAALAQCQPQDV

SEQ ID NO: 114237 - protein, 121 aa, Unknown
  Bacterial polypetide isolated from the Sargasso Sea
QPPAVAHATLTSLRLLRDERWRREHLAALIRRFRAGVEALGLELMDSPTPIQPILVGSSERALALSAALRQRGILVTAIRPPTVPKGTARLRVTLSAIHTEQQVDRLLETLAQAQQELIHE

SEQ ID NO: 114238 - protein, 383 aa, Unknown
  Bacterial polypetide isolated from the Sargasso Sea
MDRLQRFAQQIADRKAAGLYRQHPAIDSYQGRLLQNKQGAYLNFSGNDYLGLATEPKLINALAEGAERFGVGSSGSPLVTGFHYAHRALSDALCDWLGVDDVLLFSSGFAANQVMLQHLADKTEHLLLDKLCHASLIDAALTSDASYKRFPHQDLAALEMLLQRYPSALVVTEGVFSMDGDSPDLSAVSALCTINKADLLLDDAHALGVLGKEGKGSWDAQGLQPNDMLCLMANFGKALAGQGAFLAGSATVIDYLRQFARHYIYSTALSPALCWAMKTSVELSRSQEWRRDKLNDNIQLFKTLAAGAGLTLLPSNTAIQPLIIGDSDKAMLISASLKKQGIWLSAIRPPTVPQGSARLRITLSAMHQSDDIHFLVQKLEQLI

SEQ ID NO: 114239 - protein, 387 aa, Unknown
  Bacterial polypetide isolated from the Sargasso Sea
MSAALSEREQASLLRSRIATDGASGGRLRVAGRDYLNFSANDYLGLAGHPAIKTAFQEGIDRYGAGAGASPLVTGYSRAHQQLEETLADWLGLEAVLLFNCGFSANQAVLKALLGKDHLLWQDKLNHASLQEMGSQLPCKMKRFGHNDMAALERQLEPNRGLIVSEGVFSMDGDQGPWRELAALAAQSGNWLMIDDAHGLGVLGPQGRGTLAAQGVAPASVHIQMGTFGKALGVAGAFVGGSRELVAYLVNFARHYVYSTHMPAAQACAVRQSIALVRAADEARAHLGQLITRFRQGAEALGWQLGASATPIQPLLVGESGAALQLAERLRECGVWAGAIRPPTVPVGTARLRITLSAAHSEQDVDRLLDALGPCPADEERGGTHAA

SEQ ID NO: 114240 - protein, 270 aa, Unknown
  Bacterial polypetide isolated from the Sargasso Sea
QDKAAAQNSAIFQDKLNHASLIDGALHSNAALIRFNHNDLNHLRSRLEKSKAQNKLIISEGVFSMDGDTAPIKDLLLLAKQHNAWLMIDDAHGFGVLGNTGLGSCETFIGDILPDILVITFGKAVASSGACVLGSRAFIDYMLQYNRDYTYSTAMSPLLADNTLVRLKHIKKANTQRVMLNKNIATFKHLAQQHNIAVMESDTAIQPIVLGCAEQTLKAANKLKQQGIWLTAIRPPTVAYNTARLRVTLTAAHTLDDITYLVKHLAEALL

SEQ ID NO: 114241 - protein, 406 aa, Unknown
  Bacterial polypetide isolated from the Sargasso Sea
MSSPVISKLGSKILARQQALAEQGLLRQRQALSSAATLSEDGPQFGLAEQHYLNFSSNDYLGLSRAPALVEALHLGAKQYGVGSGASPLVTGYSEAHLALETKLCQITGFEAALLFSSGFSANTTLCKTLFDKQDVVLADKLVHASIIDGLRDSGADFKRFLHNSTESAERLLTKNAVSALITESVFSMDGDIAPILALSALCRAHNAWLIVDDAHGFGVVDAVSVQAESTPASNLIDIQIVTFGKALGCQGAAILGSRQLIEFLVSNAREYIYSTALSPANAALALAAVEYTEAHPELKQKLQRNILLFKQLCQDADIPLLGSDTAIQPLIIGDATQTMRVAEKLKALGIWVGAIRPPTVPVGSARLRITLSASHSEAVIRCCVSSIATVLKECALPRVSERPER

SEQ ID NO: 114242 - protein, 376 aa, Unknown
  Bacterial polypetide isolated from the Sargasso Sea
HASPIPPARRRRLRSLNSGQEPWQLQDPAGAGQLVDLASNDYLGLSRHPDVLAAASEAMASDGVGAGGSRLITGTRPRHLELEAALATWLNRDRVLLFPSGFQANIAALTALSDRHTIVLVDRLIHHSLLAGVRTSGARLQRFAHNDLEDLDQRLQRLKPTTQPPLVVTESLFSMEGTSPDLQGIADLCAHHGAQLLVDEAHGLGVLGPGGRGLSHGLQRPVALMCGTFGKAFGSGGAFLAGDHTTMELLLQTSGAFRYTTALAPPLVAGAQAALRLIQAHPHWGRELSQRSERWRRALADQGWAKPAGHGPVLPLLVGDDQDALDLQQLLEQAGLLSVAIRPPTVPEGTSRLRLVLRRDLPEGTLEQLLAALGSR

SEQ ID NO: 114243 - protein, 401 aa, Unknown
  Bacterial polypetide isolated from the Sargasso Sea
MSSPLASKLASKIRARQQALAGQGLLRQRQALSTDAELSDAEPQFCFEGQTYLNFSSNDYLGLCRAPELIAALHRGAQQYGVGSGASPLVTGYNEAHLALETKLCQITGFESALLFSSGFSANSTLCKTLFDKQDVVLADKLVHASIIDGLRDSGADFKRFLHNSTESAERLLAKNTVSALITESVFSMDGDIAPIAALSALCRAHNAWLIVDDAHGFGVSDIFNQPAANLIDIQIVTFGKALGCQGSAILGSRELIAFLVSNAREYIYSTALSPANAALALAAVEHCEAHPELRQNLQRNISIFKQLCQDADIPLLGSETAIQPLIIGDAEQTLLVSQKLKAMGIWVGAIRPPTVPIGSARLRITLSACHSEAAIRRCVNGIAQVLTEVALPRVSERPAR

SEQ ID NO: 114244 - protein, 375 aa, Unknown
  Bacterial polypetide isolated from the Sargasso Sea
MTQAEPARRRRLRTWCPGAESWQLRHAAEGGEPLLDLASNDYLGLSRHPDLIQAAAAALRTEGVGSGGSRLVTGSRPGHDDLEQALADWLGRDRVLLFPSGFQANIAAVGALANRRSTVLADRLIHHSLLVGVQASGARLQRFAHNDLADLERRLVKLSGDEAPLVISESLFSMEGTSPDVEALARLCSQHGARLLIDEAHALGVLGIGGRGLCHAMGQPVDLISGTFGKAFGSGGAFLAGDAAMGERLLQTSGAFRYTTALAPPLVAGARAALDLLQRHPNWGQELLQRSRRWRDALQQAGWCRPRGDGPVLPLLIGDDALTLQHQEQLEAQGLLSIAIRPPTVPEGTARLRLVLRRDLPQGSLERLLAALPSP

SEQ ID NO: 114245 - protein, 314 aa, Unknown
  Bacterial polypetide isolated from the Sargasso Sea
AAHLLSGHSYHHQALEEALAAFTGQQRVLLFSSGYQANLGVIDGLMGRDDVVIQDKLNHASLLDGSRLSEATLQRYRHGDIAGLARRLRAAEQVQHKLIVTDGVFSMDGDIAPLAEIMALADSEACAVLVDDAHGFGVLGETGRGTLSHLGLQNQMPIEVGTFGKAFGTAGAFVAADEVVIEMLIQQSRTFVYTTAQPAALAAATLASLQLVQQEQWRRDKLAMLIKQFRQGVAALGLQLMSSETPIQPIVLGDVERVMQYSDALEERGILVGAIRPPTVSEGAGRLRVTLSAAHEEADVFELVAALEAVTCTL

SEQ ID NO: 114246 - protein, 262 aa, Unknown
  Bacterial polypetide isolated from the Sargasso Sea
SALINKNTIVFQDKLNHASLVDAALLSKGKLVRYRHKDVSHLETLLKKYKNNNLIIMTDGVFSMDGDCAPLVEISMLSKKYNALLIVDDAHGIGVLGKRGAGLAEELNLEKEIDLLIGTFGKSFGAAGAFLVGSETLIESFIQKARTYIYTTALMPALAATITHTLDRIKKSNKLRLHIRELIAEYKTLLTQAGINASESNNHIQPLIIGDPKETIEISDQLYQKNILVSAIRPPTVPKGTSRLRISITAAHTTNDINLFVQ

SEQ ID NO: 114247 - protein, 629 aa, Unknown
  Bacterial polypetide isolated from the Sargasso Sea
MRAGRRLARFPVPVEGHQRRLPAAVARAHARRRVRRVLRRRHDARLPALAFVHRQPARVPRGGRDARPVRARRRARGQCPQVGDAARSARAARRPPAGTPPARARHAVRVRRRARRRRGARLLATLLRTRAGTRAAAAPDRHDRVSDATVRDERRRHRVARAKHARHARCDAGGSRPMSLLDTLQRGLAELDAQGLRRVRRTADTACDARMTVDGREIVGFASNDYLGLAAHPALVAAFAEGAQRYGSGSGGSHLLGGHSRAHATLEDELAAFSGGFSDAPRALYFSTGYMANLAAMTALTAKGATIFSDALNHASLIDGMRLSRANVQVYPHADTAALAALLDASDAETKLIVSDTVFSMDGDIAPLAELVALAERHGAWLVVDDAHGFGVLGPQGRGALAAAALRSPHLVYVGTLGKAAGVAGAFVIAHETVIEWMIQRARSYIFTTAAPPSVAHAVSASLKVIAGDEGDARRAHLAALIERTRALLRNTRWQPVDSHTAVQPLVIGSNDATLTAMRALDAHGLWVPAIRPPTVPVGTSRLRVSLSAAHSFDDLARLEAALIEASEAQAVQETEQPPRSLRSLPPEGAAASLGAARREAEQPPRSLRSLPPEGAAASLGAARRETAA

SEQ ID NO: 114248 - protein, 394 aa, Unknown
  Bacterial polypetide isolated from the Sargasso Sea
MHLLDTLTEGLKEIDARGLRRRRRTADTPCAAHMTVDGRAIIGFASNDYLGLAAHPQLIAAIAEGAQRYGAGSGGSHLLGGHSRAHAQLEDDLAEFAGGFVDNARALYFSTGYMANLATLTALAGRGTTLFSDALNHASLIDGARLSRADVQIYPHCDTDALSAMLDASDADVKVIVSDTVFSMDGDIAPLARLLELAEQHGAWLIVDDAHGFGVLGPQGRGAIAQAALRSPNLISIGTLGKAAGVSGAFVAAHETVIEWLVQRARPYIFTTASVPAAAHAVSASLRIIGGEEGDARRAHLQQLIERTRAMLKATPWLPVDSHTAVQPLIIGANDATLDIAATLDRAGLWVPAIRPPTVPVGTSRLRISLSAAHSQADLDRLEAGLQQLEAKAA

SEQ ID NO: 114249 - protein, 365 aa, Unknown
  Bacterial polypetide isolated from the Sargasso Sea
RIVTSPQGAQIDIKGKSFLNFSSNDYLGLANNNKLKLHMVESIKKYGVGSGSSQLMTGHMRPHQLLEKRLSIFFKKEASLIFSSGYHANLAIASTLINKNTVIIQDKLNHASLIDSALLSEGKLVRYRHKDFFHLQKILEKYKKQDLIVMTDGVFSMDGDRAPLREISKICHKYNALLIVDDAHGVGVLGKRGAGLMEELNLEGEIDLLIGTFGKSIGASGAFIAGNENLIEAFIQKARTYIYTTAMLPALANTIVHAIDLIENSNNLRTHICDLVEHYKKLSKKLELYLSDSNNHIQPIIIGGANETVRVSEALYEKNILVSAIRPPTVPKDTSRLRISITASHTKKDITLLLNTIKNIQSGDY

SEQ ID NO: 114250 - protein, 293 aa, Unknown
  Bacterial polypetide isolated from the Sargasso Sea
IVLCLMFADDTVLFACNWADCKNAFDNYVQYTRENGLCINVSKTIGMVFRKNNRRARVRNGRLEVRGARSQFTGCELKVDDTPVQFQSSFKYLGLVFEEGGGLCAAREHALAAGGRALYAVLGALMAFEYISYEYIKILYESLVISIVTYGCELWSIVTTKLKTTTQHDTFYKDLIRKELGVSKLCPNQLLFEISGKHPLSYQMWRRRLAFFIQGLNSSADSIIMKGIVELYDLEQQYGIRTWLADTMKIVAYTDPSARLKKNKTETGDWVMKMEGEGLAREFHCGGLEKEVS

SEQ ID NO: 114251 - protein, 214 aa, Unknown
  Bacterial polypetide isolated from the Sargasso Sea
TSCGGTRTGRRHDTPLHRKLEAKVAKFVGKEDAVVFNMGYGTNSTTVPALVGRGDLIVSDELNHSSIVAGCRASGALIRSFKHNDAKALEEVLREAIAYGRPRTRRPWRKILVMVEGIYSMEGEICDLKNISKVAKKYKAYLYLDEAHSIGALGDTGRGLCGIKFRAPHAIDATSSSQWHLLDGVEILRHRRDVVPVIASARWRGGSRRSPQYC

SEQ ID NO: 114252 - protein, 247 aa, Unknown
  Bacterial polypetide isolated from the Sargasso Sea
MIRLLGVLIWIGPATIWYGGRMIWAVFTGSSDKTCICQKNPKRWARQLLWISGVKICFENIDLINPSKPQILVANHSSWYDVLALVLIPGTFVFVAKRELASIPIFGRAIGSCGHIFVDRKDRSAAVRSLGVAKDLLENESPTIIMFPEGTRTKTGELQKFKKGAFVLAIQTGVDVLPAAVIGSREVMKKGSLRIKPGTITVRVGMPIEVNGLDLEDRNELTEGARNAVMQLQVQGAQKAIEPIGGG

SEQ ID NO: 114253 - protein, 209 aa, Unknown
  Bacterial polypetide isolated from the Sargasso Sea
LSYTSSKFLKYPTKIWIKVIFIFLEKICNIKHKIKGIENIPNETVLITSKHQSAFETFALYYYLKDCFFVHKKELFLIPIFGQYLFKSNMVAIDRAGGTKTMRSMLEKVRIKLESGSSIIIFPEGTRKAPGSKPAYKTGFIGIYNHTKKKILPVAVNSGLCWPKHSWILKNGTITIEILPIIYENYDKKTVLNKVQESIEVASNKLLTY

SEQ ID NO: 114254 - protein, 272 aa, Unknown
  Bacterial polypetide isolated from the Sargasso Sea
KQYVAALNIIHYMHDKYSYEASLMALHDRDVYRTMACGIAGLSVAADSLSAIKFAKVKPVRDEDGVAIDFEIEGEYPQFGNNDARVDDIACDLVERFMKKIQKLNTYRGAVATQSVLTITSNVVYGKKTGNTPDGRRAGAPFGPGANPMHGRDQKGAVASLTSVAKLPFAYAKDGISYTFSIVPNALGKDMEAQKANLAGLMDGYFHHESNLEGGQHLNVNVMNREMLLDAMENPEKYPQLTIRVSGYAVRFNSLTKEQQQDVITRTFTASL

SEQ ID NO: 114255 - protein, 307 aa, Unknown
  Bacterial polypetide isolated from the Sargasso Sea
MKVPSPGESISEVEIASWLVEDGEYVHKDQTIAEVDSDKATLELPAEESGIITLKAEDGDTVAVGQVVCLIDTSAKAPEGSEKPVENSSDSTDDIQVPSAPLKEETNYATGTPSPAASKIIAENQLDSNKIEGTGKAGRITKDDAISALNSSSSKPKEKPLKPGQSKQKMSLLRRKIAERLVSVKNEMAMLTTFNEVDMKPIMDIRKQYKEEFKEKHGVGLGFMSFFTKAVTQSLELFPAVNAQIDGKSMLMHEYADIGIAVSSPKGLMVPIVRNADEMTLNQIEAEIKRLAIKARDGKITPDEMSG

SEQ ID NO: 114256 - protein, 226 aa, Unknown
  Bacterial polypetide isolated from the Sargasso Sea
MSEEIKSPTFPESVADGTIANWVKKEGEAVSQDEVIAEIETDKVVLEVLAPSDGKISKIHKNEGDTVLSAELIGEFISGDSEELKTQTVEEEKPKEITTDLESSQDLVDKKSGPAAKRIIEEKELNPSEIQGSGKDGRITKADVISHVEKDPVIEESVKKTNVDLDRETKRVPMTRLRSTIAKRLVEVQQETAMLTTFNEVDMKPIKDIRSKYGDDFLKEHGVKLG

SEQ ID NO: 114257 - protein, 320 aa, Unknown
  Bacterial polypetide isolated from the Sargasso Sea
VELETDKVNLEVPSPISGTLSEISFKDGDTVEVGAVLGSISEGNVDIKNVPKSKKQFEDNEEKEFKDQKSNVINLDIEKKPQTKLEEPLVLTEDNSMELLEEEPLLLTEEVETEETSQQPIILSPAVRKMVAEKNINLDNVKGTGKAGRILKGDLITMMGANPQPNQRRIQYGEEERIKMTRLRQTIAKRLKQAQDNAAMLTTFNEVDMSGIMAMRKDNQEDFKSRYGIKLGLMSFFVKACVVGLKLFPAINAEVEDQDIIYKNYYNISFAVGTEKGLVVPVLRNADEMSFAEIEKEIKKLSEKANTGSLTIEDLQGGTF

SEQ ID NO: 114258 - protein, 311 aa, Unknown
  Bacterial polypetide isolated from the Sargasso Sea
VKKEGDNVSQDDVIAEIETDKVVLEVIAQSDGTISKIIKDEGEIVQSAEVIGEFDESGESSKAKEKTNDNVEDKKEPEKKIETKPVKNKQSTNKIGPAAKKIIAEENIDSDDIKPSGKGNRITKADVINHLDTENQEENIFTSTSINEDRPEKRVPMSRLRSTIAKRLVSVKQETAMLTTFNEVDMMPIKELRSKYGSEFEKEHGVKLGFMGFFVIAAVQALKKFPVVNASIDDDDIVYHGFQDIGVAVSTERGLVVPVIKDADTKSLPEIEKSILEYSDKARNGKLSIDEMQGGTFTISNGGIFGSLLST

SEQ ID NO: 114259 - protein, 189 aa, Unknown
  Bacterial polypetide isolated from the Sargasso Sea
MRGQYKDSFEKKHGVRLGFMGFFVKACSQALGEFPAVNSQIEGDEIVTYDYVDMGIAVSAPKGLMVPVIRNAETRNIAELETEIRRLAARARDNQLSLEEMEGGTFSITNGGVFGSMLSTPILNPPQAAILGMHNIVERPMAVNGEVKIRPVMYLALSYDHRLIDGQQSVSFLVRVKELLETPARMMLG

SEQ ID NO: 114260 - protein, 44 aa, Unknown
  Bacterial polypetide isolated from the Sargasso Sea
GKREVKRQRMSRLRRKLSERLVAVKNETAMLTTFNEVDMQQILT

SEQ ID NO: 114261 - protein, 281 aa, Unknown
  Bacterial polypetide isolated from the Sargasso Sea
VKDGDVVRKDQTIAELDSDKATLDLPAEASGKITLKAHEGDSMSVGDVVCLIDTSESITEIETDETESNIESIKEEKTQITQSENISVTPLARNIASEKGIDLNEIKTEGQKITKDDVLKAVPAMGASSDDSRSETKEKLSMLRRKVSERLVSVKNETAMLTTFNEADLSNIFEIRKKYKEAFLQRHGVSLGFMSFFTLSVTRALELYPDVNSMIDGDEKISYNYSDISIAVSGPKGLMTPVLRNAQKLSFSSVEQEIKRLADSVRNKTITVDDLTGGTLL

SEQ ID NO: 114262 - protein, 105 aa, Unknown
  Bacterial polypetide isolated from the Sargasso Sea
KLGEKAREGKITIDDLQGGTFTITNGGIYGSMLSTPILNPPQSAVLGMHNIIQRPVVVDGNIEVRPVMYLALSYDHRIIDGKEAVSFLKIVKESLEQPKRLFLNI

SEQ ID NO: 114263 - protein, 121 aa, Unknown
  Bacterial polypetide isolated from the Sargasso Sea
MKIEIKAPTLPESVPDGTIATWHKNIGDSVKRDELLVDIETDKVVIEVVSPTDGILEKIMKTSGDTIVSDELIGSVTEGEVPSGEKTEEVETQSATESSQSEPILSPAAKKLAKENQLDAA

SEQ ID NO: 114264 - protein, 100 aa, Unknown
  Bacterial polypetide isolated from the Sargasso Sea
LETARLPIEDLQGGTFTITNGGIYGSMLSTPILNPPQSAVLGMHNIVQRPVVVNGNVEVRPVMYLALSYDHRIVDGKEAVSFLKIVKECLEQPKRLFLNI

SEQ ID NO: 114265 - protein, 205 aa, Unknown
  Bacterial polypetide isolated from the Sargasso Sea
MSPAVRKIVNENNINIEEIKGSGKDGMILKGDLLSLMGVKPASSERKLKFGEEEKIKMSRLRMTIAKRLKQSQENAAMLTTFNEVDMTNIMNMRKENQVDFQQKFKIKLGIMSFFVKACVVGLKLYPAINAEVESENIIYKNYYNISFAVGTDKGLVVPVLKNADEMSFADIEMNIKTLSDKARDGKITIEDLQGGTFTISNGGV

SEQ ID NO: 114266 - protein, 189 aa, Unknown
  Bacterial polypetide isolated from the Sargasso Sea
KDKHDVGLGFMSFFTKAVVYALKQYPDVNSMIDREFQIKYDYCDISVAVSGPKGLMVPVLRGAENLTFKEIELEIKRLALRARDGEITVDEMTGGTFTISNGGVFGSMLSTPIINPPQSGILGMHNIIERPVALKGKVLIQPMMYLAFSYDHRIIDGRESVGFLVAIKEAIENPIEKLMDNNPKKSLEL

SEQ ID NO: 114267 - protein, 236 aa, Unknown
  Bacterial polypetide isolated from the Sargasso Sea
DKVTIEVNAPTGGVIIEIMANAGDEVEVGAILGKISNVVGMEIPVQENLTSKSIEEMSGRDIQMSPSVRKIIEDHGYDATKIPATGKDGRLTKGDVLAFQKKNNQAVKSKSVSREKLSAPTTNLVDAPRTQIPSIPAGPREERVKMTRLRKVIAGRLKEAQNTAAMLTTFNEVDMSAVIKTRSEFQEQFEKTHGVRLGFMSYFVKAAIVALKEFPAVNAEIQGDEIVYKNYYNIGV

SEQ ID NO: 114268 - protein, 270 aa, Unknown
  Bacterial polypetide isolated from the Sargasso Sea
PDLPESVADATVATWHKKPGDAVVRDEVLVEIETDKVVLEVPASADGILDAVLEDEGTTVTSRQILGRLREGNSAGKETSAKSEEKASTPAQRQQASLEEQNNDALSPAIRRLLAEHSLEASAIKGTGVGGRITREDVDKHLAKAPAKAEAKAPATAPAAQPALGARSEKRVPMTRLRKRVAERLLEAKNSTAMLTTFNEVNMKPIMELRKQYGEAFEKRHGIRLGFMSFYVKAVVEALKRYPEVNASIDGDDVVYHKNFDVSMAVSTPR

SEQ ID NO: 114269 - protein, 239 aa, Unknown
  Bacterial polypetide isolated from the Sargasso Sea
YPHEAFGLVEVKDLPRVKKLSGPQLVKSWTEIPHVTQHDEIDITELEHFRTSLIDHYTGEKIKISPLAFVTRAVVNALKKYPNFNASLDSRNNKIIFKKYFHIGFAVDTPHGLMVPKLRNVDQLNLKEIFEELKKVSKLCRELKIEKKEFFGGSMTISSLGGIGGNFFTPIINPPEVSILGIGKTFEKVKRVNGKIVIRKILPISLSYDHRLIDGAEGARFCVHLGESLGKDFAFKLAV

SEQ ID NO: 114270 - protein, 257 aa, Unknown
  Bacterial polypetide isolated from the Sargasso Sea
MSEKILVPVLGESVTEATVSRWLKSPGENVTSEEPLVELETDKVNIEVPSPSSGTLESISVKEGQTVNVGALLGTVGESKNKKKTETKKEERYNPPVKKNKPQKIEKKIEPLILDNLNEQDTSQQEEEPLILDQVHSKVGLETNKPKVLSPSARKLAVESNINTENIKGSGKNGVVLKEDVMTLMGSKPKPSERKVAHGPEERIKMTRLRLTIAKRLKEAQENAAMLTTFNEVDMYEVIKMKNTYKDEFQKKYSTKL

SEQ ID NO: 114271 - protein, 125 aa, Unknown
  Bacterial polypetide isolated from the Sargasso Sea
VPVLRETDEMSFADVEKNIGELGQKARDGKITIEDLQGGTFTITNGGIYGSMLSTPILNPPQSAVLGMHNIVHRPVVADGNIEARPIMYLALSYDHRIIDGKEAVSFLKIVKESLEQPKRLFLNI

SEQ ID NO: 114272 - protein, 120 aa, Unknown
  Bacterial polypetide isolated from the Sargasso Sea
ETDEMSFADIEKNIGLLGQKARDGKITIEDLQGGTFTITNGGIYGSMLSTPILNPPQSAVLGMHNIIQRPVVVDGKVEIRSIMYLALSYDHRIIDGKEAVSFLKIVKESLEQPKRLFLNI

SEQ ID NO: 114273 - protein, 159 aa, Unknown
  Bacterial polypetide isolated from the Sargasso Sea
QEYPAVNAEIKDENIIYKNHFDIGIAVGTEKGLVVPILKDADQLSFGEIETKIIDLSTKAKDGTLTMDDLTGGTFTISNGGVYGSMLSTPIINRPQSGILGMHNIQKRSVVVNDEIVIRPMMYVALSYDHRIIDGKESVGFLVKVKELLEDPSELVLGI

SEQ ID NO: 114274 - protein, 235 aa, Unknown
  Bacterial polypetide isolated from the Sargasso Sea
GESISEVEIAEWMVEDGDYVEKDQTIAEVDSDKATLELPAEQAGIITLKAEVGDVVAVGQVVCLIDTSALKPEGSSSDNKKVPSESQSSKSLESSSSSPKAKTYATGHPSVAANKIMNENNIHVEQIEGTGKGGRITKQDILQLLASLPELGNRKSEVRKLSMLRRKIASRLVNVKNETAMLTTFNEVDMKPIMDLRAKYKEAFKEKYKVGLGFMSFFTHACTLALKEYPTVNSM

SEQ ID NO: 114275 - protein, 242 aa, Unknown
  Bacterial polypetide isolated from the Sargasso Sea
VEEYPHEAFGLVEVKDLPRVKKLSGPQLVKSWTEIPHVTQHDEIDITELEHFRTSLIDHYTGEKIKISPLAFVTRAVVNALKKYPNFNASLDNRNNKIIFKKYFHIGFAVDTPHGLMVPKLRNVDQLNLREIFEELKKVSKLCRELKIEKKEFFGGSMTISSLGGIGGNFFTPIINPPEVSILGIGKTFEKVKRVNGKIVIRKILPISLSYDHRLIDGAEGARFCVHLSESLGKDFAFKLAF

SEQ ID NO: 114276 - protein, 124 aa, Unknown
  Bacterial polypetide isolated from the Sargasso Sea
AKRLKQAQENAAMLTTFNEVDMSGIMSMRKDNQEDFKSRYGIKLGLMSFFVKACIVGLKLFPAINAEIEDQDIIYKNYYNISFAVGTEKGLVVPVLRNADEMSFAEIEKEIKKLSEKANTGSLT

SEQ ID NO: 114277 - protein, 267 aa, Unknown
  Bacterial polypetide isolated from the Sargasso Sea
MSEKITVPTLGESVTEATVSKWLKSQGDKVIADEPIVELETDKVNVEVPAPTNGVLGNIAVKEGETVNVGSLLGTISNINQASSSLKEIKNYSPPKKTAPTEPKLFETEEEILSKKIKKTKKAEPILKLEEESKEFDEEPLILDETFKEQTKIKIKSPVKKETKISPAARKMATESNININELQGSGKNGVILKEDILSLMGTKPSPSERIIKYGPEERVRMTRLRLTIAKRLKEAQENAAMLTTFNEVDMSEVINMRNQYKDEFQK

SEQ ID NO: 114278 - protein, 97 aa, Unknown
  Bacterial polypetide isolated from the Sargasso Sea
GTLTMDDLTGGTFTISNGGVYGSMLSTPIINRPQSGILGMHNIQKRAVVVNDEIVIRPMMYVALSYDHRIIDGKESVGFLVKVKELLEDPSELVLGI

SEQ ID NO: 114279 - protein, 156 aa, Unknown
  Bacterial polypetide isolated from the Sargasso Sea
PAINSEIQGEEIVYKNYYNISIAVGTDRGLVVPVLRETDEMSFADIEKNISELGSKARDGKITIEDLQGGTFTITNGGIYGSMLSTPILNPPQSAVLGMHNIVQRPVVINGNVEARPIMYLALSYDHRIVDGKEAVSFLKIVKECLEQPKRLFLNI

SEQ ID NO: 114280 - protein, 256 aa, Unknown
  Bacterial polypetide isolated from the Sargasso Sea
MSEKILVPVLGESLNEATVSKWLKNKGDIVNADEAIVELETDKVNLEVPASVSGVLSEINSNEGDTVKVGAVLGIISDSKVNIEKIKPKNIEVQEEVLNIDSIDKNQVDNNEDLNIQTEPLMLNEEEEPLILDEEVKIEEKQSKPVERNINLSPAVRKIITEKNIDINKIKGTGRDGRILKGDLIALMGENPQPNQRKIKYGEEERIKMTRLRQTIAKRLKEAQENAAMLTTFNEVDMSGIISMRKENQEDLKIDT

SEQ ID NO: 114281 - protein, 229 aa, Unknown
  Bacterial polypetide isolated from the Sargasso Sea
SGTLSEISFRDGDTVEVGAVLGSISEGNVDIKKTPESKKQLEDNEDKEFKDQKSNVINLDIEKKPQTKLEEPLVLTEDNSMELLEEEPLLLTEEVKTEETSHQPIILSPAVRKIVTEKNINVDNVKGTGKAGRILKGDLITMMGANPQPNQRRIQYGEEERIKMTRLRQTIAKRLKQAQENAAMLTTFNEVDMSGIMAMRKDNQEDFKSRYGIKLGLMSFFVKACVVGL

SEQ ID NO: 114282 - protein, 312 aa, Unknown
  Bacterial polypetide isolated from the Sargasso Sea
GGQSASKNDKMKKIKATAQPTENINENIIKWDEGRDTKLFDNNNGEENLKNQTKQVINQEPEEEALVLTNEVKSDEKVKSGKEKIMSPAVRKIVNENNINIEDIEGSGKGGMILKGDLLSLMGIKPAPSERKLKFGEEEKIKMSRLRMTIAKRLKQAQENAAMLTTFNEVDMTNIMNMRKENQEDFQQKFKIKLGIMSFFVKACVVGLKLYPAINAEVEGENIIYKNYYNISFAVGTEKGLVVPVLKNADEMSFADIEMNIKTLSDKARDGKITIEDLQGGTFTISNGGVYGSMLSTPILNLPQSGVLGMHN

SEQ ID NO: 114283 - protein, 288 aa, Unknown
  Bacterial polypetide isolated from the Sargasso Sea
EATVQKWLKSRGDNVEADEPIVELETDKVNLEVPSPSGGILDEINFEAGSTVEVGATLGSILEGKTATQSVKIEKIKAITKPSENINDNIIELDEERDTKLFDGNNREENLKNQTKKAINKEAEEDALVLTDEVKSAEKVKSGKEKVMSPAVRKIVNENNINIEDVKGSGKDGMILKGDLLSLMAVKPAPSERKLKFGEEEKIKMSRLRMTIAKRLKQSQENAAMLTTFNEVDMTNIMNMRKENQNDFQQKFKIKLGIMSFFVKACVVGLKLYPAINAEVEGENIIYK

SEQ ID NO: 114284 - protein, 59 aa, Unknown
  Bacterial polypetide isolated from the Sargasso Sea
GMHNIIERPVVFDGEIKIKPMMYLALSYDHRIIDGKDSVSFLKCVKENLEDPRRLFLDL

SEQ ID NO: 114285 - protein, 227 aa, Unknown
  Bacterial polypetide isolated from the Sargasso Sea
MKIIVPSLGESVTEATVAKWLKKEGEPVEKDDVLVELETDKATLEVYAQTNGILTKIYFQDGQDVQIGEELAELEEKTNINTDKKSKQKSSDDTNINEKENKNNNEFFDLTNKKDTNDKSVISPSEAIRSGAGQKITSDDLKAFLKQQNLSPSERRKLSEDNADKFDTSNELSSKSNYIEKSERVQMSRLQRTMAKRLKSAQNTSAMLTTFNEVDMTEVIHIRKLHK

SEQ ID NO: 114286 - protein, 262 aa, Unknown
  Bacterial polypetide isolated from the Sargasso Sea
MGEENLKNQTKKVINEELEEEVLVLTEEVKSDKKVRPGKEKVMSPAVRKIVNENNINIEDVKGSGKDGMILKGDLLNLMGIKPAPSERKLKFGEEEKIKMSRLRMTIAKRLKQAQENSAMLTTFNEVDMTNIMNMRKENQDDFQQKFKIKLGIMSFFVKASVVGLKLYPAINAEVEGENIIYKNYYNISFAVGTEKGLVVPVLKNADEMSFADIEINIKILSDKARDGKITIEDLQGGTFTISNGGVYGSMLSTPILNLPQS

SEQ ID NO: 114287 - protein, 223 aa, Unknown
  Bacterial polypetide isolated from the Sargasso Sea
MSIEIKSPTFPESVAEGTVANWLKHEGENVSQDEVLAEIETDKVVLEVLAPENGILSKIIKKEGEVVLSAEKIADFEETSELSEVHEEEKVSKVEEKSVESKSKISEVKINKTGPAAKKLISENNIIEEEIIATGKHNRITKSDVVNHLESQSSSINTSEKKHSSDITSGRTEKRVEMSRLRETIAKRLVQVKQDTAMLTTFNEVDMQPIKDLRKKYGDEFQS

SEQ ID NO: 114288 - protein, 303 aa, Unknown
  Bacterial polypetide isolated from the Sargasso Sea
ELDEPIVEIETDKITLEVPSPSAGTLSEIKVSEGKDVSVGGVLGIIGDKKEQKDLKNSKKENITTENNQPSKKEDKKIKDTTKSNVQISPSVKKMIEENNLNLDHISSSRNDGRITKADIINYLDKSNETKKIKKSSKIEEIVPMSKIRKTIAKRLKEAQNTAAILTTFNEVDMSQIIKIRELKKEDFQQRYSIKLGFMSFFIKATILALKEFPAVNSEIRDDQIIYKNHYDIGIAVGSERGLVVPVLKNADDMTFGDIEKKIIEFSSKAKEGSLTVEDLSGGTFTISNGGVYGSMLSTPIIN

SEQ ID NO: 114289 - protein, 126 aa, Unknown
  Bacterial polypetide isolated from the Sargasso Sea
VVPVLKDADTMNFGQIEKSIIDLSTKAKDGTLSMDDLSGGTFTISNGGVYGSMLSTPIINRPQSGILGMHNIQKRAVVVDDEIVIRPMMYVALSYDHRIIDGKESVGFLVSVKKLLENPSQLVLGI

SEQ ID NO: 114290 - protein, 276 aa, Unknown
  Bacterial polypetide isolated from the Sargasso Sea
KEEIVSTLNNGESSKLSPAVKKLINENDLDSDKIISSRSDGRLTKSDVFDFMNNPSTTDKTSKEREEVVKMSKIRKTIATRLKESQNTAAILTTFNEVDMSEIMKVRETKKEDFMERYNVKLGLMSFFVKAVVTSLQEFPAVNAEIREENIIYKNHFDIGIAVGTEKGLVVPVLKDADTMTFGDIEQQIVDLSSKAKEGTLTMDDLTGGTFTISNGGVYGSMLSTPIINRPQSGILGMHNIQKRAVVFEDEIVIRPMMYIAFSYDHRIIDGKESVG

SEQ ID NO: 114291 - protein, 324 aa, Unknown
  Bacterial polypetide isolated from the Sargasso Sea
KVNLEVPSPSGGILGDINFEAGSTVEVGATLGSIMGGQSASKNDKIEKIKATTKPPENINDNIIKLDEDRDTKLFDNNNEEENLKIQPKQVTNQEPEEEALVLTEEVKSDEKVKSGKEKVMSPAVRKIVNENNINIEEIKGSGKDGMILKGDLLSLMGVKPAPSERKLKFGEEEKIKMSRLRMTIAKRLKQSQENAAMLTTFNEVDMTNIMNMRKENQVDFQQKFKIKLGIMSFFVKACVVGLKLYPAINAEVESENIIYKNYYNISFAVGTEKGLVVPVLKNADEMSFADIEMNIKTLSDKARDGKITIEDLQGGTSQLVTGA

SEQ ID NO: 114292 - protein, 98 aa, Unknown
  Bacterial polypetide isolated from the Sargasso Sea
DNQLSLEEMEGGTFSITNGGVFGSMLSTPILNPPQAAILGMHNIVERPMAVNGEVKIRPVMYLALSYDHRLIDGQQSVSFLVRVKELLETPARMMLGV

SEQ ID NO: 114293 - protein, 136 aa, Unknown
  Bacterial polypetide isolated from the Sargasso Sea
GVAVGTPQGLVVPVLRNADTMGFADIERTIADFGRRARDGKLTVAEMTGGTFTISNGGVYGSLMSMPILNPPQSGILGMHKIQKRPMVVGDEIKVRNMMYLALSYDHRIVDGREAVTFLVRLKECIEDPQRLLIDV

SEQ ID NO: 114294 - protein, 125 aa, Unknown
  Bacterial polypetide isolated from the Sargasso Sea
VPILKDADQLSFGEIETKIIDLSTKAKDGTLTMDDLTGGTFTISNGGVYGSMLSTPIINRPQSGILGMHNIQKRAVVVNDEIVIRPMMYVALSYDHRIIDGKESVGFLVKVKELLEDPSELVLGI

SEQ ID NO: 114295 - protein, 200 aa, Unknown
  Bacterial polypetide isolated from the Sargasso Sea
RVDIDSISKDRKVDTSKMSLLPRKLSQRLVAVKNQTAMLTTFNEVNMTPIFEIRKKYKETFIAKHDVSLGFMSFFTKAVVSALKEFPDVHSMIDEDQQIKFDFYDISIAVSGPKGLMVPVVRNAQDLTFSGIEKEIKRLAIRARDGLITVEDMSGGTFTISNGGVFGSMLSTPILNPPQSAILGMHNIIERPIAVNGKVE

SEQ ID NO: 114296 - protein, 192 aa, Unknown
  Bacterial polypetide isolated from the Sargasso Sea
EVNETIDEIQEDEPLVLNEEINDHKSNKNENLSPAVRKLVSEKKINIQEVKGTGKNGAVLKGDIIKLMGTTPKLNQRKIKFGHEERIKMTRLRQTIAKRLKEAQDNAAMLTTFNEVDMTNVLSSRKIHQESFQNKFGVKLGIMSFFVKACIIGLKNFPSINAEVEGQEIIYKNYYNISFAVGTDKGLVVPVL

SEQ ID NO: 114297 - protein, 137 aa, Unknown
  Bacterial polypetide isolated from the Sargasso Sea
ISIAVGTDKGLVVPVVKNSDELSFAEIEKNIAALGQKARDGKITIEDLQGGTFTITNGGIYGSMLSTPILNPPQSAVLGMHNIIERPVVEDGEVKIRPIMYLALSYDHRIIDGKEAVSFLKVVKDSLEQPKRLFLNL

SEQ ID NO: 114298 - protein, 193 aa, Unknown
  Bacterial polypetide isolated from the Sargasso Sea
MKIPSPGESITEVEISQWLVKDGDVVRKDQTIAELDSDKATLDLPAEASGKITLKAQEGESMSVGDVVCLIDTSESVTQIETDEIESNIEPIKEDKTQITQSENISVTPLARNIASEKGIDLNEIKAEGQKITKDDVLKAVPAMGAFSDDSRTETREKLSMLRRKVSERLVSVKNETAMLTTFNEADLSNIFE

SEQ ID NO: 114299 - protein, 297 aa, Unknown
  Bacterial polypetide isolated from the Sargasso Sea
EGSTIKSSDIIGRYKKGERISIVPAKDEKQETKAKEPEKKVEKKVKAPIEKSESTGTKKEKGFRMGPAAKKLLNEEDVDLTDIKASSKKGVVTKQDILEAAEKKPEKVEKESSHTYENEDIENTKRVPMTRLRSVVAKRLLESQFSTASLTTFNEVDLYEVKKLREKYRDSFEQKFGVKLGFMGMFLKASSIALQDMPIVNASIDGNDIVYHGSQDIGVAVSTEKGLVVPVVRNVQELSMAEIEMAIRDYSIKARDGKIEMADIIGGTFTVSNGGVFGSLLSTPILNPPPICHSWYA

SEQ ID NO: 114300 - protein, 268 aa, Unknown
  Bacterial polypetide isolated from the Sargasso Sea
MSLVDIKIPSPGESITEVEIGSWLKSDGDYVQVDETICEIESDKATLPLIAENSGKLKIILNEGAIAGVGDVACTIDTSGTITGDIKTSNLNAEKSKHDEKSLKNEKSIDLTLSGESSISKHATPYSEGHPSPAAKKMMVESDLSNLSGSGPGGRVTKYDVQKHLSNVSESLGSTAEKEKHNDSHLFSGERKIKRERMSRLRRKLAERLVSVKNETAMLTTFNEVDMSAVVELRSQNKDSFLKKHNVKLGLMSIFTKAPVPKPFGIVS

SEQ ID NO: 114301 - protein, 296 aa, Unknown
  Bacterial polypetide isolated from the Sargasso Sea
ESITEVEIAQWLVSDGDFVEKDQAIAEVDSDKATLELPAENSGIITLKAEEGDSVAVGQVVCLINTDGEQKIDTDKKNNVELSSESVKENVNETKENYASGSPSPAAKKILDEKGILPESIIGTGRNARITKEDAILAKPSMGSQTENQARENSRKKLSLLRRKLAQRLVTVKNETAMLTTFNEVDMNSIFSIRSEFKEQFKQKHEVGLGFMSFFTKAVVRALKLFPDVNSMIDGDYQIINDFYDISVAVSGPKGLMVPVLRNVEKMTFKDIESEIKRLAIRARDGEITVDEMTGG

SEQ ID NO: 114302 - protein, 234 aa, Unknown
  Bacterial polypetide isolated from the Sargasso Sea
LETDKVNVEVPAPTNGVLGSIEVKEGETVNVGSLLGTISINTSQTANSPKEIKNYNPPKKEIRNNPKLFEDDKETKAQKKINKAKNEEGILKLDQESPQVDEEPLILEEIHEEKKEKVAAKKTQQQKKETKVSPAARKMASEANIDLEKIEGTGKNGVILKEDIMSLMGSKPSPSERKIKHGPEERLKMTRLRLTIAKRLKEAQENAAMLTTFNEVDMSEVISMRNQYKDEFQN

SEQ ID NO: 114303 - protein, 254 aa, Unknown
  Bacterial polypetide isolated from the Sargasso Sea
MSNQILVPSLGESVTEATVSKWLKQVGEKVDSDEPLVELETDKVNIEVPSPLSGTLSSIKVKEGDTVSVGALLGLVNESKSQTVSNEKNKQEQTSYIPPKTNKKKKKNIDRERTLTLIEDAESKSSNGTLVLDTLANDDNKKLEKKKYIPPKSKKHLSPSVRKIVEEGNINISNIEGTGKGGRISKGDLIELMGNMPQPSKRKITHGQEERVKMSRLRVTIAKRLKEAQDSAAMLTTFNEVDMQNIIQMKKRLS

SEQ ID NO: 114304 - protein, 253 aa, Unknown
  Bacterial polypetide isolated from the Sargasso Sea
MKEKILSPTYPESVEEGVIANWKKLEGEMIIQDEVLAEIETDKVVIEVVAANDGVMTKIFKTEGEVVNSGEVIGEYEVGESELIKEKKSGKDKTPKIESKEPIISNSVNKFAQENEIDLSLIKGTGKSGRIIKQDLLNYISNKEEITKKEAVRETKRVPMSRLRKTVAERLVNVQRETAMLTTFNEVDMTAIMKIREQKGENFYKKNQIKLGYMGFFVSAAVSALNEYPQVNASIDGDEIVFHGFKDVGVAVS

SEQ ID NO: 114305 - protein, 282 aa, Unknown
  Bacterial polypetide isolated from the Sargasso Sea
MKIDIQIPSFGESVTEATVGQILVKNGDVVAEDDALFEMESDKASVELPSPASGAVTLTIQEDQVLEVGQVVGYIDTDVAAGAKTEQPTIQSESAQKVAEPVMTAKPASEMVTGATELRVDRNEYLQERPIEIPRASVSQPQKTQAHTEVRGRGEHREKMSKMRRVIAKRLVEVKQETAMLTTFNEVDLSRIIEIRKHHKESFEKKVGAKLSFMPFFVKAACQALDEFVDVNAMIDGEEIVYNDNVNMSLAVSTPKGLLVPVIQGCNHLRFAQIALAIQDLA

SEQ ID NO: 114306 - protein, 58 aa, Unknown
  Bacterial polypetide isolated from the Sargasso Sea
MHNIVERPMAVNGEVKIRPVMYLALSYDHRLIDGQQSVSFLVRVKELLETPARMMLGV

SEQ ID NO: 114307 - protein, 220 aa, Unknown
  Bacterial polypetide isolated from the Sargasso Sea
MSIEIKAPTFPESVADGTIANWLKKEGENVNQDEVIAEIETDKVVLEVLAQSDGIISKIVKNEGETVISSEIIGEFEETNGTISEVVEETIKEKKEEKMPVKAKKTNHGKKIGPAAKKIIAENDINPDDISPTGKDKRITKADLVNHLSSDQEIDPQKPSLSSREGRPEKRVAMSRLRSTIAKRLVSVKQETAMLTTFNEVDMLPIKDLRSKYGEEFENQ

SEQ ID NO: 114308 - protein, 264 aa, Unknown
  Bacterial polypetide isolated from the Sargasso Sea
MSQKILVPTLGESVTEATVSKWLKNQGDQVASDEPLVELETDKVNVEVPSPSDGTLQNITVKEGQTVNVGAVLGTIGSKINSTEKEVKEVKKYTPPIKKQEKVAKVTKLKNEKKQTVPEPLTLEKEDKSNIEETPLILEEQNLDKTEEPLILNNLSEKEKIKETKKVEKTFSPAARKLAAETKLNLDDIEGSGRNGIILKEDLLGLMGAKPEPSKRRLAHGPEERIKMTRLRLTIAKRLKDAQESAAMLTTFNEVNMQEVIQRK

SEQ ID NO: 114309 - protein, 261 aa, Unknown
  Bacterial polypetide isolated from the Sargasso Sea
MPNQILVPSLGESVTEATVSKWLKQVGEEVDSDEPLVELETDKVNVEVPSPMAGTLSSIKVKEGDTVEVGALLGEVNEGRSSFNVKKPIEKKEKEYTPPKKSKKIISQENIEKSRETIPVEEEALTLSNEVVEEESSNGTLVLDTLVDENPIPPTEEKYIPPKSKKNLSPAVRKIVEENNIDLSKVHGTGRSGRISKGDLINLMGNIPEPSKRKTTHGPEEKVKMSRLRVTIAKRLKEAQDSAAMLTTFNEVDMYNIIQMR

SEQ ID NO: 114310 - protein, 389 aa, Unknown
  Bacterial polypetide isolated from the Sargasso Sea
MTKELIVPTLGESITEATVSKWLKKIGENFDIDEPLVEIETDKITVEVPAPRAGVLSEIKVQEGSDVNIGGVLAIIGELQKSNSSESNINSKNNQRKEDVSSEEKKEQKLSPAVKKIVEEKNLDSKKISSTRNDGRITKADVINHLEEPSISKDSLKKKEEVVPMTKIRQTIANRLKEAQNTAAILSTFNEVDMSEIIKIRESKKENFIKNYGVKLGFMSFFVRACVMALKEYPAVNAEIREENIIYKNHYDIGIAVGTEKGLVVPVLKNADQMTFGDIEKKIFDLSLKAKDGKLTMQDLTGGTFTISNGGVYGSMLSTPIINRPQSGILGMHNIIKRPVVIDDEIAIRPMMYLAFSYDHRIVDGKESVGFLIKIKDLLENPSSLILGE

SEQ ID NO: 114311 - protein, 377 aa, Unknown
  Bacterial polypetide isolated from the Sargasso Sea
MKRIFLILFLFFFTSQKIEASNEISIYEKIDLFGEVFDKINKEYVEEINQSDAMDAAINGVLQSLDPHSAYMSPEIFENMQTETSGEFGGLGIEVGMESGVVKVISPLDNSPATKLGVKAGDYIIKINGEQVQGKTLNEAVELMRGPVGSEIEITVRRIGVKKSLTFKIIREIIKIKSVKSEIKNNNVGYIRLTTFNENSSDQIEKSIKKFKKENKIKSYILDLRNNPGGLLSQAIKITDFFLNNGEIVSTKSRKAFENRKWFAKEGDIINGTTLIVLINYGSASASEIVAGALKDHKRAILIGENTYGKGSVQSILPLKNKGAIRLTVSKYYLPSGKSISEIGVVPDIEIIEESEDFRINTDTDNQLDYALRLLKS

SEQ ID NO: 114312 - protein, 206 aa, Unknown
  Bacterial polypetide isolated from the Sargasso Sea
VTPATPDSELQSSGEEERIPMSRLRSTIAQRLVKVKQETAMLTTFNEVDMQPIKDLRAKYGEEFFAEHGTKLGFMGFFVSAAVQALRKFPIVNASIDNEDIVYHGFQDIGVAVSTDRGLVVPVVRDAGNLSIADIELKITEYSEKAREGKLSIEEMQGGTFTISNGGIFGSLLSTPILNAPQTAILGMHKIQDRPIALNERLLLGP

SEQ ID NO: 114313 - protein, 277 aa, Unknown
  Bacterial polypetide isolated from the Sargasso Sea
MKIPSPGESITEVEISQWLVSDGDIVSKDQTIAELDSDKATLDLPAETAGKISLKAEEGDTISVGEVVCVIDTSFALEENLDKVNKKESPSNVVKEDIIKSSSEEVTATPLAKKIAEETGVNLNQISTKGEKITKEDVLKAVPAMGSVNDDNRGETREKLSVLRRKVSERLVSVKNETAMLTTFNEADLSQIFDLRKKYKDIFSTKHGVSLGFMSFFTKAVTRALQMYPDVNSMIDGDHKVSYNYSDISIAVSGPKGLMTPVLRNAQNMSFASMSKK

SEQ ID NO: 114314 - protein, 259 aa, Unknown
  Bacterial polypetide isolated from the Sargasso Sea
MKVPSPGESITEVEIAQWLVKDGDYVEKDQAVAEVDSDKATLELPAEVSGTIILKAEEGDAVNVGEVVCTIDTEGKPAKGIIEPKTEIKNLDPIQKEESQTKNYATGTPSPAAKKIISEKNIDISSVVGSGRDGRITKSDVEKAKPSMGTIPIGGERKSESKKMSLLRRKVAERLVSAKNQTAMLTTFNEADLSNIFHIRKEHKEAFISKHDVNLGFMSFFTKAVVRALKMYPDVNSMIDGDHQITYDYCDISVAVSGP

SEQ ID NO: 114315 - protein, 309 aa, Unknown
  Bacterial polypetide isolated from the Sargasso Sea
MSEQIIVPALGESITEATVAKWLKNVGDTVEADEPVVELETDKVNLEVPSPISGTVGDIKFKDGDTVEVGAILGSIQNNGEATEKKPVEKHEQPKEEKKNNVVELEPEKKEVKVYEQKIAEETVVNENIISEENEEEPLVLTNEVEKKVSKNIKKRENNLSPSVRKIVAEKKIDLDKVKGTGRDGRILKGDLIDLMSIKPSPSERKIKFGEEEKIKMTRLRQTIAKRLKQAQDNAALLTTFNEVDMSGIIEMRKENQDDFQKRYGVKLGFMSFFIKSCILALKAFPIVNAEISGDEIIYKNYYNISFAV

SEQ ID NO: 114316 - protein, 288 aa, Unknown
  Bacterial polypetide isolated from the Sargasso Sea
MSIKIKAPTFPESVADGTIANWVKKEGDNVSQDDVIAEIETDKVVLEVIAQSDGTISKIIKDEGEIVQSAEIIGEFDESGESSKAKEKTNDNVEDKKEPEKKTKTKPVKNKQSTNKIGPAAKKIIAEENIDSDDIKPSGKGNRITKADVINHLDTENQEENIFTSSSISEDRPEKRVPMSRLRSTIAKRLVSVKQETAMLTTFNEVDMMPIKELRSKYGSEFEKEHGVKLGFMGFFVIAAVQALKKFPVVNASIDGDDIVYHGFQDIGVAVSTERGLVVPIIKDADTK

SEQ ID NO: 114317 - protein, 223 aa, Unknown
  Bacterial polypetide isolated from the Sargasso Sea
MTVELLVPTLGESVVEATVAKWMKSPGESIDSDEPLVELETEKVTLEVPSPISGVLKEISAKEGESVEVGALLGIISESNNESPTKNTSLQKNKEETALANTEKINKGKNEHLSPAVQRIVTENNLNPSEITPSGKDGLITKGDALNKLSDQDSSKLVNKTVSNNELEERVPMSRLRKVVAKRLKEAQNTAAMLTTFNEVDMTSIMSLRSEYKDHLKRSIRSD

SEQ ID NO: 114318 - protein, 215 aa, Unknown
  Bacterial polypetide isolated from the Sargasso Sea
MKENILSPTYPESVEEGVIANWKKLEGEMIIQDEVLAEIETDKVVIEVVAANDGVMTKIFKAEGEVVNSGEVIGEYEVGERELIKEKKSKKDETPKIENNEPLISNSVNKFAKDNEIDLSLIKGTGKSGRIIKQDLINYISNNERITKEEVVRETKRVPMSRLRKTVAERLVNVQRETAMLTTFNEVDMTEIMKIREQNGEDFFKKNQIKLGYMG

SEQ ID NO: 114319 - protein, 329 aa, Unknown
  Bacterial polypetide isolated from the Sargasso Sea
MSKKILVPTLGESITEATVSKWLKKVGDPVEIDEAIVELETDKVNLEVPSPISGVLSEMNSKDGDTVEVGAVLGSISEGKSNVEKKTPLKQEKEVETVDDDKIKEKNTNVINLDIEKKLTPKFDKISATSKDEPMELLDEVNKEPLLLTDEVQITQTTKVNPIILSPAVRKIAAENNIDVENVKGTGRDGRVLKGDLLSLMGTNPQPNQRRIQYGEEERIKMTRLRQTIAKRLKQAQENAAMLTTFNEVDMSGIISMRKDNQEDFKNRYGIKLGLMSFFVKACVVGLKLFPAINAEIEGNDIIYKNYYNISFAVGTDKGLVVPVLRNAD

SEQ ID NO: 114320 - protein, 243 aa, Unknown
  Bacterial polypetide isolated from the Sargasso Sea
MSEKILVPTLGESINEATVAKWLKNEGEVVAADEPIVELETDKVNLEVPSPVNGKLSKINSIDGTTVEVGAVLGIISETSEETKTIEKIKVSKPLTEKKDDNIVKLKVEKRPEPRIFEDQESEPQPLILTNEVSNKKKENLNKNLSPSVRKMVSEKKINIDKVKGTGKGGRVLKEDLLNLMGEVPKPNERKIQYGQEEKIKMSKLRQTIARRLKQAQENAAMLTTFNEVDMSSIISMRNENQE

SEQ ID NO: 114321 - protein, 326 aa, Unknown
  Bacterial polypetide isolated from the Sargasso Sea
MNTPVIVPTLGESVAEATVAKWLKKVGDPVSTDEVIVELETDKVSVEVTSPNSGYISEIKTKVGETVEVGSQLGSISQSQSKNTTNIEKEVITRKAKKSEEIKPKKSEPVNNNVVKLKTEVKKDELSPAVKRIVEERKIDLSQVQGSGKDGRILKSDLISLMGEKPVPTQRAETHGLEEKVKMTRLRATIAKRLKEAQNNAAILTTFNEVDMSMIIQLRKDNKEEFLKTYGVKLGFMSFFIKACVNALKTFPLVNAEVQNDEIIYKNYYNIGVAVGTDKGLVVPVVNNADQMSFADIEKNVLELGTKARDGQLTIDELQGGTFTIT

SEQ ID NO: 114322 - protein, 253 aa, Unknown
  Bacterial polypetide isolated from the Sargasso Sea
MSEEILVPVLGESITEATVSKWLVKSGQNVKADEPIVELETDKVNLEVPSPVSGVLSNIKTKEGETVKVGALLGIVIEGDNKESQEIQKIEPVEKVEKENKKTQEEKSNIVNFEKTKSAEPKIFDDKKLEEPLILTNEVKKSDTRKSNVNSNLSPAVRKIVEDQKIDISKVHGSGKEGRILKGDLINLMSSKPSPNQRKLEKGQEERVKMTRLRQTIAKRLKEAQNSAAMLTTFNEVDMSAIIQMRKNNQEDF

SEQ ID NO: 114323 - protein, 112 aa, Unknown
  Bacterial polypetide isolated from the Sargasso Sea
EIETKIIDLSTKAKDGTLTMDDLTGGTFTISNGGVYGSMLSTPIINRPQSGILGMHNIQKRAVVVNDEIVIRPMMYVALSYDHRIIDGKESVGFLVKVKELLEDPSELVLGI

SEQ ID NO: 114324 - protein, 296 aa, Unknown
  Bacterial polypetide isolated from the Sargasso Sea
MKKNKTIEPKIFDEKKPEEALILTEEPLKLTEEIHREEVPKKNNNINLSPAVRKIVEEKKIDTSKVQGTGKGGRILKGDLINLMSSKPIPNQRKLEKGQEERVKMTRLRQTIAKRLKESQNTAAMLTTFNEVDMSAIIEIRKDNQEDFQKKFGIKLGFMSFFVKACVLGLKLFPSINAEVDNDHIIYKNYYNISFAVGTNRGLVVPVLRNADELSFADIEKNIKIISEKARDGKLNIEDLQGGTFTISNGGVYGSMLSTPILNPPQSGVLGMHNIVERPIAVNAKVEVRPSYVSCF

SEQ ID NO: 114325 - protein, 331 aa, Unknown
  Bacterial polypetide isolated from the Sargasso Sea
MVENTGETVSKDEVLVELETDKATLEVYAQSNGVLSEIYIDAGQDVEIGAELAEFLENETIDSNKVIEEVELKSNAKNETKKNIDIGLENEKNKKEDIIDSELISSRDIKRSGIGNKITKSDIEEFIIGESLSPSQRRQDKLKQSVNYDLENKTELTIKNSSRVAMTRVQKTMAERLKLAQNNAAMLTTFNEVDMSEVIKIRKNNKENFENKFGVKLGFMSFFCNAAVLALKEIKIINSEIDGNDIIYHDHINLGIALAAPQGLLVPVIKQVDSKSFAEIEKEIFNFGIKAREGNITADQMNGATFTITNGGIYGSMMSTPILNPPPSGIL

SEQ ID NO: 114326 - protein, 262 aa, Unknown
  Bacterial polypetide isolated from the Sargasso Sea
KEFVRSQVTVNKGAVEKKEYKEEFSHEEFGQIEIKEIPRVKRLSGPHLVRSWTEIPHVTQHDEVDVTEMEQFRSSLYDYYSGDVIKVTPLAFIAKALVSALKEFPNFNASIDSNQKKIVYKKYFHIGFAVDTPHGLMVPKIRDVDQMSIKEIGEALKKTSKLCRELKIDKKEFFGGSMTISSLGGIGGTFFTPIINPPEVAILGVGKTFDRLVKIKGKIVSRKILPLSLSYDHRLIDGAEGARFCVYLGKCLGKDFAFKLAV

SEQ ID NO: 114327 - protein, 176 aa, Unknown
  Bacterial polypetide isolated from the Sargasso Sea
VKLGFMSFFVKACCKALEEVPEVNAQIDGDYIIYKKYVNMGVAVGTDNGLVVPVLKNADAMSFSDIEKEINKMGLLARDGKLSMADMTGGTFTISNGGIYGSLMSSPILNSPESGILGMHKIQERPMAIDGKIEILPMMYLALSYDHRIVDGKGAVTFLVRVKENLEDPRRLLIDL

SEQ ID NO: 114328 - protein, 272 aa, Unknown
  Bacterial polypetide isolated from the Sargasso Sea
MGSISENGTGTVKKKQINKTESSPNENNVVNLDIGQKEIKIFDKKIEDEISSDTPLVLTNEIKEEKNLNDNNYAHNLSPAVRKMVVDKNIDIKNVKGTGKNGRILKGDLINLMGEQPQPSERKIQYGQEERIKMTRLRQTIAKRLKQAQDNAALLTTFNEVDMSGVMEMKKQNQEDFQDRYGIKLGFMSFFVKACIVALKSFPSINAEIDGEDIIYKNYYNISFAVGTDKGLVVPVLKNADELSFANIEKKIKEISEKAREGKLIIEDLQGG

SEQ ID NO: 114329 - protein, 299 aa, Unknown
  Bacterial polypetide isolated from the Sargasso Sea
MVLTEEVKPDVAPKRNVNPTLSPAVRKIVTENNIDINSIQGSGKDGRVLKGDLISLMGANPKPSERKIQYGEEERIKMTRLRQTIAKRLKQAQENAALLTTFNEVDMSSVMEMRKENQEDFQSRYGIKLGFMSFFVKACVVALKNFPAVNAEIEGDEIIYKNYYNISFAVGTDKGLVVPVLRNADELSFADIEKHIKEISEKARDGKLTIEDLQGGTFTISNGGVYGSMLSTPILNLPQSGVLGMHNIVERPVVVDGEIKIRPIMYLALSYDHRIIDGKESVSFLKMIKENLEDPRRFF

SEQ ID NO: 114330 - protein, 281 aa, Unknown
  Bacterial polypetide isolated from the Sargasso Sea
EPIVELETDKVNVEVPAPSNGVLGSIDVQEGETVNVGSLLGTISKNLAKDTSGSNEIKNYSPPKKKDNEKNIKLFDNDQKTSEAKKINKTKIEKSILKLEEESKETEEEPLILEKIHTEKSQLKKTNQIQKETIISPAARKMASEANVDINKITGTGKNGTILKEDILKLMGSKPQPSERKIKHGPEERVRMTRLRLTIAKRLKEAQEKAAMLTTFNEVDMSEVILMRNQYKDEFQKNYGVKLGFMSFFVKACVIGLKNYPAINAEIQGEEIVYKNYYNIS

SEQ ID NO: 114331 - protein, 298 aa, Unknown
  Bacterial polypetide isolated from the Sargasso Sea
MSTELLVPTLGESITEATVSKWLKDIGDNFEADEPLVEIETDKITVEVPAPHAGSLKEIKVSEGTDVEIGGILGILDESKGKTTSPKKTENKEEKIKEEVKAVKVETKSSPAKSSPSARKIAEENNIKLENVISSRSDGRINKEDVVSHLSSSNKTSTNKGEREEVVKMSKIRQTISKRLKEAQNTAALLTTFNEIDMSKVMEIRKSKNQEFQSRYEVKLGFMSFFVKAVVKSLQEYPAVNAEIKDENIIYKNHFDIGIAVGTEKGLVVPILKDADKLSFGEKETKIIDLSTKAKDER

SEQ ID NO: 114332 - protein, 315 aa, Unknown
  Bacterial polypetide isolated from the Sargasso Sea
VSNGLKSQGEKVVADEPIVELETDKVNVEVPSPSNGVLRSIEVKEGETVNVGSILGTINNNNKSEVTEQKEIKSYSPPKKQPKLFEEKKNQVEKKKVTKPKIEDQVLKLENEEINDEPLILENVHEDKIENKETYKSKQEAKVSPAARKIASEQKIDLAEVKGTGKNGIILKEDIMNLMGSKPTPSERKVKYGPEERVKMTRLRLTIAKRLKEAQENAAMLTTFNEVDMSEVISMRNTYKEEFLNNYGVKLGFMSFFVKACVIGLKNFPAINSEIQGEEIIYKNYYNISIAVGTDRGLVVPVLRETDEMSFAEIE

SEQ ID NO: 114333 - protein, 225 aa, Unknown
  Bacterial polypetide isolated from the Sargasso Sea
MSKIRKTIATRLKESQNTAAILTTFNEVDMSEIMKVRETKKEDFMERYGVKLGFMSFFVKAVVSSLQEFPAVNAEIRDENIIYKNHFDIGIAVGTEKGLVVPVLKDADAMTFGDIEQNIVELSSKAKEGSLTMDDLRGGTFTISNGGVYGSMLSTPIINRPQSGILGMHNIQKRAVVVDDEIVIRPIMYLAFSYDHRIIDGKESVGFLVSIKSLLENPSKLILGV

SEQ ID NO: 114334 - protein, 188 aa, Unknown
  Bacterial polypetide isolated from the Sargasso Sea
RATTAKRLVEAQHNAAMLTTFNEVDMSPVMALRKQYQEEFQAAHNGTRLGFMSFFVRAATESLKRFPAVNASIDGNDIVYHGYFDIGVAVSTDRGLVVPVVREADALSLAQIEDQINEYGQKARAGKLSLEELSGGTFTISNGGIFGSLMSTPILNAPQTGVLGMHKIQERPVVVDGEIIVRPMMYLA

SEQ ID NO: 114335 - protein, 279 aa, Unknown
  Bacterial polypetide isolated from the Sargasso Sea
MVLTEEVVPSPAPVRENRNDTLSPAVRKIVTENNIDIGLVQGSGKNGQVLKGDLISLMGANPKPSERKIQYGQEERIKMTRLRQTIAKRLKQAQENAALLTTFNEVDMTNIIEMRKENQQDFQSRYGIKLGFMSFFVKACVVALKHFPAVNAEIDGDEIIYKNYYNISFAVGTDKGLVVPVLRNADELSFADIEKNIKDISEKAKDGKLTIEDLQGGTFTISNGGVYGSMLSTPILNLPQSGVLGMHNIVERPVVVDAEIKIRPIMYLALSYDHRIIDG

SEQ ID NO: 114336 - protein, 196 aa, Unknown
  Bacterial polypetide isolated from the Sargasso Sea
MSEVISMRNEYKEEFQSKYQVKLGFMSFFVKACVIGLKNFPAVNAEIQGDEIVYKNYYNISIAVGTDRGLVVPVLRETDEMSFADIEKNIGELGEKARNGKITIDDLQGGTFTITNGGIYGSMLSTPILNPPQSAVLGMHNIIQRPVVVNGNVEVRSVMYLALSYDHRIIDGKEAVSFLKIVKESLEQPKRLFLNI

SEQ ID NO: 114337 - protein, 287 aa, Unknown
  Bacterial polypetide isolated from the Sargasso Sea
ARELGANVLEIPGSQRSGRVSEEDVKEFVRSQVTVNKGSVEKKEYKEEYAHEEFGQIEVKEIPRVKRLSGPHLVRSWTEIPHVTQHDEVDVTEMEQFRSSLYDYYSGDVIKVTPLAFIAKALVSALKEFPNFNASIDPNQNKIVYKKYFHIGFAVDTPHGLMVPKIRDVDQMSIKEIGEALKKTSKLCRELKIDKKEFFGGSMTISSLGGIGGTFFTPIINPPEVAILGVGKTFDRLVKIKGKIVSRKILPLSLSYDHRLIDGAEGARFCVYLGKCLGKDFAFKLAV

SEQ ID NO: 114338 - protein, 287 aa, Unknown
  Bacterial polypetide isolated from the Sargasso Sea
VKEGTDINIGGILGILNENKGEKQGSAKIKEQNNEVKSNIDKEKKENLQVGANSNKSSPSARKMAEENNISIQNIKSSRSDGRINKEDIVKHINSSLKDSKVSSEREEIVKMSKIRQTISKRLKEAQNTAAILTTFNEVDMSQIMEIRNSKNKEFQERYDVKLGFMSFFVKAVTETLKEFPAVNAEIKDENIIYKNHFDIGIAVGTEKGLVVPVLKDADKMNFGEIEKSIIDLSTKAKDGTLSIDDLSGGTFTISNGGVYGSMLSTPIINRAQSGILGMHNIQKRAI

SEQ ID NO: 114339 - protein, 308 aa, Unknown
  Bacterial polypetide isolated from the Sargasso Sea
LVDEPLVELETDKVNVEVPSPISGILGSISVKEGETVNVGSLLGTVDSSSVGKKNIAKEVKDYNPPKKEKKETKLKIFENDKSTKQVKFEEPTLKLEEEEPLILEEIHDEKTQATNEKQVSPAARKIANEAKVDLNKIQGTGKNGVILKEDVMSLMGSKPAPSERKVKYGPEERVKMTRLRLTIAKRLKEAQENAAMLTTFNEVDMSEIIAMRNQHKDEFQLKYGVKLGFMSFFVKACVIGLKNYPAINAEIQGEEIVYKNYYNISIAVGTDRGLVVPVLRETDEMSFADIEKNIGDLGTKAKDGKIT

SEQ ID NO: 114340 - protein, 306 aa, Unknown
  Bacterial polypetide isolated from the Sargasso Sea
LKEEEPLLLTEEVEIDETSQQPIILSPAVRKIVTEKNINVDNVKGTGKAGRILKGDLITMMGANPQPNQRRIQYGEEERIKMTRLRQTIAKRLKQAQDNAAMLTTFNEVDMSGIMAMRKDNQEDFKSRYGIKLGLMSFFVKACVVGLKLFPAINAEIEDQDIIYKNYYNISFAVGTEKGLVVPVLRNADEMSFAEIEKEIKKLSEKANSGSLTIEDLQGGTFTISNGGVYGSMLSTPILNPPQSGVLGMHNIVERPVNDNGEIKIKPIMYLALSYDHRIIDGKESVSFLKTVKENLEDPRRLFFNI

SEQ ID NO: 114341 - protein, 152 aa, Unknown
  Bacterial polypetide isolated from the Sargasso Sea
ASLDEDEVIYHGFQDIGVAVSTERGLVVPVVRGVQNKNIAEIEQSILELSNKAREGNLSIEEMTGGTFTVSNGGVFGSLISTPILNPPQSAILGMHKIQDRPVAINGTVVIRPMMYLALTYDHRLLDGKDAVTFLVKMKESLESPESMILGV

SEQ ID NO: 114342 - protein, 109 aa, Unknown
  Bacterial polypetide isolated from the Sargasso Sea
KNISLLGEKAKDGKITIEDLQGGTFTITNGGIYGSMLSTPILNPPQSGVLGMHNIIERPVAKDGNIVVRPMMYLALSYDHRIIDGKEAVSFLKSIKDLLEDPKRLFLNI

SEQ ID NO: 114343 - protein, 298 aa, Unknown
  Bacterial polypetide isolated from the Sargasso Sea
ETDKVNVEVPSPSNGILDSISAKEGETVNVGALLGSITQTKSTPISSENDQDEKKYTPPKLEKNKKEEANNKTEKSEIKKKKQIKPLVLNEETNQKIFDADPLILEEEPLVLDETYNENKKTENIELRISPAARKIASEQKIDIHSIKGSGKNGLVLKEDIMSLMGVKPAPSDRKIAHGPEERIKMTRLRLTIAKRLKEAQENAAMLTTFNEVNMHEVIQMRNNYKEEFQKKYSVKLGFMSFFVKACIIGLKNYPAINAEIQGDEIVYKNYYNISIAVGTDKGLVVPVIRNSDELSFA

SEQ ID NO: 114344 - protein, 88 aa, Unknown
  Bacterial polypetide isolated from the Sargasso Sea
GGTFTISNGGIFGSLMSTPILNAPQTGVLGMHKIQERPVVVDGEIVVRPMMYLALSYDHRLIDGREAVQFLVAIKGMIEDPARILLEL

SEQ ID NO: 114345 - protein, 306 aa, Unknown
  Bacterial polypetide isolated from the Sargasso Sea
MTEKILVPVLGESITEATVSKWLKRKGDSINADEPVVELETDKVNLEVPSPINGTITAINFKDGDTVEVGAVLGEIELGPVEEKKEDSKIVKKTSEKINDNVINFDKEKNQPKIFEEQKKDEKPLILNEEKPLVLKKELSSNQKVITKKTLSPAVRKIVEENNIDINSVKGTGKSGQILKGDLINLMGSTPQPSERKLKYGEEERIKMSRLRLTIAKRLKEAQENAAMLTTFNEVNMSNIIEMRKNNQEDFKNKFGIKLGFMSFFVKASILGLKAFPAINAEIEDQEIIYKNYYNISFAVGTEKRF

SEQ ID NO: 114346 - protein, 246 aa, Unknown
  Bacterial polypetide isolated from the Sargasso Sea
MGANPKPSERKIQYGEEERIKMTRLRQTIAKRLKQAQENAALLTTFNEVDMSSVMEMRKENQEDFQSRYGIKLGFMSFFVKACVVALKNFPAVNAEIDGDEIIYKNYYNISFAVGTDKGLVVPVLRNADELSFADIEKNIREISEKARDGKLTIEDLQGGTFTISNGGVYGSMLSTPILNLPQSGVLGMHNIVERPVVIDGEIKIRPIMYLALSYDHRIIDGKESVSFLKMIKENLEDPRRLFLDI

SEQ ID NO: 114347 - protein, 245 aa, Unknown
  Bacterial polypetide isolated from the Sargasso Sea
EVTPQIFEKPIEQKSKKVEKKLILEEVKEEPPLILSEEVKSDNYVEEKIVSPSARKIANEKNIDLSKIAGTGKNGVILKEDLLNLMGSKPAPNKRKITHGPEEKIKMTRLRMTIAKRLKEAQNNAAMLTTFNEVDMSKVIQMKNDYKNEFIKKFSTKLGFMSFFVKACVAALKNFPAINAEIQGDTIVYKNYYNISFAVGTDRGLVVPVLRSPDEMSFAEIEKNILSLGEKARDGKITIEDLQGG

SEQ ID NO: 114348 - protein, 69 aa, Unknown
  Bacterial polypetide isolated from the Sargasso Sea
ILNAPQSGILGMHNIVQRPMAINGEVKIRPMMYLALSYDHRIVDGKEAVTFLVRVKELLEDPARALLDL

SEQ ID NO: 114349 - protein, 262 aa, Unknown
  Bacterial polypetide isolated from the Sargasso Sea
ELIVPTLGESITEATVSKWLKNIGDNFEADEPLVEIETDKITVEVPAPHAGSLKEIKVSEGTDVEIGGILGILVESKGKTPSPKKTENKEEKIKEEVKEVKVETKSSPAKSSPSARKIAEENNIKLEDVTSSRSDGRINKEDVVSHLSSSNKTTTNKGEREEVVKMSKIRQTISKRLKEAQNTAAILTTFNEIDMSKVMEIRKSKNQEFQSRYEVKLGFMSFFVKAVVKSLQEYPAVNAEIKDENIIYKNHFDIGIAVGTEK

SEQ ID NO: 114350 - protein, 237 aa, Unknown
  Bacterial polypetide isolated from the Sargasso Sea
FQALKDFEKRVPMSRLRSTIAKRLVSVKQNTAMLTTFNEVDMHPIKELRSKYGAEFEEEHEVKLGFMGFFVIAAVQALKKYPVVNASIDGDDIVYHGFQDIGVAVSTDRGLVVPIIKDADTKSLPEIEKSILTYSEKARMGKLSIEEMQGGTFTISNGGVFGSLLSTPILNAPQTAILGMHAIQDRPVAINGEIAIRPMMYLAMSYDHRLLDGKEAVTFLVSIKEQLESPERLLLNL

SEQ ID NO: 114351 - protein, 46 aa, Unknown
  Bacterial polypetide isolated from the Sargasso Sea
GDIVIRPMMYLALSYDHRIVDGKGAVTFLVRVKESLEDPNRILLGV

SEQ ID NO: 114352 - protein, 276 aa, Unknown
  Bacterial polypetide isolated from the Sargasso Sea
LVELETDKVNVEVPSPTSGVLGSIAVKEGETVNVGSLLGTVDSSISNKENKVKELKNYDPPKKKEVTEPRVFEEEKIVKTRKTKSKKFDEPVLKLEEEEPLILEEVHQEKKPSTQRKQISPAARKMANEAKVDISKIEGSGKNGVILKEDIMSLMGSKPAPSERKIKYGPEERVRMTRLRLTIAKRLKEAQENAAMLTTFNEVDMSEVISMRSQYKDEFLNKYGVKLGFMSFFVKACVIGLKNYPTINAEIQGEEIVYKNYYNISIAVGTDRGLVV

SEQ ID NO: 114353 - protein, 253 aa, Unknown
  Bacterial polypetide isolated from the Sargasso Sea
NHLDTENQEENIFTSSSISEDRPEKRVPMSRLRSTIAKRLVSVKQETAMLTTFNEVDMMPIKELRSKYGSEFEKEHGVKLGFMGFFVIAAVQALKKFPVVNASIDGDDIVYHGFQDIGVAVSTERGLVVPIIKDADTKSLPEIEKSILEYSDKARNGKLSIDEMQGGTFTISNGGIFGSLLSTPILNAPQTAILGMHAIQDRPVAINGEVVIRPMMYLAMSYDHRLLDGKEAVTFLVSIKEQLESPERLLLNL

SEQ ID NO: 114354 - protein, 276 aa, Unknown
  Bacterial polypetide isolated from the Sargasso Sea
MTEKILVPVLGESITEATISKWLKNKGDNISADEPIVELETDKVNLEVPSPIDGTLTEINFKDGDTVEVGAVLGEISEGAVDQKKEDTKNVEKPEKKTSDNVINFDKEKKQNPKIFENEENENKEEPLVLTEEKPLTPSKEEPLVLTKEIPGKQKIVSEKVLSPAVRKIVEENKIDIQSIKGTGKSGQILKGDLISLMGSTPQPSERKLKYGEEERIKMSRLRQTIAKRLKEAQENAAMLTTFNEVDMTSIIEMRKNNQDDFQKRFGIKLGFMSFF

SEQ ID NO: 114355 - protein, 208 aa, Unknown
  Bacterial polypetide isolated from the Sargasso Sea
KIKYGQEERIKMTRLRQTIAKRLKQAQENAALLTTFNEVDMTNIINMRKHNQEDFQSRYGIKLGFMSFFVKACIVALKNFPAINAEIDGDTIVYKNYYNISFAVGTDKGLVVPVLKNADELSFADIEKNIKEISEKAKDGKLVIEDLQGGTFTISNGGVYGSMLSTPILNLPQSGVLGMHNIVDRPIVVDGEIKIRPVMYLALSYDHR

SEQ ID NO: 114356 - protein, 253 aa, Unknown
  Bacterial polypetide isolated from the Sargasso Sea
LIVPTLGESITEATVSKWLKKVGEPFNVDEPLVEIETDKITVEVPAPQAGSLSEIKAKEGTDIQIGGILGIIGDSNSSKKIQTNEIKNIEPKKEKIVEQNIREDKKINQKNNKLSPSVKKMLEENNLDASSVKTQRDDGRITKEDILNHLEGKNTLKKQKPTDREEIVPMSKIRQTIATRLKESQNTAAILTTFNEVDMSAIIEIRERKNDDFKERYGVKLGFMSFFVKAVVMSLQEFPAVNAEIRENNIVYK

SEQ ID NO: 114357 - protein, 279 aa, Unknown
  Bacterial polypetide isolated from the Sargasso Sea
MSTELIVPTLGESITEATVSKWLKNIGDNFEADEPLVEIETDKITVEVPAPHAGSLKEIKVSEGTDVEIGGILGILDESKGKKPTTKKNETKEKKVKEEVKEVKVETKSSPAKSSPSARKIAEENNIKLEDVTSSRSDGRINKEDVVSHLSSSNKTSTNKGEREEVIKMSKIRQTISKRLKEAQNTAAILTTFNEIDMSKVMEIRKSKNQEFQSRYEVKLGFMSFFVKAVVKSLQEYPAVNAEIKDENIIYKNHFDIGIAVGTEKGLVVPILKDANQFE

SEQ ID NO: 114358 - protein, 305 aa, Unknown
  Bacterial polypetide isolated from the Sargasso Sea
MNEKILVPVLGESITEATVAKWLKNVGDTVEADEAVVELETDKVNLEVPSPISGTVGDIKFKDGDVVKVGTILGSIQGNGKNTQTEIKKIEPDIIINDSVNLEKEKKDEEPLVPASDEEPLVLSTDDQPLVLTEEIEDKKDTKKPVKSSTLSPSVRKIVAEKNIDVKSVEGTGKDGRISKGDLLNLMSATPKPNERKIKFGEEERIKMSRLRQTIAKRLKQAQQNAAILTTFNEVDMTSINEMRKENQEDFKKRYGTKLGFMSFFVKACIVALRSFPAVNAEISGDEIVYKNYYNISFAVGTDKG

SEQ ID NO: 114359 - protein, 127 aa, Unknown
  Bacterial polypetide isolated from the Sargasso Sea
MVVPVLENPDEMSFADIEKNIVSLGEKARNGNITIEDLQGGTFTITNGGIYGSMLSTPILNPPQSGVLGMHNIIERPVAINGSVVIRPMMYLALSYDHRIIDGKEAVSFLKNVKDLLEEPERLFLNV

SEQ ID NO: 114360 - protein, 218 aa, Unknown
  Bacterial polypetide isolated from the Sargasso Sea
IAKNLKNAQNTAAMLTTFNEVDMTNVINLRKKYKETFLNKYNVKLGFMSFFTKACIVALKEIPEVNSEIQDNNIVYKNRYDISIAVGTDKGLYVPVLKNADKLTFAGIEKKILEYGKLAKENKITAEHMKGGTFTISNGGVYGSMLSTPILNPPQSGILGLHNIVKRPIVISEEIVIRPVMFIALTYDHRIIDGRQAVTFLVRVKEIIENPEELLFSI

SEQ ID NO: 114361 - protein, 305 aa, Unknown
  Bacterial polypetide isolated from the Sargasso Sea
MSEKITVPTLGESVTEATVSKWLKSQGDKVIADEPIVELETDKVNVEVPAPSNGVLGSIAVKEGETVNVGSLLGTISESLNKETSKSQDIKKYNPPKKEVNKEFKLFDEDQTKSTTKIKKQVIEEPVLKLEEESIDIDEEPLILDEVHKEKKLEKKINQVKSETKISPAARKMANEAKVNINEIQGTGKNGIILKEDIMSLMGSKPSPSERKIKHGPEERVRMTRLRQTIAKRLKEAQENAAMLTTFNEVDMSEIISMRNQYKDEFQKKYGVKLGFMSFFVKAMCNWFKKLSCNKCRNSRRRNSI

SEQ ID NO: 114362 - protein, 276 aa, Unknown
  Bacterial polypetide isolated from the Sargasso Sea
MSEKILVPVLGESLNEATVSKWLKSKGDIVNADEAVVELETDKVNLEVPASVSGVLSEINSNEGDIVQVGTVLGVISDLTNKIEKIKPKNIEAQEDNKIFSTDGIVKDQPDNNKEKNIQSEPTMLNDEEKPLILNEEEAPLILSEEVEIDEKKIDAPAKEINLSPAVRKIVTEKNIDINTIQGSGKDGRILKGDIISLMGENPQPNQRKIKFGQEERIKMTRLRQTIAKRLKEAQENAAMLTTFNEVDMSGIISMRKENQKDFQNRYNIKLGFMSF

SEQ ID NO: 114363 - protein, 252 aa, Unknown
  Bacterial polypetide isolated from the Sargasso Sea
EEVPPVINNIQNQTLSPAVRKIVAEKNIDLATVQGSGKDGRILKGDLISMMGINPKPSERKIQYGQEERIKMTRLRQTIAKRLKQAQENAALLTTFNEVDMTNIIEMRKENQEDFQSRYNIKLGFMSFFVKACVVALKNFPAVNAEIDGDEIVYKNYYNISFAVGTDKGLVVPVLRNADELSFADIEKNIKEISEKAKDGKLVIEDLQGGTFTISNGGVYGSMLSTPILNLPQSGVLGMHNIVDRPVVSMRN

SEQ ID NO: 114364 - protein, 283 aa, Unknown
  Bacterial polypetide isolated from the Sargasso Sea
APASEGKEVEIKVPVLPESVADATIATWHVQPGDAVTRDQNLVDIETDKVVLEVVAQEDGIMGDIINAEGDTVLGEQVIGSVKAGGAPAAPAAKEEAAPAADSTDSSDVLTPSVRRLIAEKGLDASKIKGTGKNGRVTKEDVDTFLKAPAPSAKKAEAAAPVAPMGDRTQKRVPMTRLRKTIANRLLEAKNSTAMLTTFNEVNMKPIMDLRKQYQEVFEKRHGIRLGFMSFYVKAVTEALKRFPDVNASIDGDDIVYHNYFDISIAVSTPRGLVTPVLKDCDK

SEQ ID NO: 114365 - protein, 275 aa, Unknown
  Bacterial polypetide isolated from the Sargasso Sea
IVTENKIDISSVKGSGKDGRVLKGDLINLMAVNPPPSERKIKYGQEERIKMTRLRQTIAKRLKQAQDNAALLTTFNEVDMSNVMAMRKENQDDFQNRYGVKLGFMSFFVKASIVALKNFPAINAEIEGDTIVYKNYYNISFAVGTEKGLVVPVLKNADELSFADIEKNIREISEKAKNGKLTIEDLQGGTFTISNGGVYGSMLSTPILNLPQSGVLGMHNIVDRPIVVDGEIKIRPIMYLALSYDHRIVDGKESVSFLKMIKENLEEPRRLFLDI

SEQ ID NO: 114366 - protein, 185 aa, Unknown
  Bacterial polypetide isolated from the Sargasso Sea
KESFKEKYEVNLGFMSFFTKACCIALSDWPAVNALLDENEIVYNDYCDISIAVSTPKGLVVPVIRNAESLSFDQIEKEIIRLATKARDGKLSIEEMQGGTFTITNGGIFGSMMSTPIINSPQSAILGMHNIVKRPMVVNDEIKIKPMMYLALSYDHRIIDGRESVSFLVRVKELLEDPSRLMLKI

SEQ ID NO: 114367 - protein, 277 aa, Unknown
  Bacterial polypetide isolated from the Sargasso Sea
KIEKDNEVNTDDKDEDIEVFDEIVKEEKPLVLTQEVKDKPAEIKTKIDQTLSPAVRKIVTENKIDISSVKGSGKDGRVLKGDLINLMGVSPPPSERKIKYGQEERIKMTRLRQTIAKRLKQAQDNAALLTTFNEVDMSSVIEMRKENQDDFQNRYGVKLGFMSFFVKASIVALKNFPAINAEIENDTIVYKNYYNISFAVGTEKGLVVPVLKNADELSFADIEKNIKDISDKAKNGKLTIEDLQGGTFTISNGGVYGSMLSTPILNLPQSGVLGMHN

SEQ ID NO: 114368 - protein, 273 aa, Unknown
  Bacterial polypetide isolated from the Sargasso Sea
MIVNPSAKKMLAENDMQSEEIIGTGKGGRITKEDVQLAVDNRNSSTDQQLEPQNSSNELSSLTNLDDHRLERRVPMTRLRARVAERLLNATQTTAMLTTFNEVNMQPIIDIRTQYKEQFEKSHNGTRLGFMSFFVRAASEALKRFPAVNASIDGTDIVYHGYYDIGVAVSSDRGLVVPVLRDADAMSMATIESKIREFGAKAADGKLSIEDMTGGTFTITNGGIFGSLMSTPILNPPQTGILGMHKIQDRPMAVEGNIKILPMMNLALSYDHR

SEQ ID NO: 114369 - protein, 237 aa, Unknown
  Bacterial polypetide isolated from the Sargasso Sea
EKFNIGEEERIKMTRLRQTIAKRLKQAQENAALLTTFNEVDMSSVMEMRKENQEDFQSRYGIKLGFMSFFVKACVVALKNFPAVNAEIEEDEIVYKNYYNISFAVGTDKGLVVPVLRNADELSFADIEKNIKEISEKARDGKLTIEDLQGGTFTISNGGVYGSMLSTPILNLPQSGVLGMHNIVERPVVVDGEIKIRPIMYLALSYDHRIIDGKESVSFLKMIKENLEDPRRLFLDI

SEQ ID NO: 114370 - protein, 295 aa, Unknown
  Bacterial polypetide isolated from the Sargasso Sea
GSADQKQEDHKNIEKPKKKTSGNVINFDKEKKQSPKIFENEEKEEPLVLTEEKPLTSNKEEPLVLTKEISNKQKIISEKVLSPAVRKIVEENKIDIQSIKGTGKSGQILKGDLISLMGSAPQPSERKLKYGEEERIQMSRLRQTIAKRLKEAQENAAMLTTFNEVDMTSIIEMRKNNQEDFQKRFGIKLGFMSFFVKACVLGLKSFPAINAEIEGQEIIYKNYYNISFAVGTEKGLVVPVIRNADELSFAEIEKNIKIISEKAREGKLTIDDLQGGTFTISNGGVYGSMLSTPIL

SEQ ID NO: 114371 - protein, 175 aa, Unknown
  Bacterial polypetide isolated from the Sargasso Sea
KLGFMSFFVKSCCHALLEIPEVNAEIDESEIIYKKYVNMSVAVGTPTGLVAPVIRNAGSMSFAQIERELAKLSAKARDGKLSIEEMKGGTFTISNGGVYGSLMSSPILNPPQSGILGMHKIQDRPVVLNGEIVIRPMMYLALSYDHRIVDGKGAVTFLVRVKETLEDPHRLLMDL

SEQ ID NO: 114372 - protein, 304 aa, Unknown
  Bacterial polypetide isolated from the Sargasso Sea
NFKDGDTVEVGAVLGEISEGPGDQKQEDNKNFEKPKNKTSDNVINFEKEKKQNPKIFENEENEEPLVLTEEKPLTSNKDEPLVLTKEIPGKQKIISEKVLSPAVRKIVEENKIDIQSIKGTGKSGQILKGDLISLMGSSPQPSERKLKYGEEERIKMSRLRQTIAKRLKEAQENAAMLTTFNEVDMTNIIEMRKNNQEDFQKRFGIKLGFMSFFVKACVLGLKSFPAINAEIEGQEIIYKNYYNISFAVGTEKGLVVPVIRNADELSFAEIEKNIKAISEKAREGKLTIDDLQGGTFTISNGGV

SEQ ID NO: 114373 - protein, 246 aa, Unknown
  Bacterial polypetide isolated from the Sargasso Sea
MGVKPSPSERKLKFGEEEKIKMSRLRMTIAKRLKQAQENAAMLTTFNEVDMTNIMNMRKENQDDFQQKFKIKLGIMSFFVKACVVGLKLYPAINAEIESENIIYKNYYNISFAVGTEKGLVVPVLKNADEMSFADIEMNIKTLSDKARDGKITIEDLQGGTFTISNGGVYGSMLSTPILNLPQSGVLGMHNIVSRPYVINNEIKIRPIMYLALSYDHRIIDGKEAVSFLKTVKENLEDPRRLFLNL

SEQ ID NO: 114374 - protein, 155 aa, Unknown
  Bacterial polypetide isolated from the Sargasso Sea
AVNAEIDGTDIIYKNYYNIGVAVGTPQGLVVPVVRDAGGLGLAEIETRIADFGDRARNGKITPDDMAGGSFTISNGGVYGSLMSTPILNPPQSGILGMHKIEKRPVVIDDAIVIRPMMYLALSYDHRIIDGREAVSFLARIKELVEDPRRIVLGV

SEQ ID NO: 114375 - protein, 225 aa, Unknown
  Bacterial polypetide isolated from the Sargasso Sea
MTRLRQTIAKRLKQAQDNAALLTTFNEVDMSNVMAMRKENQDDFQNRYGVKLGFMSFFVKASIVALKNFPAINAEIEGDTIVYKNYYNISFAVGTEKGLVVPVLKNADELSFADIEKNIKDISEKAKNGKLTIEDLQGGTFTISNGGVYGSMLSTPILNLPQSGVLGMHNIVDRPIVVDREIKIRPIMYLALSYDHRIVDGKESVSFLKMIKENLEEPRRLFLDI

SEQ ID NO: 114376 - protein, 310 aa, Unknown
  Bacterial polypetide isolated from the Sargasso Sea
FVEPSKPVTDNQFVDKDLDRNSNTEKIISDKANNSTPSPAASKILSEKGINPLDLIGSGRGGRIIKEDALKALPKIDESLISKGRKTERKKLSMLRRKLSQRLVAVKNQTAMLTTFNEVNMTPIFQIKKEYKEIFKEKHGVSLGFMSFFTKAVVNALREFPDVHSMIDEDHKLSFDFYDISIAVSGPKGLLVPVVKNADKLAFSGIEKEIKRLALKARDGEMSIEDMEGGTFTISNGGVFGSMLSTPILNPPQSSILGMHNIIERPIAVNGKVEIHPMMYLALSYDHRIIDGKESVGFLLKIKEAFRKSN

SEQ ID NO: 114377 - protein, 305 aa, Unknown
  Bacterial polypetide isolated from the Sargasso Sea
TEEKVTKTPEKVKNLTENSTLKVEEKKNVNKNNEIKIFDEEKKAEKPLVLTNAINEEKEESQTLSPAVRKIVSEKKIDISSIKGSGKDGRILKGDLINLMGVSPQPNERKIKFGQEERIKMTRLRQTIAKRLKEAQETAAMLTTFNEVDMTNIINIRKDNQEDFQSRYNIKLGFMSFFVKACVVGLKLFPAINAEIEGDDIVYKNYYNISFAVGTDKGLVVPVLRNADEMSFADIEKEIKRLSDKAKNGTLAINDLQGGTFTISNGGVYGSMLSTPILNPPQSGVLGMHNIVERPVVQNNEVSIK

SEQ ID NO: 114378 - protein, 280 aa, Unknown
  Bacterial polypetide isolated from the Sargasso Sea
MELLKEEPLLLTEEVETEETPQQPIILSPAVRKIVTEKNINLDNVKGTGKAGRILKGDLISMMGTNPQPNQRRIKYGEEERIKMTRLRQTIAKRLKQAQENAAMLTTFNEVDMSGIMTMRKDNQEDFKSRYGIKLGLMSFFVKACVVGLKLFPAINAEIEDQDIIYKNYYNISFAVGTEKGLVVPVLRNADEMSFADIEKEIKKLSEKANEGNLTIEDLQGGTFTISNGGVYGSMLSTPILNPPQSGVLGMHNIVERPVNDNGEIKIKPIMYLALSYDHR

SEQ ID NO: 114379 - protein, 264 aa, Unknown
  Bacterial polypetide isolated from the Sargasso Sea
MKNAGDTVEADEPIVELETDKVNLEVPSPISGVLTEINSQDGSVVEVGALLGSVSAEGGTVVKSAPKISEEIKKEEIFPAESNVIKLDANKKEPKVFEEKPKEKPLVLTEEVKPDVAPQRSVNTTLSPAVRKIVIENNIDINSIQGSGKDGRVLKGDLISLMGANPKPSERKIQYGEEERIKMTRLRQTIAKRLKQAQENAALLTTFNEVDMSSVMEMRKENQEDFQFRYGIKLGFMSFFVKACVVALKNFPAVNAEIDGDEII

SEQ ID NO: 114380 - protein, 257 aa, Unknown
  Bacterial polypetide isolated from the Sargasso Sea
EKGINPLDLIGSGRDGRITKEDALKALPKIDESLIAKGRKTERKKLSMLRRKLSQRLVAVKNQTAMLTTFNEVNMTPIFQIRKEYKEIFKEKHGVSLGFMSFFTKAVVNALREFPDVHSMIDEDHKLCFDFYDISIAVSGPKGLLVPVVKNADKLTFSGIEKEIKRLAIKARDGEMSIEDMEGGTFTISNGGVFGSMLSTPILNPPQSSILGMHNIIERPIAVNGKVEIHPMMYLALSYDHRIIDGKESVGFLLKIK

SEQ ID NO: 114381 - protein, 195 aa, Unknown
  Bacterial polypetide isolated from the Sargasso Sea
SQIMEIRNSKNKEFQERYDVKLGFMSFFVKAVTESLNEFPAVNAEIKDENIIYKNHFDIGIAVGTEKGLVVPVLKDADKMNFGEIEKSIIDLSTKAKDGTLSMDDLSGGTFTISNGGVYGSMLSTPIINRPQSGILGMHNIQKRAVVVDDEIVIRPMMYVALSYDHRIIDGKESVGFLISVKKLLENPSQLVLGI

SEQ ID NO: 114382 - protein, 166 aa, Unknown
  Bacterial polypetide isolated from the Sargasso Sea
TKACTEALELFPAVNARIEGNEIVFHDYVDMGIAVSAPKGLMVPVVRNAESLSLAQIEVEIARLAKRARENILSIDEMEGGTFSITNGGVFGSMLSTPIINPPQSAILGMHNIVERPMAVDGKIEIRPVMFVALSYDHRVIDGQQSVSFLVKVKENLENPARMLLS

SEQ ID NO: 114383 - protein, 250 aa, Unknown
  Bacterial polypetide isolated from the Sargasso Sea
DVLEHLDNSSKNNNKQSVGKEEVVPLSKIRRTIAIRLKEAQNTAAILTTFNEVDMSEIINVREAKKEDFIKRYDVKLGFMSFFVKASVMALQEFSAVNAEIRDDNIIYKNHYDIGIAVGTEKGLVVPVLKNADKMTFGDIEKQINELSSRAKKGTLTMDDLSGGTFTISNGGVYGSMLSTPIINRPQSGILGMHNILKRAVVVEDEIVIRPMMYLAFSYDHRIIDGKESVGFLVKIKEVLENPSSIILGD

SEQ ID NO: 114384 - protein, 262 aa, Unknown
  Bacterial polypetide isolated from the Sargasso Sea
MSTELIVPTLGESITEATVSKWLKNIGDNFEADEPLVEIETDKITVEVPAPHAGSLKEIKVSEGTDVEIGGILGILVESKGKTSSLKKTETKEEKVKEEVKEVKEVKVETKSSPAKSSPSARKIAEENNIKLEDVTSSRSDGRINKEDVVSHLSSSNKTTTNKGEREEVVKMSKIRQTISKRLKEAQNTAAILTTFNEIDMSKVMEIRKSKNQEFQSRYEVKLGFMSFFVKAVVKSLQEYPAVNAEIKDENIIYKNHFDIGI

SEQ ID NO: 114385 - protein, 233 aa, Unknown
  Bacterial polypetide isolated from the Sargasso Sea
MEEENSSKELKEEPLVLTNEIENSHKDENFTKESQTLSPAVRKMVDENNIDVKSVKGSGKDGRILKGDLISLMGVNPPPSERKIKYGQEERIKMTRLRQTIAKRLKQAQENAALLTTFNEVDMTNIINMRKENQEDFKSRYGTKLGFMSFFVKACIVALKNFPAVNAEIDGDTIVYKNYYNISFAVGTDKGLVVPVLKNADELSFADIEKNIKEISEKAKDGKLVIEDLQGGT

SEQ ID NO: 114386 - protein, 205 aa, Unknown
  Bacterial polypetide isolated from the Sargasso Sea
MLTTFNEVDMQQIFDLRGEYKDSFEKKHGVRLGFMGFFVKACSQALGEFSAVNSQIEGDEIVTYDYVDMGIAVSAPKGLMVPVIRNAETRSIAELETEIRRLAARARDNQLSLEEMEGGTFSITNGGVFGSMLSTPILNPPQAAILGMHNIVERPMAVNGEVKIRPVMYLALSYDHRLIDGQQSVSFLVRVKELLETPARMMLGV

SEQ ID NO: 114387 - protein, 88 aa, Unknown
  Bacterial polypetide isolated from the Sargasso Sea
PSPFQRKIQHGPEERIKMTRLRLTIAKRLKEAQENAAMLTTFNEVDMSEVIAMRNQYKEEFQNKYSVKLGFMSFFVKACVIGLKNFPS

SEQ ID NO: 114388 - protein, 271 aa, Unknown
  Bacterial polypetide isolated from the Sargasso Sea
KKIISEKNIDPENINASGKNNTITKADVINHLETKGIDKENHNIFSESITSGEDRPEKRVPMSRLRSTIAKRLVSVKQETAMLTTFNEVDMLPIKELRAKYGAEFQEEHDVKLGFMGFFVIAAVQALKKFPVVNASIDGNDVVYHGFQDIGVAVSTERGLVVPVIKDADTKSLPEIEKAILSYSDKARNGKLSIDEMQGGTFTISNGGIFGSLLSTPILNAPQTAILGMHAIQDRPVAINGEVVIRPMMYLAMSYDHRLLDGKEAVTFLVS

SEQ ID NO: 114389 - protein, 251 aa, Unknown
  Bacterial polypetide isolated from the Sargasso Sea
MQTEIIVPTLGESVTEATVAKWFKAKGDIVAQDEPIVELETDKVTLEVNASAAGTLSEIAAYEGDNVEVGALLGMIGDGAAAPANKEEPAPKKENAAPKKEKKAKEAPAGDDDSGKLSPAVRKLLGENELDPSQITGTGKDGRLTKGDVLLFMKENDSAGAVKADSAPTAAAPAPSEPRPEDPREERVKMTRLRQRISERLKEAQNTAAMLTTFNEIDMTNVMATRKKFQDDFEKRHGCRLGFMSFFVKAC

SEQ ID NO: 114390 - protein, 200 aa, Unknown
  Bacterial polypetide isolated from the Sargasso Sea
NEVDMSSVMEMRKENQEDFQSRYGIKLGFMSFFVKACVVALKNFPAVNAEIDGDEIIYKNYYNISFAVGTDKGLVVPVLRNADELSFADIEKNIKEISEKARDGKLTIEDLQGGTFTISNGGVYGSMLSTPILNLPQSGVLGMHNIVERPVVIDGEIKIRPIMYLALSYDHRIIDGKESVSFLKMIKENLEDPRRLFLDI

SEQ ID NO: 114391 - protein, 251 aa, Unknown
  Bacterial polypetide isolated from the Sargasso Sea
PKKEKEKIQPKVFEEEKITKPRKIKAKKTEEPILKLKEEEPLILEQVHEEKEAQKIEKQVSPAARKLANENKVNLSNVEGTGKNGVILKEDIMSLMGSKPAPSERKIKYGPEERVKMTRLRLTIAKRLKEAQENAAMLTTFNEIDMSEVMSMRSQYKEEFKSKYQVKLGFMSFFVKACVIGLKNYPSINAEIQGEEIVFKNYYNISIAVGTDRGLVVPVLRETDEMSFADIEKNISDLGQKARDGRITIED

SEQ ID NO: 114392 - protein, 281 aa, Unknown
  Bacterial polypetide isolated from the Sargasso Sea
MILTNEVKNGKSNLHLSPAVRKIIKEKKINPEEIKGSGKNGIILKSDLLNLMNKIPKPNQRKIKYGPEERIQMSRLRQTIAKRLKSAQENAAMLTTFNEVDMTNVMNLRNEKQEEFKNKFGIKLGFMSFFIKASIKSLKLYPAINAEIEGSDIIYKNYFNISFAVGTEKGLVVPVIRNADELSFAQIEMEIKNLSDKANNTTLTIEDLQGGTFTISNGGIYGSMLSTPILNPPQSGVLGMHNIVERAVVINGEIKVRPVMYLALSYDHRIIDGKEAVSFLK

SEQ ID NO: 114393 - protein, 283 aa, Unknown
  Bacterial polypetide isolated from the Sargasso Sea
LKNPGDTVEADEPIVELETDKVNLEVPSPISGVLTEINSKDGSVVEVGALLGSVSKQGIAVKNSPKKEEENKKDEVVPKENNVIKLDANKKDPKIFEEKEVKKSRKKPLVLTEEVQPDVSTKRENNQTLSPAVRKIVVENNIDINSIQGSGKDGRVLKGDLISMMGANPKPSERKIQYGQEERIKMTRLRQTIAKRLKQAQENAALLTTFNEVDMSSVMEMRKENQEDFQSRYGIKLGFMSFFVKACVVSLKNFPAVNAEIDGDEVIYKNYYNISFAVGTDKG

SEQ ID NO: 114394 - protein, 306 aa, Unknown
  Bacterial polypetide isolated from the Sargasso Sea
GESVTEATVAKWLKNKGDKVSSDEPIVELETDKVNVEVPSPSNGILENISAKEGETVNVGALLGLISQSKSVTASPKSKTNEKKYSPPKLEKIEPETVKKSEQVKMNKKKSSSPLILEEDSGPKVFDESPLVLEEEPLVLDTAHTENKEKTNDDLRITPSARKMISEKKIDIQSIKGSGKNGLVLKEDVMSLMGVKPAPSERKIAHGPEERIKMTRLRLTIAKRLKEAQENAAMLTTFNEVNMHEVIKMRQDYKEDFQKKYSVKLGFMSFFVKACIIGLKNYPAINAEIQGDEIVYKNYYNISIAV

SEQ ID NO: 114395 - protein, 304 aa, Unknown
  Bacterial polypetide isolated from the Sargasso Sea
IVELETDKVNVEVPAPSNGVLESISVREGETVNVGSLLGMINGSGKKISEDIKELKDYSPPKKKTSILKKPKEEAEPLKLEQEELEPLKLEQEELEPLKLEQEEPELSKIRQEETLVLDNFYEKQEVKEKQKVKSSKPSISPAARKMATEAKVDLDKIQGSGKHGVILKEDIMSLMGSKPSPSERKIKHGPEERIKMTRLRLTIAKRLKEAQENAAMLTTFNEVDMSEVISMRNQYKEEFQKKYSVKLGFMSFFVKACVIGLKNFPVVNAEIQGDEIVYKNYYNISIAVGTDRGLVVPVLRESR

SEQ ID NO: 114396 - protein, 286 aa, Unknown
  Bacterial polypetide isolated from the Sargasso Sea
MSEKILVPTLGESVTEATVSKWLKNQGEEVSADEPIVELETDKVNVEVPSPSNGVLEKISVKEGETVNVGALLGMINGSAIKIEKDIQEVKKYSPPPKKNKVEKPKTSKQIIQKKEEPLKLEEEPLKLEETLNLEEQEPLVLNETVEKNEIKEELEIKNLSPRISPAARKMATETKVNLQNIQGSGKDGIILKEDILSLMNYKPAPSERKIKHGPEERIKMTRLRATIAKRLKEAQENAAMLTTFNEVDMSEVISMRTQYKEEFQKNYGVKLGFMSFFVKAMCDRS

SEQ ID NO: 114397 - protein, 122 aa, Unknown
  Bacterial polypetide isolated from the Sargasso Sea
IRDAGNLRISDVEKSILDYSDKARHGKLSISEMQGGTFTISNGGVFGSLLSTPILNAPQTAILGMHAIQDRPVAIDGEIVIRPMMYLALSYDHRLLDGKEAVSFLIAIKDQLESPEKLLLNL

SEQ ID NO: 114398 - protein, 218 aa, Unknown
  Bacterial polypetide isolated from the Sargasso Sea
YCKRLKQAQENAALLTTFNEVDMSSVMEMRKENQEDFQTRYGIKLGFMSFFVKACVVALKNFPAVNAEIEGDEIVYKNYYNISFAVGTDKGLVVPVLRNADELSFADIEKNIKEISEKARDGKLTIEDLQGGTFTISNGGVYGSMLSTPILNLPQSGVLGMHNIVERPVVVDGEIKIRPIMYLALSYDHRIIDGKESVSFLKMIKENLEDPRRLFLDI

SEQ ID NO: 114399 - protein, 188 aa, Unknown
  Bacterial polypetide isolated from the Sargasso Sea
KENQSDFQDRFGIKLGFMSFFVKACIESLKLFPAINAEIEGENIIYKNYYNISFAVGTEKGLVVPVLKNADEMSFADIEKKIKELSDKARDGKITIDDLQGGTFTISNGGVYGSMLSTPILNLPQSGVLGMHNIVERPHVVNGEIKIRPIMYIALSYDHRIIDGKEAVSFLKNTKDNLEDPRRLFLNL

SEQ ID NO: 114400 - protein, 278 aa, Unknown
  Bacterial polypetide isolated from the Sargasso Sea
GILGILVESKGKTPSLKKTETKEEKVKEEVKEVKEVKEVKVETKSSPAKSSPSARKIAEENNIKLEDVISSRSDGRINKEDVVSHLSSSNKTTTNKGEREEVVKMSKIRQTISKRLKDAQNTAAILTTFNEIDMSKVMEIRKSKNQEFQSRYEVKLGFMSFFVKAVVKSLQEYPAVNAEIKDENIIYKNHFDIGIAVGTEKGLVVPILKDADQLSFGEIETKIIDLSTKAKDGTLTMDDLTGGTFTISNGGVYGSMLSTPIINRPQSGILGMHNIQKR

SEQ ID NO: 114401 - protein, 209 aa, Unknown
  Bacterial polypetide isolated from the Sargasso Sea
MILDTFHKDEKIEKSKTIEKQTTKNQDLSFSPAARKMAAEGNVDLNKIKGSGKHGVILKEDVMSLMGFKPSPSERKLKHGPEERIKMTRLRLTIAKRLKEAQENAAMLTTFNEVDMSEVIAMRNQYKEEFQNKYSIKLGFMSFFVKACVIGLKNFPAINAEIQGEEIVYKNYYNISIAVGTDRGLVVPVLKETDEMSFADIEKNISELG

SEQ ID NO: 114402 - protein, 190 aa, Unknown
  Bacterial polypetide isolated from the Sargasso Sea
MRGQYKDEFQTNYGVKLGFMSFFVKACVIGLKNYPAINAEIQGEEIVYKNYYNISIAVGTDRGLVVPVLRETDEMSFADIEKNIGELGQKARDGKITIEDLQGGTFTITNGGIYGSMLSTPILNPPQSAVLGMHNIVQRPMVLEGNIESRPVMYLALSYDHRIIDGKEAVSFLKIVKESLEQPKRLFLNI

SEQ ID NO: 114403 - protein, 285 aa, Unknown
  Bacterial polypetide isolated from the Sargasso Sea
MIEKILVPALGESITEATVSKWLKNEGDSVEADEPIVELETDKVNLEVPSPVSGQLSKIDSKDGSVVKVGETLGSVSENVNEIKRPDEIKKIQPSNLKKNEQPSEKDNVIELDVKKEQKELDIFESKNSMENIEEEPLVLTEEVKTNKKEVELPKDNLTLSPAVRKMVNEKNIDIRSVKGSGKDGRILKGDLIDLMGINPQPSERKIKYGQEERIKMTRLRQTIAKRLKQAQENAALLTTFNEVDMTNIMEMRKENQEDFQNRYGIKLGFMSFFVKACVVALKNY

SEQ ID NO: 114404 - protein, 284 aa, Unknown
  Bacterial polypetide isolated from the Sargasso Sea
SLKRKLSDNIINFDKEKKQNLKIFENEEKEEKTEPLVLTEEKPLTSNKEEPLILTKEIPSKQKIISEKVLSPAVRKIVDENKIDIQSIKGTGKSGQILKGDLISLMGSAPKPSERKLKYGEEERIKMSRLRQTIAKRLKEAQENAAMLTTFNEVDMTSIIEMRKNNQEDFQKRFGIKLGFMSFFVKACVLGLKSFPAINAEIEGQEIIYKNYYNISFAVGTEKGLVVPVIRNADELSFAEIEKNIKSISEKARDGKLTIDDLQGGTFTISNGGVYGSMLSTPIL

SEQ ID NO: 114405 - protein, 250 aa, Unknown
  Bacterial polypetide isolated from the Sargasso Sea
MKKRNPKFFDEKEEEEKPLVLNQVAQEEKSEVQSKTEETLSPAVRKIVTENKIDIKSVKGSGKEGRILKGDLINLMGVNPPPSERKIKYGHEERIKMTRLRQTIAKRLKQAQENAALLTTFNEVDMKNVIEMRKENQEDFQNRYSIKLGFMSFFVKACVVALKNFPALNAEIEGNDIIYKNYYNISFAVSTDRGLVVPVLKNADELSFADIEKNIKEISEKAREGKLTIEDLQGGTFTISNGGVYGSMLS

SEQ ID NO: 114406 - protein, 148 aa, Unknown
  Bacterial polypetide isolated from the Sargasso Sea
SFFVKASVVALKSFPAINAEIDGQDIVYKNYYNISFAVGTEKGLVVPVLRNVDELSFAEIEKGIKDLSDKANSSKIGINDLQGGTFTISNGGVYGSMLSTPIINPPQSAILGMHNIVERPIVVDGDVKVRPIMYLALSYDHRIIDGKD

SEQ ID NO: 114407 - protein, 275 aa, Unknown
  Bacterial polypetide isolated from the Sargasso Sea
GESITEATVAKWLKNAGDSVDADEPIVELETDKVNLEVPSPITGVLTEINSKDGSVVEVGALLGSVSENGSGVKPSTTKNEEVKKQEIESNENNVIKLDPIKKEPKVFEETLKVDEQSEKPLVLSDEIVDQEPTINNIQSQTLSPAVRKIVTENKIDLSTVQGSGKDGRVLKGDLISMMGANPKPSERKIQYGQEERIKMTRLRQTIAKRLKQAQENAALLTTFNEVDMTNIMQMRKENQEDFQSRYNIKLGFMSFFVKAMCSCTKEFSSRNAEI

SEQ ID NO: 114408 - protein, 300 aa, Unknown
  Bacterial polypetide isolated from the Sargasso Sea
PEEEEKISRTDGTVKDQLDNNKETNIQSEPTMLNDEVKPLILNEEEEPLILSEEVEIDEKKIDAPEKEINLSPAVRKIVTEKNIDINTIQGSGKDGRILKGDLISLMGENPQPNQRKIKFGQEERIKMTRLRQTIAKRLKEAQENAAMLTTFNEVDMSGIISMRKENQEDFQNRYNIKLGFMSFFVKACVVGLKLFPAINAEIEGEDIIYKNYYNISFAVGTEKGLVVPVLKNADEMSFADIENEIKKLSEKAKNGSLTIEDLQGGTFTISNGGVYGSMLSTPILNPPQSGVLGMHNIVE

SEQ ID NO: 114409 - protein, 310 aa, Unknown
  Bacterial polypetide isolated from the Sargasso Sea
VPVLGESITEATVSKWLKNKGDNINADEAIVELETDKVNLEVPSPIDGTLSVINFKDGDTVEVGAVLGEISKGSGDQKQEDNKKIEKPKKKTSSNVINFDKEKKQSPEIFENEENEEPLVLTEEKTLTSNKEDPLVLTKEIPGKQKIVSEKVLSPAVRKIVEENKIDIQSIKGTGKSGQILKGDLISLMGSVPQPSERKLKYGEEERIQMSRLRQTIAKRLKEAQENAAMLTTFNEVDMTSIIEMRKNNQEDFQKRFGIKLGFMSFFVKACVLGLKSFPAINAEIEGQEIIYKNYYNISFAVGTEKGFSS

SEQ ID NO: 114410 - protein, 104 aa, Unknown
  Bacterial polypetide isolated from the Sargasso Sea
TSQLCRELKIDKKEFFGGSMTISSLGGIGGTHFTPIINPPEVAILGVGRTFDRLVKEKNQIVSKKILPISLSYDHRLIDGAEGARFCVYLGKCLGKDFAFKLAV

SEQ ID NO: 114411 - protein, 48 aa, Unknown
  Bacterial polypetide isolated from the Sargasso Sea
INGQVVIRPMMYLALSYDHRLIDGKEAVTFLVTIKNLLEDPARLLLEI

SEQ ID NO: 114412 - protein, 286 aa, Unknown
  Bacterial polypetide isolated from the Sargasso Sea
ELETDKVNLEVPSPIDGIFSEKKANEGESVQVGAVLGTIKSSDAKPEFTAEKKITKNINKVEESNDLEKEKSNLKIFDENKSEKKEPVESKPLTLEDEPLVLTNEIEEKKAEAPKAEEKKSKEPKILSPAVRKMVSEKNINTEDISGSGKDGRIVKGDLMHLMGSTPKPSERKIKYGPEERFKMTRLRQTIAKRLKEAQENAAMLTTFNEVDMTNIISMRKDNQEDFQSRYGVKLGFMSFFVKACILGLKSFPPINAEVEGQEIIYKNYYNISFAVGTERGLVVPV

SEQ ID NO: 114413 - protein, 224 aa, Unknown
  Bacterial polypetide isolated from the Sargasso Sea
TKINPILSPAVRKMVAEKKIDLEQIKPTGKDGRILKGDLISLMGSNPQPNQRKIQFGEEERIKMSRLRQTIAKRLKEAQENAAMLTTFNEVDMSGIMSMRKENQEDFQARYGIKLGFMSFFVKACVVGLKLFPAINAEIEGQEIIYKNYYNISFAVGTEKGLILPVLKNADKMSFADIEKEIKNLSEKAKNNSLVIEDLQGGTFTISNGGVYGSMLSTPILNPP

SEQ ID NO: 114414 - protein, 189 aa, Unknown
  Bacterial polypetide isolated from the Sargasso Sea
EKSYQEDFQKKYSVKLGFMSFFVKASVVALKNFPAVNAEIENDHIIYKNYYNISIAIGTDRGLVVPVLKKTDELSFADIERNIFLLSEKAKKGKITINDLQGGTFTISNGGIYGSMLSTPILNPPQTGILGMHNIVDRPVVKEGKIVVRPIMYLALSYDHRIIDGKEAVSFLKTIKDCLEEPRRLFLDL

SEQ ID NO: 114415 - protein, 87 aa, Unknown
  Bacterial polypetide isolated from the Sargasso Sea
GTFTITNGGIYGSMLSTPIINPPQSAVLGMHNIIERAVVIDGEILVRPIMYLALSYDHRIIDGKEAVSFLVRVKEILEDPRRLFLNL

SEQ ID NO: 114416 - protein, 302 aa, Unknown
  Bacterial polypetide isolated from the Sargasso Sea
MSEKILVPVLGESITEATVAKWLKNIGDPVDADEPIVELETDKVNLEVPSPIAGVLKEIASKDGSVVKVGAFLGSISDNKANVSVKEDKVKEVKNTRNENNVIKLDASKKEPKIFEEKSNREKPLILTDEEEKPLILRDQILEENLTDQKKDNQALSPAVRKIVTENKIDIDSVKGSGKDGRILKGDLISLMGVNPNPSERKVQYGQEERIKMTRLRQTIAKRLKQAQENAALLTTFNEVDMSNIIEMRKENQQDFQSRYGIKLGFMSFFVKACVVALKHYPEVNAEIDGDDIVYKNYYNIS

SEQ ID NO: 114417 - protein, 279 aa, Unknown
  Bacterial polypetide isolated from the Sargasso Sea
EAQYLSWLKKQGDSVIADEAVVELETDKVNLEVPALTHGVIAEINANEGDTVEVGAVLGVISETANKTDNKPSNQVIEDQKNQVEENPKVFETKVEPALKTEEKDNVISLDLEKKQKVLETSYEEQPFVLTDEVLEPNVEETKINPILSPAVRKIIAEKKIDLEQVKPTGKDGRILKGDLISMMGANPQPNQRKIQFGEEERIKMSRLRQTIAKRLKEAQENAAMLTTFNEVDMSGIMSMRKENQDDFQTRYGIKLGFMSFFVKACVVGLKLFPAINAE

SEQ ID NO: 114418 - protein, 282 aa, Unknown
  Bacterial polypetide isolated from the Sargasso Sea
MSPAVRKIVEENDIDVNTVKGSGKSGQILKGDLISLMGSSPKPSQRKLKYGEEERIKMSRLRQTIAKRLKEAQENAAMLTTFNEVDMTNIIEIRKNNQDDFQKRFGIKLGLMSFFVKACVIGLKAFPAINAEIDGDEIIYKNYYNISFAVGTEKGLVVPVLRNTDELSFAEIEKNIKNISEKARGGKLTIEDLQGGTFTISNGGVYGSMLSTPILNPPQSGVLGMHNIVERPIAVNGEVIIRPVMYLALSYDHRIIDGKDSVSFLKLLKENLEDPRKLFLDI

SEQ ID NO: 114419 - protein, 255 aa, Unknown
  Bacterial polypetide isolated from the Sargasso Sea
MSPAVRKIITENKIDINSVKGTGKDGRVLKGDLINLMGSNPPPSERKIKYGQEERIKMTRLRQTIAKRLKQAQENAALLTTFNEVDMTNVMDMRKENQEDFQSRYGVKLGFMSFFVKACVVALKNYPAVNAEIEGDEIIYKNYYNISFAVGTDKGLVVPVIKNADELSFANIEKNIKEISEKAKDGKLTIEDLQGGTFTISNGGVYGSMLSTPILNLPQSGVLGMHNIVDRPMVVDGEIKIRPVMYLALSYDHRI

SEQ ID NO: 114420 - protein, 166 aa, Unknown
  Bacterial polypetide isolated from the Sargasso Sea
MASIKALQEFPAVNAEIDGTDIIYKNYYNIGVAVGTPQGLVVPVVRDAGGLGLAEIETRIADFGDRARNGKITPDDMAGGSFTISNGGVYGSLMSTPILNPPQSGILGMHKIEKRPVVVDDAIVIRPMMYLALSYDHRIIDGREAVSFLARIKELVEDPRRLVLGV

SEQ ID NO: 114421 - protein, 201 aa, Unknown
  Bacterial polypetide isolated from the Sargasso Sea
FYEVDMSGIIDMRKENQSDFQERFGIKLGFMSFFVKACIESLKLFPAINAEIEGENIIYKNYYNISFAVGTEKGLVVPVLKNADEMSFADIEKKIKELSDKARDGKITIDDLQGGTFTISNGGVYGSMLSTPILNLPQSGVLGMHNIVERPHVVNGEIKIRPIMYIALSYDHRIIDGKEAVSFLKNTKDNLEDPRRLFLNL

SEQ ID NO: 114422 - protein, 107 aa, Unknown
  Bacterial polypetide isolated from the Sargasso Sea
ILDYSDKARHGKLSISEMQGGTFTISNGGVFGSLLSTPILNAPQTAILGMHAIQDRPVAIDGEIVIRPMMYLALSYDHRLLDGKEAVSFLIAIKDQLESPEKLLLNL

SEQ ID NO: 114423 - protein, 268 aa, Unknown
  Bacterial polypetide isolated from the Sargasso Sea
MSEKIVVPALGESVTEATVSKWLKSVGEKVDSDEPIVELETDKVNVEVPSPTDGVLENISVKEGDTVEVGALLGSIGAKKAQKVEKEEKKYTPPPKKEEVIPKLFEKSVEQKPKKVEKKLILEEIKEEPPLILSEEVKSDNYVQEKIVSPSARKIANEKNIDLSKIAGTGKNGVILKEDLLNLMGSKPAPNKRKMTHGPEEKIKMTRLRMTIAKRLKEAQNNAAMLTTFNEVDMSKVIQMKNDYKNEFIKKFSIKLGFMSFFVKACVA

SEQ ID NO: 114424 - protein, 323 aa, Unknown
  Bacterial polypetide isolated from the Sargasso Sea
MVKNKGDPVDVDEPIVELETDKVNLEVPSPITGVLTEINSQDGSVVEVGALLGSVSESGSGVKTSPNNIEDIKKEDTKSSENNVIKLDPIKKEPKVFEETFKADMQSEKPLVLTDEVEETATVFDNTQNQSLSPAVRKIVAENKIDLSTIQGSGKDGRVLKGDLISLMGANPKPSERKIQYGQEERIKMTRLRQTIAKRLKQAQENAALLTTFNEVDMTNIMEMRKENQEDFQSRYNIKLGFMSFFVKACVVALKNFPAVNAEIDGDEIVYKNYYNISFAVGTDKGLVVPVLRNADELSFADIEKSIKEISEKAKDGKLVIED

SEQ ID NO: 114425 - protein, 263 aa, Unknown
  Bacterial polypetide isolated from the Sargasso Sea
KGSGKDGRILKGDLISLMGVNPPPSERKIKYGQEERIKMTRLRQTIAKRLKQAQENAALLTTFNEVDMTNIINMRKENQEDFQSRYGIKLGFMSFFVKACIVALKNFPAVNAEIDGDTIVYKNYYNISFAVGTDKGLVVPVLKNADELSFADIEKNIKEISEKAKDGKLVIEDLQGGTFTISNGGVYGSMLSTPILNLPQSGVLGMHNIVDRPIVVDGEIKIRPVMYLALSYDHRIIDGKESVSFLKMIKESLEDPRRLFLDI

SEQ ID NO: 114426 - protein, 93 aa, Unknown
  Bacterial polypetide isolated from the Sargasso Sea
INDLQGGTFTITNGGIYGSMLSTPILNPPQSGVLGMHNIIQRPVAINGEVIIRPMMYLALSYDHRIVDGKEAVSFLKNIKDSLEEPRRLFLNI

SEQ ID NO: 114427 - protein, 200 aa, Unknown
  Bacterial polypetide isolated from the Sargasso Sea
NEVDMKEVIEMKNNYKDEFKEKYSVKLGFMSFFVKACVIGLKNYPAINAEIQGDEIVYKNYYNISIAVGTDRGLVVPVLRNTDEMSFADIEKNISLLGQKARDGKIKIEDLQGGTFTITNGGIYGSMLSTPILNPPQSAVLGMHNIIERPVIIEGSVTIRPIMYLALSYDHRIIDGKEAVSFLKTVKESLEQPKRLFLNL

SEQ ID NO: 114428 - protein, 284 aa, Unknown
  Bacterial polypetide isolated from the Sargasso Sea
PLTGTLLSIKVKEGDTVEVGALLGEIKEGQSISKKITETKVVKETEKIYTPPKLSSKKNIESHDGSEVLNLQEDIKEDKKQETLVLDTPVDEKLDTPVEEKYIPPKTKKNLSPAVRKIVEENKIDISNLEGTGKSGRISKGDLINLMGNTPQPSKRKITHGPEERVKMTRLRSTIAKRLKEAQHNAAMLTTFNEVDMQNILQMREDYQEDFKKKYSVKLGFMSFFVKASVVALKNFPAVNAEIENNYITYKNYYNISIAIGTDRGLVVPVLKKADELSFADIER

SEQ ID NO: 114429 - protein, 291 aa, Unknown
  Bacterial polypetide isolated from the Sargasso Sea
GAAAAPAAAPAAAAAPAQAAAPAAVAGDDAILSPAARKLAEENGIDPNSIAGTGKGGRVTKEDVVAAVEAKKNVPAAATKPAAASAAAAAVVATGDRTEKRVPMTRLRAKIAERLVEAQSTMAMLTTFNEVDMTEVMALRSKYKDLFEKSHNGVRLGFMSFFVKAATEALKRFPAVNASIDGNDIVYHGYADIGVAVSSDRGLVVPVLRNAEQMSLAEIESGIATFGKKAKDGKLSIEEMTGGTFTITNGGTFGSMMSTPIVNPPQAAILGMHNIVQRPMAINGQVVIRPM

SEQ ID NO: 114430 - protein, 302 aa, Unknown
  Bacterial polypetide isolated from the Sargasso Sea
IVELETDKVNVEVPAPSNGVLGNIKVKEGETVNVGSLLGTINDSVSDDSVQTKEVKSYNPPKKQSKTPEDKKNNIKKKKTPKPLIDEPVLKLEDEKIEDKPLILEQVHEEKKISRKPLLTKEEAQVSPAARKMASEAKINLDQVKGTGKNGIILKEDIMALMGSKPAPSERKIKHGPEERVKMTRLRLTIAKRLKEAQENAAMLTTFNEVDMSEVIAMRNQYKDEFQNNYGVKLGFMSFFVKACVIGLKNFPAINSEIQAEEIVYKNYYNISIAVGTDRGLVVPVFRGTDEMSFADIEKNIA

SEQ ID NO: 114431 - protein, 190 aa, Unknown
  Bacterial polypetide isolated from the Sargasso Sea
MITFQNKDSFLKKHNVRLGYMSLFTKACTEALELFPAVNARIEGNEIVFHDYVDMGIAVSAPKGLMVPVVRNAESLSLAQIEIEIVRLAQRARENILSIDEMEGGTFSITNGGVFGSMLSTPIINPPQSAILGMHNIVERPMAVDGKIEIRPVMFVALSYDHRVIDGQQSVSFLVKVKENLENPARMLLS

SEQ ID NO: 114432 - protein, 297 aa, Unknown
  Bacterial polypetide isolated from the Sargasso Sea
KINSKDGENVEVGSILGVVSKNLSQEQKKIKLQDKIPPSTEKIIEEAEDVIEVERTDNKIYDLKKEQKSQTKFTEDQNLEDKPLILTNEIKNGKSNLHLSPAVRKIIKEKNINPEEVKGSGKNGIILKSDLLDLMSKIPEPNRRKIKYGPEERIQMSRLRQTIAKRLKSAQENAAMLTTFNEVDMTNVINLRNEKQDSFKSKFGTKLGFMSFFIKASVKSLKLYPAINAEIEGNDIIYKNYFNISFAVGTEKGLVVPVIKNADELSFSQIEIEVKNLSQKANNATLSIEDLQGGTFT

SEQ ID NO: 114433 - protein, 225 aa, Unknown
  Bacterial polypetide isolated from the Sargasso Sea
MSRLRQTIAKRLKQAQENAALLTTFNEVDMANVIKMRKDYQDDFVKKYGVKLGFMSFFVKASIEALKLFPAVNAEIDGEEIVYKNYYNISFAVATDKGLVVPVLKNADEMSFAQIESEIKTISEKARDGKLSIEDLQGGTFTISNGGVYGSMLSTPILNLPQSGVLGMHNIVDRPVVVDGGIKVRPVMYLALSYDHRIIDGKDSVSFLKLIKEKLESPEKLFLKI

SEQ ID NO: 114434 - protein, 297 aa, Unknown
  Bacterial polypetide isolated from the Sargasso Sea
KWLKNKGDIINADEAIVELETDKVNLEVPSPISGILSAVNFKDGDTVEVGAILGEISEGPVDQKQEDNKNVDKLKNKTSDNIIDFGKEKKQNLKIFENEKKEEPLVLTEEKPLTLNKEEPLVLTKELPKKQKTNSEKVLSPAVRKIVEENKIDIQSIKGSGKSGQILKGDLISLMGSAPQPSERKLKYGEEERIKMSRLRQTIAKRLKEAQENAAMLTTFNEVDMTNIIEMRKNNQEDFQKRFGIKLGFMSFFVKACVLGLKSFPAINAEIEGQEIIYKNYYNISFAVGTEKRFSSP

SEQ ID NO: 114435 - protein, 235 aa, Unknown
  Bacterial polypetide isolated from the Sargasso Sea
MSPAVRKIIAENKIDIKSVKGTGKDGRVLKGDLINLMGSNPPPSERKIKYGQEERIKMTRLRQTIAKRLKQAQENAALLTTFNEVDMTNVMDMRKENQEDFQSRYGVKLGFMSFFVKACVVALKNYPAVNAEIEGDEIIYKNYYNISFAVGTDKGLVVPVLKNADELSFANIEKNIKEISEKAKDGKLTIEDLQGGTFTISNGGVYGSMLSTPILNLPQSGVLGMHNIIDRPNGG

SEQ ID NO: 114436 - protein, 275 aa, Unknown
  Bacterial polypetide isolated from the Sargasso Sea
GSQDQGRVSEEDVKEFIRSQVTVNKGAVEKKEYKEEFSHEEFGQIEIKEIPRVKRLSGPHLVRSWTEIPHVTQHDEVDVTEMEQFRSSLYDYYSGDVIKVTPLAFIAKALVSALKEFPNFNASIDPNKNKIVYKKYFHIGFAVDTPHGLMVPKIRDVDQMSIKEIGEALKKTSKLCRELKIDKKEFFGGSMTISSLGGIGGTFFTPIINPPEVAILGVGKTFDRLVKIKGKIVSRKILPLSLSYDHRLIDGAEGARFCVYLGKCLGKDFAFKLAV

SEQ ID NO: 114437 - protein, 293 aa, Unknown
  Bacterial polypetide isolated from the Sargasso Sea
MSEKVLVPALGESITEATVSKWMKNKGDTVNADEGIVELETDKVNLEVPAPVSGVLTEVNSKDGDTVEVGAILGVISEEVKKIDTTNLTKKKEDENKVVPKSQSNVISLEIEKKEKQKINEPLILNEEKPLILTEEVREDKETEKNKILSPAVRKIITEKKLNIDEIKGTGKDGRVLKGDLINLMGINPNPNERKIKFGEEERIKMTRLRQTIAKRLKEAQENAAMLTTFNEVDMSGIISMRKDNQDDFQSRYGVKLGFMSFFVKACVVGLKLFPSINAEVEGEEIIYKNYYN

SEQ ID NO: 114438 - protein, 276 aa, Unknown
  Bacterial polypetide isolated from the Sargasso Sea
KIVAENKIEVESVKGTGKNGRILKGDLINLMSNHPKPSERKLKFGEEERIKMSRLRQTIAKRLKQAQENAALLTTFNEVDMSGIIEMRKENQKDFQDRYGVKLGFMSFFIKSCILALKTFPVVNAEIDGDEIVYKNYYNISFAVGTEKGLVVPVLRNADELSFADIEKNVKIISEKAKDGKLNIEDLQGGTFTISNGGVYGSMLSTPILNLPQSAVLGMHNIVERPVVIDGEVKIRPIMYLALSYDHRIIDGKESVSFLKTVKENLEDPRRLFLEI

SEQ ID NO: 114439 - protein, 210 aa, Unknown
  Bacterial polypetide isolated from the Sargasso Sea
QENAALLTTFNEVDMSSVMEMRKENQEDFQSRYGIKLGFMSFFVKACVVALKNFPAVNAEIDGDEIIYKNYYNISFAVGTDKGLVVPVLRNADELSFADIEKNIKEISEKARDGKITIEDLQGGTFTISNGGVYGSMLSTPILNLPQSGVLGMHNIVERPVIVDGEIKIRPIMYLALSYDHRIIDGKESVSFLKMIKENLEDPRRLFLDI

SEQ ID NO: 114440 - protein, 296 aa, Unknown
  Bacterial polypetide isolated from the Sargasso Sea
PSPISGTLTAVNFKDGDTVEVGAVLGEISEGFVDQKQEDSKKIESPTKKTSDNVINFEKEKKQSPEIFEKEEKEKPLVLTKEKKLTSNKEEPLVLTKEMPVKQKIISEKVLSPAVRKIVEENKIDIRSIKGTGKSGQILKGDLISLMGSTPQPSERKLKYGEEERIKMSRLRQTIAKRLKEAQENAAMLTTFNEVDMTNIIEMRKNNQEDFQKRFGIKLGFMSFFVKACVLGLKSFPAINAEIEGDEIIYKNYYNISFAVGTEKGLVVPVIRNADELSFAEIEQNIKTTSEKAKEG

SEQ ID NO: 114441 - protein, 327 aa, Unknown
  Bacterial polypetide isolated from the Sargasso Sea
ITEATVSRWLKSEGDRVEADEPLVELETDKVNLEVPSPVTGILNKISSKDGSVVEVGALLGSVIEKNSSLNNTKENEISENPEGKDNVVKLETQVEKKEPKVFNEEKSIDDDYKEEPLILDNEVTDAKEGANEESDQILSPAVRKIATENNIDIKSVKGSGKQGRVLKSDLIELMGINPPPSERKIKYGHEEKIKMTRLRQTIAKRLKQAQENAALLTTFNEVDMSNIIQMRKDNQDDFQNRYGVKLGFMSFFVKACVVALKNFPAVNAEIEGDEIIYKNYYNISFAVGTEKGLVVPVLKNADELSFADIEKNIKEISEKARDGKLI

SEQ ID NO: 114442 - protein, 298 aa, Unknown
  Bacterial polypetide isolated from the Sargasso Sea
NGVLGSIEVKEGETVNVGSLLGIINKNTNDLGEAKETKTYSPPKKEPKIFEEKKNIQQKKKINKPLVDQQVLKLDNEHVEDEPLILEEIHEDKKVSKQIFNKTKETKVSPAARKMANEAKIDLDKVKGSGKNGIILKEDIMDLMGSKPAPSERKIKYGPEERVKMTRLRLTIAKRLKEAQENAAMLTTFNEVDMSEVIAMRNEYKGEFYDNYGVKLGFMSFFVKACVIGLKNFPAINSEIQGEEIVYKNYYNISIAVGTDRGLVVPVLRETDEMSFADIEKNISSLGKKARDGKITIE

SEQ ID NO: 114443 - protein, 283 aa, Unknown
  Bacterial polypetide isolated from the Sargasso Sea
SYFRRIITEATVSKWLKNVGEPFDVDEPLVEIETDKITVEVPAPQAGSLSEIKAKEGSDIHIGGVLGIIGDSNGSKKTQVNKTKNIEPKKEKIFEKNIKENKKANQNNNKLSPSVKKMLEENNLDASLVKTQRDDGRITKEDILNHLEGKNTLKKQKPTDREEIVPMSKIRQTIATRLKESQNTAAILTTFNEVDMSAIIEIREKKNDDFKERYGIKLGFMSFFVKAVVMSLQEFPAVNAEIRENNIVYKNHFDIGIAVGTEKGLVVPVLTNADEMTFGDIEK

SEQ ID NO: 114444 - protein, 283 aa, Unknown
  Bacterial polypetide isolated from the Sargasso Sea
MSEKITVPSLGESVTEATVSKWLKSQGDKVVADEPIVELETDKVNVEVPAPTNGILGSIEVKEGQTVNVGSLLGIINNISNQKIESPKEIKSYNPPAKEPKLFNTEKNKSLQKKNNKPKIKETILKLDDENVDEEPLILKEAHNEKVISKKNPSLNKQKQISPAARKMANEANVDIDKIEGTGKNGLILKGDIMALMGSKPAPSDRKIKFGPEERVKMTRLRLTIAKRLKEAQENAAMLTTFNEVDMSEVIAMRNQYKDEFQKNYDVKLGFMSFFVKACVIGL

SEQ ID NO: 114445 - protein, 95 aa, Unknown
  Bacterial polypetide isolated from the Sargasso Sea
ISIEDLQGGTFTITNGGIYGSMLSTPILNPPQSGVLGMHNIIERAVVKDGQIIIRPMMYLALSYDHRIVDGKEAVSFLKNIKDSLEEPQRLFLNV

SEQ ID NO: 114446 - protein, 287 aa, Unknown
  Bacterial polypetide isolated from the Sargasso Sea
VLESISVKEGETVNVGALLGMINGSAKKVSKRIEEVKDYSPPKKKNEVLKKPKEESIKLFEKNEEKPLKLVEEETKPLKFKEEEEALVLDNFHEENKTIKVKEPTISPAARKMATEAKVDLSKIEGSGKHGVILKEDIMSLMGSKPSPSERKIKHGPEERIKMTRLRLTIAKRLKEAQENAAMLTTFNEVDMSEVIAMRNQYKDEFQKNYDVKLGFMSFFVKACVIGLKNFPAINAEIQGDEIVYKNYYNISIAVGTDRGLVVPVLRETDEMSFADIEKNIGKLGEK

SEQ ID NO: 114447 - protein, 185 aa, Unknown
  Bacterial polypetide isolated from the Sargasso Sea
QDDFQNRYGVKLGFMSFFVKASIVALKNFPAINAEIEGDTIVYKNYYNISFAVGTEKGLVVPVLKNADELSFADIEKNIKDISEKAKNGKLTIEDLQGGTFTISNGGVYGSMLSTPILNLPQSGVLGMHNIVDRPIVVDGEIKIRPIMYLALSYDHRIVDGKESVSFLKMIKENLEEPRRLFLDI

SEQ ID NO: 114448 - protein, 311 aa, Unknown
  Bacterial polypetide isolated from the Sargasso Sea
ESITEATLAKWLKKKGESINADEALVELETDKVNLEVPSPVSGVVSEINFKDGDTVKVGEVLGLVSENNIGDKKVEKLKTNQKPKTTESENVVKLNKNKESEIEIFEEKLQDENQIDNEEPLVLTEEILDKNKKEEKILSPAVRKIVAEKKIKIEEIKGTGKDGRILKGDLLNLMGTKPAPNQRKVQYGEEERIKMSRLRQTIAKRLKEAQENAALLTTFNEVDMSNIISMRKENQDDFQNRYGIKLGFMSFFVKASIVGLKLFPAINAEVEGQEIIYKNYYNISIAVGTEKGLVCSVIKDADELSFADIE

SEQ ID NO: 114449 - protein, 196 aa, Unknown
  Bacterial polypetide isolated from the Sargasso Sea
MSEVIAMKKQYKEEFQSKYSVKLGFMSFFVKACVIGLKNFPAINAEIQGDEIVYKNYYNISIAVGTDRGLVVPVIRETDEMSFADIEKNIVELGEKARDGKITIDDLQGGTFTITNGGIYGSMLSTPILNPPQSAVLGMHNIVERPVVVEGNVEVRPVMYLALSYDHRIIDGKEAVSFLKIVKESLEQPKRLFLNI

SEQ ID NO: 114450 - protein, 243 aa, Unknown
  Bacterial polypetide isolated from the Sargasso Sea
MKDLKEVKTYNPPKKQSNKHPKLFDDKKDDIKSIKKIEEQVLKLDNEKTDDSEPLILDELHEEKNFTKQPLEVLKENKVSPSARKLASEAKIDLENVKGSGKNGIILKEDVMALMGSKPAPSERKIKHGPEERVKMTRLRLTIAKRLKEAQENAAMLTTFNEVDMSEVISMRNEYKEEFQRNYGAKLGFMSFFVKACVIGLKNFPALNSEIQGEEIIYKNYYNISIAVGTDRGLVVPVLRETD

SEQ ID NO: 114451 - protein, 280 aa, Unknown
  Bacterial polypetide isolated from the Sargasso Sea
MSPAVRKIVTENNIDINSIQGSGKDGRVLKGDLISLMGANPKPSERKIQYGEEERIKMTRLRQTIAKRLKQAQENAALLTTFNEVDMSSVMEMRKENQEDFQSRYGIKLGFMSFFVKACVVALKNFPVVNAEIEGDEIIYKNYYNISFAVGTDKGLVVPVLRNADELSFAEIEKNIKEISEKARDGKLTIEDLQGGTFTISNGGVYGSMLSTPILNLPQSGVLGMHNIVERPVVVDGEIKIRPIMYLALSYDHRIIDGKESVSFLKIIKENLEDPRRLFL

SEQ ID NO: 114452 - protein, 293 aa, Unknown
  Bacterial polypetide isolated from the Sargasso Sea
KADEPVVELETDKVNLEVPSPLTGVIEEINAKNGEIVEVGALLGSISSNVSSKKVKVEKNEVSKSVSENNIVNFNNERKKDVPKIFDEEKNDLKEKPLVLINEIHEKKPLILKDRNESLSPAVRKIVSENNIDIKKISGSGKDGRILKSDLINIMGEIPKVSERKIKYGQEERIKMSRLRQTIAKRLKQAQENAALLTTFNEVDMTNIIGMRNENQKDFLNRYGIKLGFMSFFVKACINALKIFPAVNAEIDDDEIIYKNYYNISFAVGTEKGLVVPVIKNADELSFADIEKK

SEQ ID NO: 114453 - protein, 217 aa, Unknown
  Bacterial polypetide isolated from the Sargasso Sea
QVGSVLGVISDSKENGENVKPENIKIQEEEEKSNSDEIAKNAAANKEDSNIQDGPLILNEEEQPLILSEELEINEKPQENLEKNKNLSPAVRKIVTENNIDINKIRGTGREGRILKGDLISLMGENPQPNQRKVKYGEEERIKMTRLRQTIARRLKEAQENAAMLTTFNEVDMSGIISMRKENQEDFQNRYNIKLGFMSFFCKSLCRKIKVISRNKC

SEQ ID NO: 114454 - protein, 252 aa, Unknown
  Bacterial polypetide isolated from the Sargasso Sea
LEKNTKSIIEDDNVIKLENSTEIEEPEIFEEKDDVSVLDEKPLVLTEEVDEKKSEIESKHEQTLSPAVRKIVNDNNIDISSIQGSGKDGRVLKGDLINLMGINPPPSERKIKYGQEERIKMTRLRQTIAKRLKQAQDNAALLTTFNEVNMSNVMEMRKENQEDFQNRYGVKLGFMSFFVKASVVALKNFPAINAEIEGDTIIYKNYYNISFAVGTEKGLVVPVLKNADELSFADIEKNIKEISEKAKNGKLT

SEQ ID NO: 114455 - protein, 214 aa, Unknown
  Bacterial polypetide isolated from the Sargasso Sea
LKQAQENAALLTTFNEVDMSSVMEMRKENQEDFQSRYGIKLGFMSFFVKACVVALKNFPAVNAEIDGDEIIYKNYYNISFAVGTDKGLVVPVLRNADELSFADIEKNIKEISEKARDGKLTIEDLQGGTFTISNGGVYGSMLSTPILNLPQSGVLGMHNIVERPVVVDGEIKIRPIMYLALSYDHRIIDGKESVSFLKMIKENLEDPRRLFLDI

SEQ ID NO: 114456 - protein, 183 aa, Unknown
  Bacterial polypetide isolated from the Sargasso Sea
MEEIPKIKTSSKKIVKNQKERQISPSARKMANEANVDINQVQGSGKNGVILKEDIMSLMGSKPSPSERKIKHGPEERVKMTRLRLTIAKRLKEAQENAAMLTTFNEVDMSEVISMRNQYKDEFQSNYGVKLGFMSFFVKACVIGLKSYPAVNAEIQGEEIVYKNYYNISIAVGTDRGLVVPVL

SEQ ID NO: 114457 - protein, 377 aa, Unknown
  Bacterial polypetide isolated from the Sargasso Sea
MSEQILVPVLGESITEATVAKWLKSVGDTVEVDEPIVELETDKVNLEVPSPVSGTIGDIKFKNGDVVEVGAVLGSIENNGKAKVKETSKIKIDKSKKLEVKVDNIVRLEDQKTPNIFENNEEVENENNKTKKKEDDTLILTDEIKENNSSSKLSPSVRKIVAEKNIDIEKIEGTGKDGRISKGDLIKLMSLKPKPSERKIKFGQEERIKMSRLRQTIAKRLKQAQENAALLTTFNEVDMTKIIEMKEKNKKEFQKKYGTKLGFMSFFVKACVLGLKSFPAVNAEIDGDEIVYKNYYNISFAVGTDKGLVVPVIKNADEISFAEIEKKIKNLSDKAREGKLTIEDLQGGTFTISNGGVYGSMFITQILNFTQSGVLGM

SEQ ID NO: 114458 - protein, 296 aa, Unknown
  Bacterial polypetide isolated from the Sargasso Sea
PAAKKIMAEHNIDERDVTGSGKEGRILKEDVKNFIADNKFPKNKEPEKPNTSEFKGQEFRDSQGQLEEVKRMSRLRQTIAERLKSAQNTAAILTTYNEIDMTEVMAIRQTFKDEFELKHSVKLGFMSFFIKACCHALKEIPEVNAEIRKTDIVYKNFVNMGVAVGTEDGLVVPVIRNADELSFASLEIKLNELGNKARNGELTMSEMAGGTFTISNGGVYGSLMSSPILNPPQSGILGMHKIQERPIALSGEIVIRPMMYLALSYDHRIVDGKGAVTFLVRVKEALEDPRRLLMDL

SEQ ID NO: 114459 - protein, 298 aa, Unknown
  Bacterial polypetide isolated from the Sargasso Sea
QNTDIENAPSAKKLMAENKISSDKIAGTGKDGRIMKNDVLKAVQSVVVEETEMSSTLRAPSSVEDADREERVKMTRLRQTIAKRLKDSQNTAAMLTTYNEVDMTEVISLRSEFKELFEKKHGTKLGFMSFFTKACCHALKEVPEVNAEIDATDIVYKNYVHMGIAAGTPTGLVVPVIRNADSMSFADIEKSIAEKGKRARDGKLSMDEMQGGTFTISNGGVYGSLMSSPILNPPQSGILGMHKIQDRPMALNGEVVIRPMMYLALSYDHRIVDGKGAVTFLVRVKEALEDPRRLLMDL

SEQ ID NO: 114460 - protein, 363 aa, Unknown
  Bacterial polypetide isolated from the Sargasso Sea
PLVEIETDKITVEVSAPKAGALSEIKVQVGEDVKIGGVLGIINENQNEITKSNSPKEEKQKPSLNNQQSNDINIENSIEEKKLSPAVRKMVEENKLDSSNIKSSRADGRITKEDLINHLNNDSINKNISTKDREEIVKMSKIRKTIANRLKDSQNTAAILTTFNEVDMNSIIEIRESKKNDFNQKYGVKLGFMSFFVKAVVASLQEFPAVNAEIRDDNIVYKNHFDIGIAVGTEKGLVVPVLKNADQMTFGDIEKNIFTLSSKAKDGTLTIDDLTGGTFTISNGGVYGSMLSTPIINTPQSGILGMHNIKKRAVVINDEVVVRPIMYVALSYDHRIIDGKESVSFLVSVKDLLENPSKLILGF

SEQ ID NO: 114461 - protein, 439 aa, Unknown
  Bacterial polypetide isolated from the Sargasso Sea
MSEKIVVPALGESITEATVAKWLKNTGDTVEADEPIVELETDKVNLEVPSPVKGVLTEINSKDGSVVEVGALLGLVSENGSAGSVKKEEIKKIEPNQTEDNVIKLDPSKKEPKIFEEKKTENTQDEPLILTEEITEEEVPKPKIEKSEPKTNTESQTLSPAVRKIVIENKIDINSVKGSGKDGRVLKGDLISLMGANPQPAERKVKYGQEERIKMTRLRQTIAKRLKQAQENAALLTTFNEVDMTNIMEMRKENQQDFQSRYGIKLGFMSFFAKACVVALKNFPAVNAEIDGDEIIYKNYYNLSFAVGTEKGLVVPVLRNADELSFAEIEKNIKDISEKARDGKLTIEDLQGGTFTISNGGVYGSMLSTPILNLPQSGVLGMHNIVDRPIVVDGEIKIRPIMYLALSYDHRIIDGKESVSFLKMVKENLEDPRRLFLDI

SEQ ID NO: 114462 - protein, 346 aa, Unknown
  Bacterial polypetide isolated from the Sargasso Sea
MSENILVPVLGESVTEATVARWLKKEGEKVSADEPVVELETDKVNLEVPSPVSGVISKINSKDGDNVEVGSILGIVSSGSNDQPEKLQINEKIPPVTEKIITEAESFVEEKSKKEDAIKSNEQNDRQIETKIFDIEDKDEPLVLTNEIKNGKSEILNNNLSPAVRKIVTEKNLKLEGIRGSGKRGAILKGDLLNLMNKTPEPNQRKIKYGPEERIQMSRLRQTIAKRLKSAQETAAMLTTFNEVDMSKVINFRKENQDEFKNKFGTKLGFMSFFVKASIKSLKLYPVVNAEIENNDIIYKNYYNISFAVGTEKGLVVPVLKNADEMSFADIESNIKTLSDKANSGS

SEQ ID NO: 114463 - protein, 277 aa, Unknown
  Bacterial polypetide isolated from the Sargasso Sea
MSEKIVVPVLGESITEATVAKWLKNAGDTVEADEPIVELETDKVNLEVPSPISGVLTEINSQDGSVVEVGALLGSVSAEGGAVKSAPKTQKEIKQEEIVPAESNVIKLDANKKEPKVFEEKDIEKPKEKPLVLTEEVKPDVAPKRNVNPTLSPAVRKIVTENNIDINSIQGSGKDGRVLKGDLISLMGANPKPSERKIKYGEEERIKMTRLRQTIAKRLKQAQENAALLTTFNEVDMSSVMEMRKENQEDFQSRYGIKLGFMSFFVKACVVALKISL

SEQ ID NO: 114464 - protein, 193 aa, Unknown
  Bacterial polypetide isolated from the Sargasso Sea
LMEMRKNYQESFEKKNGVRLGYMSFFVKASIDALSEFPAVNAEIDGNDIIYKNYYNIGVAVGTSQGLVVPVLKNADKMSFGETEATIAEFGKRAKEGNLAMSDMAGGTFTISNGGVYGSLMSSPILNPPQSGILGMHKIQKRPVAIGDNIEIRPMMYLALSYDHRIIDGREAVSFLVRIKEIIEDPRRLVVGA

SEQ ID NO: 114465 - protein, 184 aa, Unknown
  Bacterial polypetide isolated from the Sargasso Sea
MIFKKLYGIKLGFMSFFVKACVLGLKLYPSINAEVDNDHIIYKNYYNISFAVGTERGLVVPVLRNSDELSFSDIEKNIKSISEKAKDGNLTIDDLQGGTFTISNGGVYGSMLSTPILNPPQSGVLGMHNIIERPIVVEGQIQIRPVMYLALSYDHRIIDGKDSVSFLKTVKENLEDPRRLFLNI

SEQ ID NO: 114466 - protein, 413 aa, Unknown
  Bacterial polypetide isolated from the Sargasso Sea
MSEKILVPELGESITEATVSKWLKSAGDSVEADEPIVELETDKVNLEVPSPVNGVLGKINASEGDVVEVGSTLGHINSGSNIQTSDISKNEDVKKKENNVIKIEVEKKTEPKEIKILSEEEDKDEFEHSQEQDSPSIDDDTLVLTNEVEEKIEVEHNLSPAVRKIVSEKKIDIQKVKGTGKDGRVLKGDLINLMGVNPGPSERKIKYGQEERIKMTRLRQTIAKRLKQAQENAALLTTFNEVDMTNIVEMRKENQDDFLERYGIKLGFMSFFVKASVVALKSFPAVNAEIEGDEIVYKNYYNISFAVGTEKGLVVPVLRNADELSFADIEKNIKDLSDKAKDGKLTIEDLQGGTFTISNGGVYGSMLSTPILNLPQSGVLGMHNIVDRPLVVDGEIKIRPVMYLALSYDHRII

SEQ ID NO: 114467 - protein, 445 aa, Unknown
  Bacterial polypetide isolated from the Sargasso Sea
MEEKILVPALGESITEATVAKWLKGVGDTVKADEPIVELETDKVNLEVPSPINGRLEEVKANDGEVVKVGSLLGSIKKMDIKSEETEIKKITPTTVKKESSKLPVDTEKIIIEAEKTLEVDAEPKIFEQSAKESLNKEVPLTLQDEEPLILSNEIDKKNLREELSPAVRKIVSENKIDLKKVKGSGKGGRIIKGDLISIMGKNPAPSERKIKYGPEERIKMTRLRQTIAKRLKQAQENAAMLTTFNEVDMSGVIETRNQNQENFTKRYGVKLGFMSFFIKSCIIGLKNFPAINAEIEGENIVYKNYYNISFAVGTEKGLVVPVIKNADELSFADIEKTIKALSEKARDGKLSIEDLQGGTFTISNGGVYGSMLSTPILNPPQSGVLGMHNIVDRPIVSNGEIKIKPVMYLALSYDHRIIDGKDSVSFLKLIKENLEEPKKLFLTI

SEQ ID NO: 114468 - protein, 270 aa, Unknown
  Bacterial polypetide isolated from the Sargasso Sea
MSVDIKVPSLGESVVEATVAKWYKNEGDSVTLDEPLLELETDKVTLEVPSPTSGLIEKISSPEGSTVEVGALLGVINDTAEVKIAPENSEKIVTTKEEKPKEEPAMEKPVLQELSVPLDNTPKEILESKVSKLSPAVRKIAAEKNIDISQVATARSDGRITKGDILASNNNIQELSTKPPISKDHDSKEERVPMSRLRQTIAKRLKDAQNNAAMLTTFNEVDMGELIRTRNEHKDAFESKYGIKLGFMSFFVKACITALKDIPEVNAEVE

SEQ ID NO: 114469 - protein, 411 aa, Unknown
  Bacterial polypetide isolated from the Sargasso Sea
MTEDIKSPQFPESIFEGTLSSWLKKEGDEIKQDEVLAEIETDKVVIEVTAPSDGVMEKILVAEGSTIKSSDIIGRYKKGESAPSTPSKTEEPEKKVEKKPKKEKASVEKSEPAKTKKERGFRMGPAAKKLLNEEDVDLSDVKTSSKKGVVTKKDILEAAEKKPEKVESKSSEVSVSEDGKNIKRVPMTRLRSVVAKRLLESQFSTASLTTFNEVDLYEVKKLREKYRDSFEQKFGVKLGFMGMFLKASSIALQDMPIVNASIDGNDIVYHGSQDIGVAVSTEKGLVVPVVRNVQELSLAEIEMAIRDYSIKARDGKIEMADITGGTFTVSNGGVFGSLLSTPILNPPQSAILGMHKIQERPMVVDGNIEVRPMMYLALTYDHRLLDGKDAVSFLVKIKETLESPESMILGV

SEQ ID NO: 114470 - protein, 396 aa, Unknown
  Bacterial polypetide isolated from the Sargasso Sea
MSIKIKSPTFPESVADGTVANWLKKEGENVNQDEVIAEIETDKVVLEVLAQADGVITKIIKSEGDTVSSAEVIGEFSESDNSSKTSSDIKEKQIKTEKKISKPAVKKIGPAAKKIISEENINPKDIMASGKDDRITKADVINHLESDQKESKNIPLEQVSSASDRLEKRVPMSRLRSTIAKRLVSVKQNTAMLTTFNEVDMLPIKDLRSKYGAEFEKEHEVKLGFMGFFVIAAVQALKKFPVVNASIDGDDIVYHGFQDIGVAVSTDRGLVVPIIKDADTKSLPEIEKSILSYSEKARNGKLSIEEMQGGTFTISNGGIFGSLLSTPILNAPQTAILGMHAIQDRPVAINGEVVIRPMMYLAMSYDHRLLDGKEAVTFLVSIKEQLESPERLLLNL

SEQ ID NO: 114471 - protein, 449 aa, Unknown
  Bacterial polypetide isolated from the Sargasso Sea
MSEKIVVPALGESITEATVAKWLKNTGDSIEADEPIVELETDKVNLEVPSPINGVLGKISASEGDVVQVGSTLGLINSNSKGHSGNNLKDKSEDKEENNIVSIDIEKKKEQKEIKIFQEAQETVTEPESSIEEKPLVLEAQEQESPIEEKPLVLTNEVEEKTEANENLSPAVRKIVAENKIDVKKIQGSGKEGRILKEDLIGLMGVNPGPSERKIKYGHEERIKMTRLRQTIAKRLKQAQENAALLTTFNEVDMTNIVEMRKENQDDFQKRYGVKLGFMSFFIKASVVALKNFPAVNAEIEENEIVYKNYYNISFAVGTEKGLVVPVLRKADELSFADIEKNIKKLSDKAKDGKLTIEDLQGGTFTISNGGVYGSMLSTPILNLPQSGVLGMHNIVDRPIVVDGEIKIRPVMYLALSYDHRIIDGKDSVSFLKTIKENLEDPRRLFLNI

SEQ ID NO: 114472 - protein, 404 aa, Unknown
  Bacterial polypetide isolated from the Sargasso Sea
MSIKIKAPTFPESVADGTIANWIKKEGEDINQDEVIAEIETDKVVLEVLAQSDGVISKIHKTEGETVASSEIIGEFEESNEPSEIKNTDTQKKSKSKKEEKISEEPQSKKANIDNKKIAPAAKKMILEENLDSNDINPSGKDNRITKADVINHLSPDEEENSFTESSVSNGGRPEKRVPMSRLRSTIAKRLVSVKQETAMLTTFNEVDMLPIKDLRKKYGAEFENEHEVKLGFMGFFVMAAVQALKKFPVVNASIDGNDVVYHGFQDIGVAVSTERGLVVPVIKDADTKSLPEIEKSILEYSEKARNGKLSIEEMQGGTFTISNGGIFGSLLSTPILNAPQTAILGMHAIQDRPVAINGDITIRPMMYLAMSYDHRLLDGKEAVTFLVSIKEQLESPERLLLNL

SEQ ID NO: 114473 - protein, 57 aa, Unknown
  Bacterial polypetide isolated from the Sargasso Sea
VDGKLKIRPMMYLALSYDHRIMDGNQSVGFLIAVKEGVEDPENIIMGGKIKKSLGLT

SEQ ID NO: 114474 - protein, 405 aa, Unknown
  Bacterial polypetide isolated from the Sargasso Sea
IVELETDKVNLEVPAPASGTLTSVNFKEGDSVEVGAVLGEISEGSEDQKQVGNKNTENPKKKTSDNVINFDKEKKQNPKIFDNEEKEKPLVLNTEKPLTSNKEEPLVLTKEMPGKQKIISEKVLSPAVRKIVEENKIDIQSIKGTGKSGQILKGDLISLMGSVPQPSERKLKYGEEERIKMSRLRQTIAKRLKEAQENAAMLTTFNEVDMTNIIEMRKNNQEDFQKRFGIKLGYMSFFVKACVLGLKSFPAINAEVEGQEIIYKNYYNISFAVGTEKGLVVPVIRNTDELSFAEIEKNIKTISEKARDGKLTIDDLQGGTFTISNGGVYGSMLSTPILNPPQSGVLGMHNIVERPIAINGEVEIRPVMYLALSYDHRIIDGKDSVSFLKLLKENLEDPRKLFLDL

SEQ ID NO: 114475 - protein, 256 aa, Unknown
  Bacterial polypetide isolated from the Sargasso Sea
CTVCWDEETEKSSPPRAPSSIEDADREERVKMTRLRQTIAKRLKDSQNTAAMLTTYNEVDMTEVMSLRTEFKELFEKKHGTKLGFMSFFTKACCHALKEVPEVNAEIDATDIVYKNYVHMGIAAGTPTGLVVPVIRNADSMSFADIEKSIAEKGKRARDGKLSMDEMQGGTFTISNGGVYGSLMSSPILNPPQSGILGMHKIQDRPMVVNGEIVVRPMMYLALSYDHRIVDGKGAVTFLVRVKEALEDPRRLLMDL

SEQ ID NO: 114476 - protein, 103 aa, Unknown
  Bacterial polypetide isolated from the Sargasso Sea
GQKARSGQLSIEDMQGGTFTISNGGVYGSLMSTPILNPPQSGILGMHKIEERPIAIDGEIIIRPMMYLALSYDHRIVDGKGAVTFLVRVKEGLEDPSRLLLGV

SEQ ID NO: 114477 - protein, 341 aa, Unknown
  Bacterial polypetide isolated from the Sargasso Sea
FDDERDTKLFDNIIESAPQKKQLNETKDQVSENNIEEDVLILTEEIKQEKKVSTGKEKVMSPAVRKIVSENNLNINDVKGSGKDGMVLKGDLLSLMGTKPAPSERKLKFGEEEKIKMSRLRMTIAKRLKQSQENAAMLTTFNEVDMTNIMDMRKNNQDDFQKKFKIKLGMMSFFVKACVVGLKLYPAINAEVEGESIIYKNYYNISFAVGTDKGLVVPVLKNADEMSFADIEMNIKALSDKAKDGKITIEDLQGGTFTISNGGVYGSMLSTPILNLPQSGVLGMHNIVSRPIVVNNEIKIRPIMYLALSYDHRIIDGKEAVSFLKTVKENLEDPRRLFLNL

SEQ ID NO: 114478 - protein, 361 aa, Unknown
  Bacterial polypetide isolated from the Sargasso Sea
MELFWISKQKGPGSQKNEEIKKIQPTVNNDNLVKLDAKKEPDVFDEKITEEKQPEEAPLVLTNEIKEDSQEINSDIHENLSPAVRKIVTENKIDIKSVKGSGKDGRVLKGDLINLMGVNPPPSERKIKFGQEERIKMTRLRQTIAKRLKQAQENAALLTTFNEVDMTSIMEMRKENQEDFQNRYGVKLGFMSFFVKACVVALKNFPAVNAEIEGDEIIYKNFYNVSFAVGTEKGLVVPVLKNADELSFADIEKNIKQISEKAKDGKLTIEDLQGGTFTISNGGIYGSMLSTPILNLPQSGVLGMHNIVDRPVVTNGEIKIRPIMYLALSYDHRIIDGKESVSFLKMIKENLEDPRRLFLDI

SEQ ID NO: 114479 - protein, 419 aa, Unknown
  Bacterial polypetide isolated from the Sargasso Sea
MTIQKILVPDMGDFKDVEVIEVLVKKGQVIKKNDSLITLESDKSSVEVPSTHEGKIEKINVSVGDKINKGDLILTLESKQETNEPVKEKSKKEPVKQKIQEVVQVQKQQPAPSVPASGKSSASPKIRKFARELGADISKISGTQRAGRVSEEDVKNFIRSQVTVSQGEVQKKEITKYVEEYSHEEFGEITTQDLPRVKKLSGPHLVRSWTEIPHVTQHDEIDVTDMEQFRNSLYDYYTGEKIKVTPLAFIAKALVSALKEFPNFNASLNPENNKIIYKKYFHIGFAVDTPHGLMVPKLRNVDQMSIQKIGEELKNTSQLCRELKIDKKEFFGGSMTISSLGGIGGTHFTPIINPPEVAILGVGRTFDRLVKEKNQIVSKKILPISLSYDHRLIDGAEGARFCVYLGECLGKDFAFKLAV

SEQ ID NO: 114480 - protein, 432 aa, Unknown
  Bacterial polypetide isolated from the Sargasso Sea
MSEKIVVPVLGESITEATVAKWLKNPGDAVEADEPIVELETDKVNLEVPSPISGVLTEINSQDGSVVEVGALLGSVSANGRAVKSVPIKREQIKKEETVPSESNVIKLDANKKEPKIFEEKETNKFKVKPLVLTEEVKSEVAPKRDINPTMSPAVRKIVVENNIDINSIQGSGKDGRVLKGDLISLMGANPKPSERKIQYGEEERIKMTRLRQTIAKRLKQAQENAALLTTFNEVDMSSVMEMRKENQEDFQSRYGIKLGFMSFFVKACVVALKNFPAVNAEIDGDEIIYKNYYNISFAVGTDKGLVVPVLKNADELSFADIEKNIKEISEKARDGKLTIEDLQGGTFTISNGGVYGSMLSTPILNLPQSGVLGMHNIVERPVVIEGEIKIRPIMYLALSYDHRIIDGKESVSFLKMIKENLEDPRRLFLDI

SEQ ID NO: 114481 - protein, 82 aa, Unknown
  Bacterial polypetide isolated from the Sargasso Sea
FNGGVYGSMLSTPIINSPQSGILGMHNIIKRAVVINDEIVIRPMMYLALSYDHRIIDGKESVGFLVNVKKLLEDPSKIVLGN

SEQ ID NO: 114482 - protein, 440 aa, Unknown
  Bacterial polypetide isolated from the Sargasso Sea
MSEKILVPTLGESITEATVSKWLKKEGETVQVDEAIVELETDKVNLEVPSPISGTLSEISFRDGDTVEVGAVLGSISEGNVDIKNETESKKQLEDNEEKELKDQKSNVINLDIEKKPQTKLEEPLVLTEDKSMELLEEEPLLLTEEVEIEETSQQPIILSPAVRKMVAEKNINLDNVKGTGKAGRILKGDLITMMGANPQPNQRRIQYGEEERIKMTRLRQTIAKRLKQAQENAAMLTTFNEVDMSGIMAMRKDNQEDFKSRYGIKLGLMSFFVKACVVGLKLFPAINAEIEDQDIIYKNYYNISFAVGTERGLVVPVLRNADEMSFAEIEKEIKKLSEKANTGSLTIEDLQGGTFTISNGGVYGSMLSTPILNPPQSGVLGMHNIVERPVNDNGDIKIKPIMYLALSYDHRIIDGKESVSFLKTVKENLEDPRRLFLNI

SEQ ID NO: 114483 - protein, 116 aa, Unknown
  Bacterial polypetide isolated from the Sargasso Sea
LTIAEIELAIRDLSLKARDGKLDIEDMTGGTFTVSNGGVFGSLLSTPILNPPQSAILGMHKIQERPMAVNGNVEIRPMMYLALTYDHRLLDGKDAVSFLVKIKEILESPESMILGV

SEQ ID NO: 114484 - protein, 85 aa, Unknown
  Bacterial polypetide isolated from the Sargasso Sea
YLFITNGGVFGSMLSTPIINPPQSAILGMHNIIERPMAVDGKIEIRPVMFVALSYDHRVIDGQQSVSFLVKVKENLENPARMLLS

SEQ ID NO: 114485 - protein, 378 aa, Unknown
  Bacterial polypetide isolated from the Sargasso Sea
MSEKIVVPVLGESITEATVAKWLKNVGETIEADEPIVELETDKVNLEVPSPISGVLSEINSKDGSVVEVGALLGSVSSNGKSQAVKKDEIKKTETAPKENNVIKLDKSNKEPKIFDDKSKEEKPLVLTEEEKPLVLTDEIVEEEKTIQKKENQTLSPAVRKIAVENKIDINSVQGSGKDGRVLKGDLLSLMGVNPKPSKRKVQYGQEERIKMTRLRQTIAKRLKQAQENAALLTTFNEVDMSSVMEMRKENQEDFQSRYGIKLGFMSFFVKACVVALKNFPAVNAEIDGDEIIYKNYYNISFAVGTDKGLVVPVLRNADELSFADIEKNIKKISEKARDGNLTIEDLQGGTFTISNGGVYGSMLSTPILNLPQSGVLG

SEQ ID NO: 114486 - protein, 305 aa, Unknown
  Bacterial polypetide isolated from the Sargasso Sea
MTEKILVPVLGESITEATISKWLKNKGDSINVDEALVELETDKVNLEVPSPVDGILTAINFKEGDTVEVGAVLGEISSGSAENKKVDVKSNDKEPKKESENVINFEKEKKQKPKIFEVEKKEEPLVLTKEEPLVLTKEEPLVLTKEEPSNQKTISQKVLSPAVRKIVEENNIDTSSVKGTGRSGQILKGDLISLMGSAPQPSERKIKYGQEERIKMSRLRQTIAKRLKEAQENAAMLTTFNEVDMTNIIEMRKNNQEDFQKRFGIKLGFMSFFVKACVLGLKAFPAINAEIEGQEIIYKNYYNIS

SEQ ID NO: 114487 - protein, 434 aa, Unknown
  Bacterial polypetide isolated from the Sargasso Sea
MSEKIVVPALGESITEATVAKWLKNTGDSVDADEPIVELETDKVNLEVPSPITGVLSEINSKDGSVVEVGALLGSVSENGSSAKPSPTKNEEVKKEEIKPSENNVIKLDPIKKEPKVFEETPKEEEPTEKPLVLTEEVVEETPKFNNTQSQTLSPAVRKIVAENKIDLATVQGSGKDGRVLKGDLISMMGANPKPSERKIQYGHEERIKMTRLRQTIAKRLKQAQENAALLTTFNEVDMTNIMEMRKENQEDFQSRYNIKLGFMSFFVKACVVALKNFPAVNAEIDGDEIVYKNYYNISFAVGTDKGLVVPVLRNADELSFADIEKNIKEISEKARDGKLTIEDLQGGTFTISNGGVYGSMLSTPILNLPQSGVLGMHNIVERPVVVDGEIKIRPIMYLALSYDHRIIDGKESVSFLKMIKENLEDPRRLFLDI

SEQ ID NO: 114488 - protein, 286 aa, Unknown
  Bacterial polypetide isolated from the Sargasso Sea
MSNTLSPSVRKIVAENKIDLKSIQGSGKDGQVLKGDLINLMSKSPKPSERKIKFGQEERIKMSRLRQTIAKRLKQAQENAALLTTFNEVDMSNVIKMRKDYQDDFLKKYGVKLGFMSFFVKASIEALKLFPAVNAEIDGEEIVYKNYYNISFAVATDKGLVVPVLKNADEMSFAQIENEIKTISEKARDGKLTIEDLQGGTFTISNGGVYGSMLSTPILNLPQSGVLGMHNIVDRPVVVDGGIKVRPVMYLALSYDHRIIDGKDSVSFLKLIKEKLENPEKLFLEI

SEQ ID NO: 114489 - protein, 432 aa, Unknown
  Bacterial polypetide isolated from the Sargasso Sea
MSEKIVVPVLGESITEATVAKWLKNAGDTVEADEPIVELETDKVNLEVPSPISGVLTEINSQDGSVVEVGALLGSVSAEGGDVKSAPKTQKEIKQEKIVPAESNVIKLDANKKEPKVFEEKEIEKLKEKPLVLTEEVKPDVAPKRDINPTLSPAVRKIVTENNIDINSIQGSGKDGRVLKGDLISLMGANPKPSERKIQYGEEERIKMTRLRQTIAKRLKQAQENAALLTTFNEVDMSSVMEMRKENQEDFQSRYGIKLGFMSFFVKACVVALKNFPAVNAEIDGDEIIYKNYYNISFAVGTDKGLVVPVLRNADELSFADIEKNIKEISEKARDGKLTIEDLQGGTFTISNGGVYGSMLSTPILNLPQSGVLGMHNIVERPIVVDGEIKIRPIMYLALSYDHRIIDGKESVSFLKLIKENLEDPRRLFLDI

SEQ ID NO: 114490 - protein, 429 aa, Unknown
  Bacterial polypetide isolated from the Sargasso Sea
MSEKILVPTLGESITEATVSKWLKREGETVEADEAIVELETDKVNLEVPSPISGTLSEISFRDGDTVEVGAVLGSISEGNADIKKAPESKKQLEDNEEKEFKDQKSNVINLDIEKKPQTKLEEPLVLTEDKSMELLEEEPLLLTEEVETEETSQQPIILSPAVRKMVAEKNINLDNVKGTGKAGRILKGDLISMMGANPQPNQRRIQYGEEERIKMTRLRQTIAKRLKQAQENAAMLTTFNEVDMSRIMAMRKDNQEDFKSRYGIKLGLMSFFVKACVVGLKLFPAINAEIEDQDIIYKNYYNISFAVGTERGLVVPVLRNADEMSFAEIEKEIKKLSEKANEGSLTIEDLQGGTFTISNGGVYGSMLSTPILNPPQSGVLGMHNIVERPVNDNGEIKIKPIMYLALSYDHRIIDGKESVSFLKTVKEI

SEQ ID NO: 114491 - protein, 323 aa, Unknown
  Bacterial polypetide isolated from the Sargasso Sea
IISESNNERPTKNTTLQKNKEETALAETEKTNKSKNEHLSPAVQRIVTENNLNPSEIIPSGKDGLITKSDALNKLSEQDSPKPVNKTVSNNELEERVPMSRLRKVVAKRLKEAQNTAAMLTTFNEVDMTSVMSLRSEYKDHFEKEHKVRLGFMGIFVKASISALNSYPAVNAEINGDDIIYKKYNNIGVAVGTPQGLVVPVIKDAQNKSLAEIEKAISDMGLRAREGKIGMDELSGGTFTISNGGVYGSLMSTPILNPPQSGILGMHKIQKRPIAVGDDIKIRPMMYLAFSYDHRIIDGREAVSFLVKIKEIIEDPRRLILGI

SEQ ID NO: 114492 - protein, 131 aa, Unknown
  Bacterial polypetide isolated from the Sargasso Sea
LRNAQELSFAALEQEIKRLADNVRNKSITVDDLTGGTFTISNGGVFGSMLSTPIINPPQSGILGMHNIIQRPIAVDGKVEIRPMMYIALSYDHRIIDGNQSVGFLIAVKEGVEDPENILMNGKVKKSLGLN

SEQ ID NO: 114493 - protein, 441 aa, Unknown
  Bacterial polypetide isolated from the Sargasso Sea
MSEKILVPVLGESITEATVSKWLKNKGETVDADEPIVELETDKVNLEVPSPVAGKLIEINTKDGSTVKVGEILGLVTEIEGEVKKSDKIEKIQPSNLQRNGEIEEKDNVIKLDPIKEQAELGIFEEENNSNDIKEEPLVLTEEIKNSQIEENSNEESQTLSPAVRKMVNENNIDVKSVKGSGKDGRILKGDLISLMGVNPPPSERKIKYGQEERIKMTRLRQTIAKRLKQAQDNAALLTTFNEVDMTNIINMRKENQEDFQSRYGIKLGFMSFFVKACIVALKNFPAVNAEIDGDTIVYKNYYNISFAVGTDKGLVVPVLKNADELSFADIEKNIKEISEKAKDGKLVIEDLQGGTFTISNGGVYGSMLSTPILNLPQSGVLGMHNIVDRPIVVDGEIKIRPVMYLALSYDHRIIDGKESVSFLKMIKESLEDPRRLFLDI

SEQ ID NO: 114494 - protein, 400 aa, Unknown
  Bacterial polypetide isolated from the Sargasso Sea
MSIEIKSPTFPESVADGTIANWLKKEGETVNQDEVIVEIETDKVVLEVLAQSDGVITKIIKSEGDTVSSSEVIGEFKESEGAAEPVKEKVIDKPATKKTKNKKDEIVNDKTKNSGPAAKKIISEKGIDASNIKSSGKGNRITKADVINHLESKESASVLSENTTSRDDRPEKRVPMSRLRSTIAKRLVSVKQETAMLTTFNEVDMLPIKELRSKYGAEFEKEHGVKLGFMGFFVIAVVQALKKFPVVNASIDGNDVVYHGFQDIGVAVSTERGLVVPIIKDADTKSLPEIEKSILSYSEKARNGKLSIEEMQGGTFTISNGGIFGSLLSTPILNAPQTAILGMHAIQERPVAIDGEIVIRPMMYLAMSYDHRLLDGKEAVTFLVSIKEQLESPERLLLNL

SEQ ID NO: 114495 - protein, 210 aa, Unknown
  Bacterial polypetide isolated from the Sargasso Sea
QNTAAILTTFNEVDMSEIMKVRESKKEDFMERYGVKLGFMSFFVKGVVSSLQEFPAVNAEIRDENIIYKNHFDIGIAVGTEKGLVVPVLKDADAMTFGDIEQNIVELSTKAREGSLTMDDLTGGTFTISNGGVYGSMLSTPIINRPQSGILGMHNIQKRAVVVDDEIVIRPMMYLAFSYDHRIIDGKESVGFLVTIKNLLENPSKLILGV

SEQ ID NO: 114496 - protein, 413 aa, Unknown
  Bacterial polypetide isolated from the Sargasso Sea
MTEDIKSPQFPESIFEGTLSSWLKKEGDEIKQDEVLAEIETDKVVIEVTAPSDGVMEKILVEEGSTIKSSDIIGRYVKGDAPIAPEKTESTKKEPKKTAERVEKKPIKEITKTEKSETQKSAKEKGFRMGPAAKKLLNEKDVDLADVETSSKKNVVTKKDLLDAASKKPKQKENIDPIVDDNNIKRVPMTRLRSVVAKRLLESQFSTASLTTFNEVDLYEVKKLREKYRDSFEEKFGVKLGFMGMFLKASSLALQDMPIVNASIDGNDIVYHGSQDIGVAVSTEKGLVVPVVRNVQALSLAEIETAIRDYSIKARDGKIEMSDITGGTFTVSNGGVFGSLLSTPILNPPQSAILGMHKIQDRPMVVDGNIEVRPMMYLALTYDHRLLDGKDAVTFLVKIKETLESPESMILGV

SEQ ID NO: 114497 - protein, 406 aa, Unknown
  Bacterial polypetide isolated from the Sargasso Sea
MIIEMPVPSPGESISEVEIAQWLVKDGDYVEKDQTIAEVDSDKATLDLPAQESGTVTLKAQQGDTVLVGDIVCLIDTSGKKVSKKNNDLDPPSEIQKENPKVVENKSEMKENTSHSGIPSPAARKILDDKGVDYGNVKGTGRGGRISKEDALKTLPRVDVNSISKDRKVDTSKMSLLRRKLSQRLVAVKNQTAMLTTFNEVNMTPIFEIRKKYKEAFKTKHEVGLGFMSFFTKAVVSALKEFPDVHSMIDEDQQIKFDFYDISIAVSGPKGLMVPVVRDAQDLTFSGIEKEIKRLAIRARDGLITVEDMSGGTFTISNGGVFGSMLSTPILNPPQSAILGMHNIIERPIAVDGKVEIHPMMFVALSYDHRIIDGKESVGFLLKVKELLENPVEGLMNNNIKKSLEI

SEQ ID NO: 114498 - protein, 233 aa, Unknown
  Bacterial polypetide isolated from the Sargasso Sea
YGEEERIKMTRLRQTIAKRLKQAQENAALLTTFNEVDMSSVMEMRKENQEDFQSRYGVKLGFMSFFVKACVVALKNFPAVNAEIDGDEIIYKNYYNISFAVGTEKGLVVPVLRNVDELSFADIEKNIKEISEKARDGKLTIEDLQGGTFTISNGGVYGSMLSTPILNLPQSGVLGMHNIVERPVVIDGEIKIRPIMYLALSYDHRIIDGKESVSFLKMIKENLEDPRRLFLDI

SEQ ID NO: 114499 - protein, 404 aa, Unknown
  Bacterial polypetide isolated from the Sargasso Sea
MTEIRVPTLGESVTEATVATWFKKPGDSVAIDEMLCELETDKVTVEVPSTVSGILSEIVAHEGETVGLDALLGIISKGDIQPTENNNNDQKISSISNDKIQISNDTKDFENAPSAKKLMNENKINENNVVGTGRDGRVMKEDVLAVLNSESSTNRSENQLTDQIQEDEVDTSKHQERIKMSRLRMTIAKRLKEAQNTAAMLTTYNEVDMSSVMKIRSKFKEVFEKKHNVKLGFMSFFVKACCHALNEVPEVNAQIDEDHLVFNRFVNMGVAVGTPTGLVVPVIKNADKMSFAEVEKSISNLGKKARDGKLSMDDMKGGTFTISNGGVYGSLMSSPILNYPQSGILGMHKIQERPIAVDGDVVIKPMMYLALSYDHRIVDGKGAVTFLVRVKEMLEDPHRLLMDV

SEQ ID NO: 114500 - protein, 446 aa, Unknown
  Bacterial polypetide isolated from the Sargasso Sea
MSEKILVPILGESITEATVSKWLKKVGDQVEVDEAIIELETDKVNLEVPSPISGTLSEINSKDGDTVEVGAVLGSVSGGKLKIEKNESPKQEISAGTISEESEKEENTNVINLDVDKKSKKKLDDIPVMREEEPMELLDEVNEEPLLLTDEVQITKTSKINPVILSPAVRKIAVENNINVEKVKGTGRDGRILKGDLLSLMGAKPQTNQRKIQYGEEERIKMTRLRQTIAKRLKQAQENAAMLTTFNEVDMSGIMTMRKDNQDDFKSRYGIKLGLMSFFVKACVVGLKLFPAINAEIEGEDIIYKNYYNISFAVGTDKGLVVPVLRNADEMSFADIEKEIKRLSEKANSGNLSIEDLQGGTFTISNGGVYGSMLSTPILNPPQSGVLGMHNIVERPVNVNGEIKIKPIMYLALSYDHRIIDGKESVTFLKTVKENLEDPRRLFLNI

SEQ ID NO: 114501 - protein, 145 aa, Unknown
  Bacterial polypetide isolated from the Sargasso Sea
EIVFHGFKDIGVAVSTDRGLTVPIIKDADLLKISDIEKLTLKYSEKARKGKLTIEEMQGGTFTISNGGVFGSLLSTPILNAPQTAILGMHKIQDRPIAVEGKIEIRPMMYLALSYDHRIIDGKEAVSFLVHIKNEIENPANLYKE

SEQ ID NO: 114502 - protein, 259 aa, Unknown
  Bacterial polypetide isolated from the Sargasso Sea
ITKADVINHISTDIEESSVLSEFSEDDRPQKRVPMSRLRSTIAKRLVSVKQDTAMLTTFNEVDMLPIKDLRSKYGEEFEKEHGVKLGFMGFFVVAAVQALKKFPMVNASIDKNDIVYHGFQDIGVAVSTERGLVVPIIKDADTKSLSEIEKSILEYSKKAKEGKLSIDEMQGGTFTISNGGVFGSLLSTPILNAPQTAILGMHAIQERPIAIAGEIVIRPMMYLAMSYDHRLLDGKEAVTFLVSIKEQLESPERLLLNL

SEQ ID NO: 114503 - protein, 47 aa, Unknown
  Bacterial polypetide isolated from the Sargasso Sea
NGAVEIRPMMYLALSYDHRIVDGREAVTFLVKIKEIIEDPRRLILDL

SEQ ID NO: 114504 - protein, 340 aa, Unknown
  Bacterial polypetide isolated from the Sargasso Sea
MTTEIKSPTFPESVADGTIANWVKKEGDHVKQDEVIAEIETDKVVLEVVAPFDGVVSKVLKPAGETVLSAELIAEFTKEDINQASDTPKNEIIAEPEKENAIEINNEVKDSSTKNGPAVKKLLKENDLNESDIEGSGKNGRITKSDIVNHLDLPESKNKEKSISPPVKVASSSNERLEERVPMSRLRSTIANRLLTVKQETAMLTTFNEVDLKPVKDLRAKYGNEFEEEHGVKLGFMGFFVLAAVQALKKFPVVNASIDGSDIVYHGYQDIGVAVSTDRGLVVPVIRDAGNLRIADVEKSILDYSDKARHGKLSIAEMQGGTFTIYNGGVFGSLVIYSYP

SEQ ID NO: 114505 - protein, 246 aa, Unknown
  Bacterial polypetide isolated from the Sargasso Sea
MGANPQPNQRRIQYGEEERIKMTRLRQTIAKRLKQAQENAAMLTTFNEVDMSGIMAMRKDNQEDFKSRYGIKLGLMSFFVKACVVGLKLFPAINAEIEDQDIIYKNYYNISFAVGTEKGLVVPVLRNADEMSFAEIEKEIKKLSEKANIGSLTIEDLQGGTFTISNGGVYGSMLSTPILNPPQSGVLGMHNIVERPANDNGEIKIKPIMYLALSYDHRIIDGKESVSFLKTVKENLEDPRRLFLNI

SEQ ID NO: 114506 - protein, 122 aa, Unknown
  Bacterial polypetide isolated from the Sargasso Sea
IRDVDRMSIKEIGEALKKTSKLCRELKIDKKEFFGGSMTISSLGGIGGTFFTPIINPPEVAILGVGKTFDRLVKIKGKIISRKILPLSLSYDHRLIDGAEGARFCVYLSECLGKDFAFKLAV

SEQ ID NO: 114507 - protein, 204 aa, Unknown
  Bacterial polypetide isolated from the Sargasso Sea
MTTFNEVDLFEIKKLREKYRESFESKYGVKLGFMGMFIKASSIALQDMPIVNASIDGEDVVYHGFQDIGVAVSSERGLVVPVIKNVQELSIAEIEKEVRDYSIKAREGKLEMDDITGGTFTISNGGVFGSLLSTPILNPPQSAILGMHKIQDRPMVIEGKVEIRPMMYLALTYDHRLLDGKDAVSFLVKIKELLESPESMILGV

SEQ ID NO: 114508 - protein, 399 aa, Unknown
  Bacterial polypetide isolated from the Sargasso Sea
MSEEIKSPTFPESVADGTIANWVKKEGEAVSQDEVIAEIETDKVVLEVLAPSDGKISKIHKNEGETVLSAELIGEFISGDIEELKTQTVEEEKPKETAPDLESSQDRQVDKKSGPAAKRIIEEKELNPSEIQGSGKDGRITKADVISHVEKDSVIEESVKKTNVDLDRETKRVPMTRLRSTIAKRLVEVQQETAMLTTFNEVDMKPIKDIRSKYGDDFLNEHGVKLGFMGFFVAASVNALEKFPQVNASIDGTDIVYHGYKDIGVAVSTDRGLVVPVIKDADIKSISEIEKSISEYAEKARDGKLSIEEMQGGTFTVSNGGIFGSLLSTPILNAPQTAILGMHKIEDRPVVVDGEIVVRPMMYLAMSYDHRMLDGKEAVSFLVSIKEQLENPEKLLLNL

SEQ ID NO: 114509 - protein, 322 aa, Unknown
  Bacterial polypetide isolated from the Sargasso Sea
SLYAESSGVLKEILFNEQEEVKIGETIGVIDLIEHENEDSIASDLVNTNELIKGIKEEKENEKNLDPTKIKRTSLNNKIGVNDLREFIEGVSLSPSARKFINESKNEINNLNTIATNGRITKESFSNLKPDSGLNAFSENENILSNSTDVSKPLSKMRQSIAHRLKEAQNTAAMLTTFNEIDMGNVISLRAKYKEYFLKKYDTKLGFMSFFTKACISVLKEIPEVNAEIKNNNIIYKNRYDIGIAVGTDKGLVVPVLRNADKMNFAEIESSIVEYGNLAKNNKITIEHMKDGTFTISNGGVYGSMLSTSYFKSSSIRYIGFA

SEQ ID NO: 114510 - protein, 399 aa, Unknown
  Bacterial polypetide isolated from the Sargasso Sea
MSEEIKSPTFPESVADGTIANWVKKEGEAVSQDEVIAEIETDKVVLEVLAPSDGKISKIHKNEGDTVLSAELIGEFISGDSEELKTQVVKEEKPIETAPDLESSQDHLVDKKSGPAAKRIIEEKELNPSEIKGSGKDGRITKADVISHVEKDPVIEESVKKTNVDLDRETKRVPMSRLRSTIAKRLVEVQQETAMLTTFNEVDMKPIKDIRSKYGDDFLKEHGVKLGFMGFFVAASVNALEKFPQVNASIDGTDIVYHGYKDIGVAVSTDRGLVVPVIKDADIKSISEIEKSISEYAEKARDGKLSIEEMQGGTFTVSNGGIFGSLLSTPILNAPQTAILGMHKIEDRPVVVDGEIVVRPMMYLAMSYDHRMLDGKEAVSFLVSIKEQLENPEKLLLNL

SEQ ID NO: 114511 - protein, 398 aa, Unknown
  Bacterial polypetide isolated from the Sargasso Sea
MTVELIVPTLGESITEATVSKWLKKVGEPFDIDEPLVEIETDKITVEVPAPQAGSLSEIKAKEGSDIHIGGVLGIIGDSNGSKKTQTNETKNIEPKKEKIVEQNIKDNKKINKNNNKLSPSVKKMLVENNLDASSIKTQRDDGRITKEDILNHLEGKNSLKKQKSTDREEIVPMSKIRQTIATRLKESQNTAAILTTFNEVDMSAIIEIREKKNDDFKERYGVKLGFMSFFVKAAVMSLQEFPAVNAEIRENNIVYKNHFDIGIAVGTEKGLVVPVLTNADEMTFGDIEKKIVELSDKAKEGSLTMDDLSGGTFTISNGGVYGSMLSTPIINRPQSGILGMHNIQKRAVVVDDKIVARPMMYLAFSYDHRIIDGKESVGFLVKIKSLLENPSKIILGI

SEQ ID NO: 114512 - protein, 404 aa, Unknown
  Bacterial polypetide isolated from the Sargasso Sea
MSIEIKSPTFPESVADGTIAKWLKKEGDHVNQDEVIVEIETDKVVLEVLAQSDGVVSKIIKPEGEIVASSELIGEFEESDGSSITQKVQKEEKSEPNEETKLDKSNDLDNSKKMGPAAKKIISEKNIDPENIKASGKNNTITKADVINHIENKAIDKDDHNIFSESITSGEDRPEKRVPMSRLRSTIAKRLVSVKQETAMLTTFNEVDMLPIKELRAKYGAEFQEEHDVKLGFMGFFVIAAVQALKKFPVVNASIDGNDVVYHGFQDIGVAVSTERGLVVPVIKDADTKSLPEIEKAILSYSDKARNGKLSIDEMQGGTFTISNGGIFGSLLSTPILNAPQTAILGMHAIQDRPVAINGEVVIRPMMYLAMSYDHRLLDGKEAVTFLVSIKEQLESPERLLLNL

SEQ ID NO: 114513 - protein, 300 aa, Unknown
  Bacterial polypetide isolated from the Sargasso Sea
MLTDEVQTNQTTKVNPIVLSPAVRKIAAENNIDVQKVKGTGRDGRVLKGDLLSLMGTNPQPNQRRIQYGEEERIKMTRLRQTIAKRLKQAQENAAMLTTFNEVDMSSIMSMRKDNQEDFKSRYGIKLGLMSFFVKACVVGLKLFPAINAEIEGEDIIYKNYYNISFAVGTDKGLVVPVLRNADEMSFADIEKEIKRLSEKANSGNLSIEDLQGGTFTISNGGVYGSMLSTPILNPPQSGVLGMHNIVERPVNVNGEIKIKPIMYLALSYDHRIIDGKESVTFLKTVKENLEDPRRLFLNI

SEQ ID NO: 114514 - protein, 358 aa, Unknown
  Bacterial polypetide isolated from the Sargasso Sea
ADLGSVSESETKSRENQEIKKIQPTVKVDKENLIDEDDKDEEMEVFQDNVEEEKPLILTKEVEPTKAEVETKIDQTLSPAVRKIVTENKIDISSVKGSGKDGRVLKGDLINLMGVNPPPSERKIKYGQEERIKMTRLRQTIAKRLKQAQDNAALLTTFNEVDMSNVMMMRKENQDDFQNRYGVKLGFMSFFVKASIVALKNFPAINAEIEGDTIVYKNYYNISFAVGTEKGLVVPVLKNADELSFADIEKNIKEISEKAKNGKLTIEDLQGGTFTISNGGVYGSMLSTPILNLPQSGVLGMHNIVDRPIVVDGEIKIRPIMYLALSYDHRIVDGKESVSFLKMIKENLEEPRRLFLDI

SEQ ID NO: 114515 - protein, 232 aa, Unknown
  Bacterial polypetide isolated from the Sargasso Sea
PGIRRAPMSRLRKTIAVRLIEAQHNAAILTTFNEVDLYEVKSLRARYRDAFEKTHGVRLGFMSFFVKACVEALKRFPIINAAVDGSDILYHDYYDVGIAVSSPRGLIVPVLRGAEHLGLADIESSIAAFGERAKTGTLSLEDLTGGTFTITNGGVFGSMLSTPILNPPQSAILGMHKIQDRPVALNGDVVIRPMMYLALSYDHRIIDGSDAVSFLVAIKDALEDPARLLLEV

SEQ ID NO: 114516 - protein, 257 aa, Unknown
  Bacterial polypetide isolated from the Sargasso Sea
SDGRINKEDVVSHLSSSNKTTTNKGEREEVVKMSKIRQTISKRLKEAQNTAAILTTFNEIDMSKVMEIRKSKNQEFQSRYEVKLGFMSFFVKAVVKSLQEYPAVNAEIKDENIIYKNHFDIGIAVGTEKGLVVPILKDADQLSFGEIETKILDLSTKAKDGTLTMDDLTGGTFTISNGGVYGSMLSTPIINRPQSGILGMHNIQKRAVVVTDEIVIRPMMYVALSYDHRIIDGKESVGFLVKVKELLEDPSELVLGI

SEQ ID NO: 114517 - protein, 290 aa, Unknown
  Bacterial polypetide isolated from the Sargasso Sea
KIEQNKIDEISITPLARNIASDKGIDINEIHSKGDKITKDDVLKVFPAMGSSNHEGRIEKREKLSMLRRKVSERLVSVKNETAMLTTFNEADLSNIFNLRKKYKEAFSQKHGVSLGFMSFFTKAVTRALELYPDVNSMIDGNEKISYNYSDISIAVSGPKGLMTPVLRNAQDLSFAAVEQEIKRLADNVRDKSITVDDLTGGTFTISNGGVFGSMLSTPIINPPQSGILGMHNIIQRPIAVEGKVEIRPMMYLALSYDHRIIDGNQSVGFLIAVKEGVENPENIFNGWKN

SEQ ID NO: 114518 - protein, 235 aa, Unknown
  Bacterial polypetide isolated from the Sargasso Sea
FGPAERIKMTKLRQTIAKRLKEAQQTTAMLTTFNEVDMSNIINMRKENQEDFQNKFGVKLGFMSFFVKASIVALKLFPAINAEIEDQDIIYKNYYNISIAVGTEKGLVVPVIKNADELSFADIEKSIKSLSDKAQQGKITIEDLQGGTFTISNGGVYGSMLSTPILNLPQSGVLGMHNITERPIVVDGEVKIRPVMYLALSYDHRIIDGKDSVSFLKTIKENLENPGRLLKYLNV

SEQ ID NO: 114519 - protein, 257 aa, Unknown
  Bacterial polypetide isolated from the Sargasso Sea
GVGGRLTKADVLAAIKTPQPALPANTTSGGLVAANTPRSTPRDVDAAREERVPMSKLRQVIASRLKAAQNNAAMLTTFNEVDMSAVMKLRADYKDAFAATHEVRLGFMGVFVQAATLALREFPAVNAEIDGTDIIYKNYYNIGVAVGTPQGLVVPVIKDAGEMSLADTERVISDFGFRARDGKITPDEMAGGTFTISNGGVYGSMMSTPILNPPQSGILGMHKIQKRAVVIDDQIVARPMMYLALSYDHRIIDGREA

SEQ ID NO: 114520 - protein, 305 aa, Unknown
  Bacterial polypetide isolated from the Sargasso Sea
IEPLILTDEIETEKKNKTQINSNLSPAVRKLVEEKSIDVSKIQGTGRDGRILKGDLINLMSSKPSPNQKKLERGQEERVKMTRLRQTIAKRLKEAQNSAAMLTTFNEVDMSAIIQMRKENQDDFQKNFGIKLGFMSFFVKACVLGLKLYPSINAEVDNDHIIYKNYYNISFAVGTERGLVVPVLKDADDLSFAEIEKNIKEISEKARDGNLTIEDLQGGTFTISNGGVYGSMLSTPILNPPQSGVLGMHNIIERPIVVDGQIQIRPVMYLALSYDHRIIDGKDSVSFLKTVKENLEDPRRLFLNI

SEQ ID NO: 114521 - protein, 256 aa, Unknown
  Bacterial polypetide isolated from the Sargasso Sea
VLKVVPAMGSSNHEGRIENREKLSMLRRKVSQRLVSVKNETAMLTTFNEADLSKIFDLRKKYKEAFSQKHGVSLGFMSFFTKAVTRALKLYPDVNSMIDGNEKISYNYSDISIAVSGPKGLMTPVLRNAQELSFAAVEQEIKRLADNVRNKSTTVDDLTGGTFTISNGGVFGSMLSTPIINPPQSGILGMHNIIQRPIAVDGKVEIRPMMYLALSYDHRIIDGNQSVGFLIAVKEGVEDPENILMDGKVKKYLGLN

SEQ ID NO: 114522 - protein, 270 aa, Unknown
  Bacterial polypetide isolated from the Sargasso Sea
KIDIESIQGSGKHGLVLKEDVMSLMGVKPQPSERKIAHGPEERIKMTRLRLTIAKRLKEAQENAAMLTTFNEVDMSEVIKMRNDYKEDFQKKYSAKLGFMSFFVKACIIGLKNYPAINAEIQGDEIVYKNYYNISIAVGTDKGLVVPVVKNSDELSFADIEKNISKLGQKAKDGKITIEDLQGGTFTITNGGIYGSMLSTPILNPPQSAVLGMHNIVERPLVVDGEVKIRPIMYLALSYDHRIIDGKEAVSFLKIVKDSLEQPKRLFINL

SEQ ID NO: 114523 - protein, 239 aa, Unknown
  Bacterial polypetide isolated from the Sargasso Sea
SANAASNREERYQLITPIRQRIAERLVEAQHDAALLTTFNEVDMSAVKALRGKFKDQFLDRYGVKLGFMSFFVRAVVEALRAVPQVNAEFREPHIVYRDYYDIGIAVGGGKGLVVPVIRNAEMLSFAQIETTIGDFAQRAGANKLKLEELQGGTFTISNGGVYGSMLSTPIINPPQSGILGLHAIQDRPVAVNGQVVVRPMMYLALTYDHRLVDGREAVTFLKRIKDTIEDPSRLMLEV

SEQ ID NO: 114524 - protein, 272 aa, Unknown
  Bacterial polypetide isolated from the Sargasso Sea
ENKINLDEVKGTGKDGRILKGDLISLMGTNPQPNERKIQYGEEERIKMSRLRQTIAKRLKEAQNNAAMLTTFNEVDMSNIISMRKDNQEDFQNSYGIKLGFMSFFVKACIVGLKLFPAINAEVENDEMVYKNYYNVSFAVGTEKGLVVPVLKNADEMSFADIEKNIKDLSDKAKNGSLTIEDLQGGTFTISNGGVYGSMLSTPILNPPQSAVLGMHNIVERPVVVDGEIKARPVMFLALSYDHRIIDGKESVSFLKTVKENLEDPRRLFLNL

SEQ ID NO: 114525 - protein, 225 aa, Unknown
  Bacterial polypetide isolated from the Sargasso Sea
MTRLRAVVADRLLESQAQTASLTTFNEVDLFEVKKLREKYKEDFEKKYGVKLGFMGLFLKASSIALQEMPIVNASIEGTDIIYHGFQDIGVAVSTERGLVVPVIRNVSNMSIAEIESSIKDYSIKARDGKLSIDDMMGGTFTVSNGGVFGSLLSTPILNPPQSAILGMHKIQDRPMVVDGNIEIRPMMYLALTYDHRLLDGKDAVSFLVKIKESLESPESMMLGI

SEQ ID NO: 114526 - protein, 144 aa, Unknown
  Bacterial polypetide isolated from the Sargasso Sea
AVSSPKGLMVPVVRNAELLDFAGIESEIKRLAIKARDGKISMDDMLGGTFTITNGGVFGSMLSTPIINPPQSAILGMHNIVERPVVVEGQVVIRPIMYVALSYDHRIIDGRESVSFLCAVKEALENPVDILLDGEDQIVKSLNL

SEQ ID NO: 114527 - protein, 252 aa, Unknown
  Bacterial polypetide isolated from the Sargasso Sea
DTSDLKGTGRGGRITKNDAVNAIPSMGSKPEWGDREQKRSKLSMLRRRVAERLVDAKNETAMLTTFNEVDMDAVFKVRNKHKDDFLKKHGVKLGFMSFFTKAVVRALKLYPDVNSMMDGDYKISYDYCDISVAVSGPKGLMVPVVRNAELLSFSGIEQEIGHLAIKAREGKITVDDMTGGTFTISNGGVFGSMLSTPIINPPQSGILGMHNIVQRPIAIEGEVVIRPMMYLALSYDHRIIDGRESVGFFGGH

SEQ ID NO: 114528 - protein, 309 aa, Unknown
  Bacterial polypetide isolated from the Sargasso Sea
NNDSQELLVNSELSPAVRRLVEEHKLDPNSISGSGKDGRLTKGDILRNLVSKDNSQKNNYPSADSISNNNIPNSKEHEREKRVPMSKIRKIIAHRLKEAQNTAAMLTTFNEVDMSAVINIRNEFKDDFVKNHNIKLGFMSFFVKASIISLEEFPAVNAEIVNDEIVYKNYYNIGVAVGTPQGLVVPVLKNAQEKNIAQIESEIANFANKARQGKLLPSDLNAGTFTISNGGIYGSLMSTPILNRPQSGILGMHKIQKRPVAINDKIEIRPMMYLALSYDHRIIDGREAVSFLIRIKESIEDPRRILLNI

SEQ ID NO: 114529 - protein, 289 aa, Unknown
  Bacterial polypetide isolated from the Sargasso Sea
RNINLSPAVRKIVTEKNIDINKIKGTGRDGRILKGDLIALMGENPQPNKRKIQYGEEERIKMTRLRQTIAKRLKEAQENAAMLTTFNEVDMSGIISMRKENQEDFQNRYNIKLGFMSFFVKACVVGLKLFPAINAEIEEQDIIYKNYYNISFAVGTEKGLVVPVLKNADEMSFSDIEKEIKKLSDKAKNGSLTIEDLQGGTFTISNGGVYGSMLSTPILNPPQSGVLGMHNIVERPVSENGELKIKPIMYLALSYDHRIIDGKDSVSFLKTFKENLEDPKKIIFKYLKC

SEQ ID NO: 114530 - protein, 258 aa, Unknown
  Bacterial polypetide isolated from the Sargasso Sea
HGMVMKGDLLDLMGSKPSPNLKKIKDGPEERIKMTRLRLTIAKRLKEAQNNAAMLTTFNEVDMFNIKEIRKNYQEEFQKKYSVKLGFMSFFVKACISALKNYPAINAEIQDEEIVYKNYYNISFAVGTDRGLVVPVLRNPDEMSFADIEKNILALGEKAREGKITINDLQGGTFTITNGGIYGSMLSTPILNPPQSGVLGMHNIIERAVVVDGSITIRPMMYLALSYDHRIVDGKEAVSFLKNIKDSLEEPKRLFLNV

SEQ ID NO: 114531 - protein, 175 aa, Unknown
  Bacterial polypetide isolated from the Sargasso Sea
KLGFMSFFVKACVASLKNFPAINAEIQGDTIVYKNYYNISFAVGTDRGLVVPVLRSPDEMSFAEIEKNILSLGEKARDGKITIEDLQGGTFTITNGGIYGSMLSTPILNPPQSGVLGMHNIVERAVVKDGEIIIRPMMYLALSYDHRIVDGKEAVSFLKNVKDSLEEPQRLFLNV

SEQ ID NO: 114532 - protein, 263 aa, Unknown
  Bacterial polypetide isolated from the Sargasso Sea
KGAGKDGRILKGDLINLMGTSPKPSERKIKYGQEERIKMTRLRMTIAKRLKEAQETAAMLTTFNEVNMSSINQIRNDHQEDFQNRYGIKLGFMSFFVKACVVGLKNFPAINAEIDSGDIVYKNYYNISFAVATDKGLVVPVLKNADELSFADIEKNIKSMAEKARNGKLTIEDLQGGTFTISNGGVYGSMLSTPILNAPQSGVLGMHNIIERPISVDGEIKVCPMMYLALSYDHRIIDGKDSVSFLKSIKENLEDPRKLFLDL

SEQ ID NO: 114533 - protein, 248 aa, Unknown
  Bacterial polypetide isolated from the Sargasso Sea
MGVKPAPSDRKIAHGPEERIKMTRLRLTIAKRLKEAQENAAMLTTFNEVNMHEVIQMRNNYKEEFQKKYFVKLGFMSFFVKACIIGLKNYPAINAEIQGDEIVYKNYYNISIAVGTDKGLVVPVIRNSDELSFADIEKNIGMLGQKARDGKITIEDLQGGTFTITNGGIYGSMLSTPILNPPQSAVLGMHNIIERPVVEDGEVKIKPIMYLALSYDHRIIDGKEAVSFLKIVKDSLEQPRDYFLIFNS

SEQ ID NO: 114534 - protein, 290 aa, Unknown
  Bacterial polypetide isolated from the Sargasso Sea
AKYIPPKTKKHLSPAVRKIVEENNINLSKVEGTGKSGRISKGDLINLMGNIPEPSKRKISHGPEERVKMTRLRATIAKRLKEAQENAAMLTTFNEVDMQSIMEMRKDYQEDFQKKYSVKLGFMSFFVKATVVALKNFPAVNAEIEGDHITYKNYYNISIAIGTDKGLVVPVLKNADELSFADIERNIFLLSEKARSGKITINDLQGGTFTISNGGIYGSLLSTPILNPPQTGILGMHNIVERPVAINGSVVIRPMQYLALSYDHRIIDGKEAVSFLKPSKNVLRNHVDYF

SEQ ID NO: 114535 - protein, 297 aa, Unknown
  Bacterial polypetide isolated from the Sargasso Sea
EIKKVDTTKKKVNLNLSPAVRKIVEDKKIDVSKIHGTGREGRILKGDLINLMSSRPSPNQRKLEKGLEERVKMTRLRQTIATRLKEAQNSAAMLTTFNEVDMSAIIQMRKDNQEDFQNIYGIKLGFMSFFVKACVLGLKLYPSINAEVDNDHIIYKNYYNISFAVGTEKGLVVPVLRDADELSFADIEKNIKAISEKARDGNLTIEDLQGGTFTISNGGVYGSMLSTPILNPPQSGVLGMHNIIERPIAVNGKIEIRPVMYLALSYDHRIIDGKDSVSFLKTIKENLEDPRRLFLNI

SEQ ID NO: 114536 - protein, 248 aa, Unknown
  Bacterial polypetide isolated from the Sargasso Sea
SLMGSKPSPSERKIKYGPEERVKMTRLRLTIAKRLKEAQENAAMLTTFNEVDMSEVMKMRSQYKEEFQTKYGVKLGFMSFFVKACVIGLKNYPAVNAEIQGEEIVYKNYYNISIAVGTDRGLVVPVLRETDEMSFADIEKNIGELGQKARDGKITIEDLQGGTFTITNGGIYGSMLSTPILNPPQSAVLGMHNIIQRPVIVEGNVEARPIMYLALSYDHRIIDGKEAVSFLKIVKESLEQPKRLFLNI

SEQ ID NO: 114537 - protein, 299 aa, Unknown
  Bacterial polypetide isolated from the Sargasso Sea
LKIISPPKKKNKVIKEAKEDVLNLVEEKKETESIETQEEEALVLDNFHEERKIKESPKAKIQKPSVSPAARKIAEENKVDLNKVEGSGKHGVILKEDIMSLMGSKPSPSERKIKHGPEERIKMTRLRLTIAKRLKEAQENAAMLTTFNEVDMSEVIAMRNQYKEEFQNKYAVKLGFMSFFVKACVIGLKNFPAINAEIQNDEIVYKNYYNISIAVGTDRGLVVPVLRETDEMSFADIEKNIGQLGEKARNGKITIDDLQGGTFTITNGGIYGSMLSTPILNPPQSAVLGMHNIVQRAVV

SEQ ID NO: 114538 - protein, 261 aa, Unknown
  Bacterial polypetide isolated from the Sargasso Sea
MALDEEPLILDTAHNENLREKKRETIDKDLRVSPAARKIASEKNIDLKSIKGSGKNGIVLKEDVISLMGVKPAPSERKTVHGPEERIKMTRLRLTIAKRLKEAQENAAMLTTFNEVNMHEIIKMRHDYKEDFQNKYSVKLGFMSFFVKACIIGLKNYPAINAEIQGDEIVYKNYYNISIAVGTDKGLVVPVVKNSDELSFAEIEKNINALGQKARDGKIMIEDLQGGTFTITNGGIYGSMLSTLNFKPTTICSSRNAQYSE

SEQ ID NO: 114539 - protein, 221 aa, Unknown
  Bacterial polypetide isolated from the Sargasso Sea
ARIAERLLGATQQTAMLTTFNEVNMAPLMKLRRQYRDEFESVHNGTRLGFMGFFVKAACEALKRFPEVNASIDGNDVVYHGYQDIGVAVSVEEGLVVPVLRDADFMSIADVEAAIANFGAKARDKKLTIEDMTGGTFTVSNGGVFGSLLSTPILNPPQTGILGMHTIQERPIAMDGEVVIQPMMYLALSYDHRLVDGRTAVQFLVNIKGLIEDPARILLQL

SEQ ID NO: 114540 - protein, 261 aa, Unknown
  Bacterial polypetide isolated from the Sargasso Sea
MGKNGVILKEDIMNLMGLKPSPSERKINHGPEERVKMTRLRLTIAKRLKEAQENAAMLTTFNEVDMSEVINMKNLYKEEFQNNYGVKLGFMSFFVKACVIGLKNFPAVNAEIQGDDIVYKNYYNISIAVGTDRGLVVPVLRETDEMSFADIEKNIGNLGQKARDGKITIEDLQGGTFTITNGGIYGSMLSTPILNPPQSAVLGMHNIIERPVVVNGNVEVRPVMYLALSYDHRIIDGKEAVSFLKIVKESLEQPKRLFLNI

SEQ ID NO: 114541 - protein, 175 aa, Unknown
  Bacterial polypetide isolated from the Sargasso Sea
KLGFMSFFVKAVVHALKAVPGLNVRIEGSDLIENHYFDVGVAVGTEKGLVVPVLRDCDALSFAQIEQGIVEYAEKARSGGITLEDMQGGCFTITNGGIYGSMLSTPILNPPQSGILGMHAIQERAVVRNGEVVARPMMYLALSYDHRVVDGKEAVTFLVRIKEAIEDPARLALGI

SEQ ID NO: 114542 - protein, 284 aa, Unknown
  Bacterial polypetide isolated from the Sargasso Sea
ITIEKRVSPSARKIAKEKNINLEDIQGSGKHGIILKGDLIGLMGSKPAPNIKKIQQGPEERIKMTRLRLTIAKRLKEAQNNAAMLTTFNEVNMSSIMEIRKNYQEEFQKKYLVKLGFMSFFVKACIAGLKNYPAINAEIQNEDIVYKNYYNISFAVGTDRGLVVPVLRSPDEMSFADIEKNILALGEKARNGKITINDLQGGTFTITNGGIYGSMLSTPILNPPQSGVLGMHNIVERPVVIDGEIKIQPIMYLALSYDHRIVDGKEAVSFLKNVKDSLEEPKRL

SEQ ID NO: 114543 - protein, 218 aa, Unknown
  Bacterial polypetide isolated from the Sargasso Sea
IAKRLKEAQENAAMLTTFNEVNMSGIISMRKENQDDFQSRYGIKLGFMSFFVKACVVGLKLFPEINAEIEGQDIVYKNYYNISFAVGTEKGLVVPVLRNADEMSFADIEKEIKKFSDKAKNGTLTIEDLQGGTFTISNGGVYGSMLSTPILNPPQSGVLGMHNIVERPIVQDGEVKIKPIMYLALSYDHRIIDGKDSVSFLKTVKENLEDPRRLFLNI

SEQ ID NO: 114544 - protein, 231 aa, Unknown
  Bacterial polypetide isolated from the Sargasso Sea
MEERVKMTRLRLTIAKRLKEAQENAAMLTTFNEVDMSEVMAMRSQYKNEFQNKYGVKLGFMSFFVKACVIGLKNYPAINAEIQGEEIVYKNYYNISIAVGTDRGLVVPVLRETDEMSFADIEKNIGELGQKARDGKITIEDLQGGTFTITNGGIYGSMLSTPILNPPQSAVLGMHNIIQRPVAVEGNVEIRPVMYIALSYDHRIIDGKEAVSFLKIVKESLEQPKRLFLNI

SEQ ID NO: 114545 - protein, 236 aa, Unknown
  Bacterial polypetide isolated from the Sargasso Sea
MKISKQEERVPMSRLRKAIAKRLKEAQNNAAMLTTYNEVDMTEVMKIRSNFQPDFEKKHSVKLGFMSFFVKASIQALKEFPAVNAEINNEEIIYKNYYNIGVAVGTSEGLVVPVLKNAEHMSFPEIEKNIVSFGTKAREGSITISDMSDGTFTISNGGIYGSLMSSPILNPPQSGILGMHKIQKRPIAINDKIEIRPMMYLALSYDHRIIDGREAVSFLVKVKENIEDPQRILIGV

SEQ ID NO: 114546 - protein, 240 aa, Unknown
  Bacterial polypetide isolated from the Sargasso Sea
PTKRKITHGPEEKIKMTRLRMTIAKRLKEAQNNAAMLTTFNEVDMSKVIQMKNDYKNEFIKKYSTKLGFMSFFVKACVTALKNYPAINAEIQGDSIVYKNYYNISFAVGTEKGLVVPVLRSPDEMSFAEIEKNILSLGEKARDGKISIEDLQGGTFTITNGGIYGSMLSTPILNPPQSGVLGMHNIIERAVVKDGQIIIRPMMYLALSYDHRIVDGKEAVSFLKNIKDYLEEPQRLFLNV

SEQ ID NO: 114547 - protein, 255 aa, Unknown
  Bacterial polypetide isolated from the Sargasso Sea
VENKINLDEVKGTGKDGRILKGDLISLMGANPQPNERKIQYGEEERIKMSRLRQTIAKRLKEAQNNAAMLTTFNEVDMSNIISMRKDNQEDFQNSYGIKLGFMSFFVKACIVGLKLFPAINAEVENDEMVYKNYYNVSFAVGTEKGLVVPVLKNADEMSFADIEKNIKDLSDKAKNGSLTIEDLQGGTFTISNGGVYGSMLSTPILNPPQSAVLGMHNIVERPVVVDGEIKARPVMFLALSYDHRIIDGKESVSF

SEQ ID NO: 114548 - protein, 246 aa, Unknown
  Bacterial polypetide isolated from the Sargasso Sea
MGENPEPNQRKIQFGEEERIKMTRLRQTIAKRLKEAQENAAMLTTFNEVDMSGIISMRKENQEDFQNRYNIKLGFMSFFVKACVVGLKLFPAINAEIEGQEIIYKNYYNISFAVGTERGLVVPVLKNADEMSFADIENEIKKLSDKAKNGSLTIEDLQGGTFTISNGGVYGSMLSTPILNPPQSGVLGMHNIVERPVSVKGEIKIKPVMYLALSYDHRIIDGKDSVSFLKTVKENLEDPRRLFLNI

SEQ ID NO: 114549 - protein, 304 aa, Unknown
  Bacterial polypetide isolated from the Sargasso Sea
MGPAVRALLDEHGLSPENIVATGKGGRLLKEDVLSHLRQAPVQPAPESSAPASPAATPGAVVLNVDGPTSERIEKRVPMTRMRARIAERLLGATQQTAMLTTFNEVNMAPLMKLRRQYRDEFESVHNGTRLGFMGFFVKAACEALKRFPEVNASIDGNDVVYHGYQDIGVAVSVDEGLVVPVLRDADFMSIADVEAAIASFGSKARDKKLTIEEMTGGTFTVSNGGVFGSLLSTPILNPPQTGILGMHTIQERPIAMDGEVVIQPMMYLALSYDHRLVDGKTAVQFLVTIKGLIEDPARILLQI

SEQ ID NO: 114550 - protein, 328 aa, Unknown
  Bacterial polypetide isolated from the Sargasso Sea
AEATVLEWRIGIDHPIHRDDIIVELETDKVVLEVPAPADGKLIEIRCPSGAVVTSEDILGLFEAGQIAVENAAPESATEITSLPTAPDPEPAESLDLPPPTVQPAAPTTQETSSVATPSLGERGIRREPMSRLRQTIANRLLDAQHSAAILSTFNEVDLSGVIDLRRRYGEAFETRYNVRLGYMSFFVRACVEALQAFPLVNAQIDGADVVYYDYFDIGIAVSSPRGLVVPVLRNASDKRFSEIEQEIADFGNKANSGSLAMEELTGGTFTITNGGVFGSLLSTPILNPPQSGILGMHKIQQRPIAMGDEVVIRPMMYLALSYDHRLV

SEQ ID NO: 114551 - protein, 271 aa, Unknown
  Bacterial polypetide isolated from the Sargasso Sea
TKINLETVHGSGKDGRILKGDLMSLMSTTPQPSERKIKYGQEERIKMTRLRLTIAKRLKQAQENAAMLTTFNEVDMTNIISMRKENQDDFQSRFGIKLGFMSFFVKACILGLKSFPAINAEIDGEDIVYKNYYNISFAVGTNKGLVVPVLKNADEMSFAEIEKNIKAVSDKARDGNLTIEDLQGGTFTISNGGVYGSMLSTPILNPPQSGVLGMHNIVERASVVNGEIKIRPIMFLALSYDHRIIDGKEAVSFLKLVKELLEDPRRLFLNI

SEQ ID NO: 114552 - protein, 312 aa, Unknown
  Bacterial polypetide isolated from the Sargasso Sea
EPIQKDINLSPAVRKIVDEKKIDISRIKGTGRDGRILKGDLVTLMGENPQSNQRKIQFGEEERIKMTRLRQTIAKRLKEAQENAAMLTTFNEVDMSGIISMRKENQEDFQNRYNIKLGFMSFFVKACVVGLKLFPAINAEIEGQDIIYKNYYNISFAVGTERGLVVPVLKNADEMSFADIEKEIKILSDKAKNGSLTIEDLQGGTFTISNGGVYGSMLSTPILNPPQSGVLGMHNIVERPIIENGEIKIKPIMYLALSYDHRIIDGKDSVSFLKTVKENLEDPRRLFLNILMSEKFDVTIIGWWSRWICLCH

SEQ ID NO: 114553 - protein, 229 aa, Unknown
  Bacterial polypetide isolated from the Sargasso Sea
ERIKMSRLRQTIAKRLKEAQENAAMLTTFNEVDMTNIIEMRKNNQEDFKKRFGIKLGFMSFFVKACVLGLKAFPAINAEIEGQEIIYKNYYNISFAVGTEKGLVVPVIRNADELSFAEIEKNIKIISEKAREGKLTIEDLQGGTFTISNGGVYGSMLSTPILNPPQSGVLGMHNIVERPIAIDGEIEIRPVMYLALSYDHRIIDGKDSVSFLKLIKENLEDPRKLFLDL

SEQ ID NO: 114554 - protein, 201 aa, Unknown
  Bacterial polypetide isolated from the Sargasso Sea
FNEVDMGELIRTRNEHKDAFESKYGIKLGFMSFFVKACITALKDIPEVNAEVENNDVVYKNFYNIGVAVGTDQGLVVPVIRDADQKSIVEIEQEIFNLGQKARTGKLSIDDMQGGTFTISNGGVYGSLMSTPILNPPQSGILGMHKIEERPIAVDGDIVIRPMMYLALSYDHRIVDGKGAVTFLVRVKESLEDPNRILLGV

SEQ ID NO: 114555 - protein, 294 aa, Unknown
  Bacterial polypetide isolated from the Sargasso Sea
MEDEKKEDEPLILEQVHEEKKKSSKPIFKKEEAQVSPAARKMASEAKIDLEQVKGTGKNGIILKEDVMALMGSKPAPSERKIKYGPEERVKMTRLRLTIAKRLKEAQENAAMLTTFNEVDMSEVMSMRNQYKEEFHKNYGVKLGFMSFFVKACVIGLKNFPAINSEIQAEEIVYKNYYNISIAVGTDRGLVVPVLRETDEMSFADIEKNIASLGQKARDGKITIEDLQGGTFTITNGGIYGSMLSTPILNPPQSAVLGMHNIVERPVVINGNVEVRPVMYLALSYDHRIVDGKE

SEQ ID NO: 114556 - protein, 246 aa, Unknown
  Bacterial polypetide isolated from the Sargasso Sea
MGSKPSPSERKIKHGPEERVRMTRLRLTIAKRLKEAQENAAMLTTFNEVDMSEIMKMRSHYKEDFQNKYGVKLGFMSFFVKACVIGLKNYPAINAEIQDEEVVYKNYYNISIAVGTDRGLVVPVLRETDEMSFADIEKNIGELGQKARDGKITIEDLQGGTFTITNGGIYGSMLSTPILNPPQSAVLGMHNIIQRPVVINGNVEVRPVMYLALSYDHRIIDGKEAVSFLKIVKESLEQPKRLFLNI

SEQ ID NO: 114557 - protein, 91 aa, Unknown
  Bacterial polypetide isolated from the Sargasso Sea
ISNGGVFGSMLSTPIINPPQSGILGMHNIINRPVAIGENIEIRPMMYLALSYDHRIIDGNQSVGFLIAVKEGVEDPINVLMDGNIEKSLAI

SEQ ID NO: 114558 - protein, 271 aa, Unknown
  Bacterial polypetide isolated from the Sargasso Sea
MSQPEKKESPDQIVSLEKEMAHTEPSSSDASVSLNSDERVERRVAMTRMRATTAKRLVEAQHNAAMLTTFNEVDMSPVMALRKQYQEEFQAAHNGTRLGFMSFFVRAATESLKRFPAVNASIDGNDIVYHGYFDIGVAVSTDRGLVVPVVREADALSLAQIEDQINEYGEKARAGKLSLEELSGGTFTISNGGIFGSLMSTPILNAPQTGVLGMHKIQERPVVVDGEIVVRPMMYLALSYDHRLIDGREAVQFLVAIKGMIEDPARILLEL

SEQ ID NO: 114559 - protein, 207 aa, Unknown
  Bacterial polypetide isolated from the Sargasso Sea
DTAMLTTFNEIDMSAVVKLRSQNKDSFLKKHKVKLGYMSLFTKACTEALELFPALNARIDSNEIVFHDYVDMGIAVSAPKGLMVPVVRNAESLSLSQIEVEIARLAESARENKLSINEMEGGTFSITNGGVFGSMLSTPIINPPQSAILGMHNIVERPVATNGKIEIRPMMYVALSYDHRIIDGQQSVSFLVKVKENLENPARMLLS

SEQ ID NO: 114560 - protein, 124 aa, Unknown
  Bacterial polypetide isolated from the Sargasso Sea
FCGQNADELTVADIEKEISSLGKKARDGKLSISDMQDGTFTISNGGVYGSLMSTPIINPPQSGVLGMHKIQERPIAIDGEIKIRPMMYLALSYDHRLIDGKAAVTYLVRVKESLEDPRRILLSV

SEQ ID NO: 114561 - protein, 311 aa, Unknown
  Bacterial polypetide isolated from the Sargasso Sea
KFVEGAASGASAPAASSESDDSDESSDALSPSVRRLLAEKGVDAAKVKGTGKNGRITKEDVEKYLKGGDSSAKAAPAASESVSADLPTGNRTEKRVPMTRLRKTIANRLLEAKNSTAMLTTFNEVNMKPIMDLRKQYQDSFEKRHGIRLGFMSFYVKAVTEALKRFPEVNASIDGDDIVYHNYFDVSIAVSTPRGLVTPVLKDTDTLGMAGVEKGIKELALKGRDGKLSLAELQGGNFTITNGGVFGSLMSTPIINPPQSAILGMHKIQDRPMAVNGKVEILPMMYLALSYDHRIIDGKESVGFLVTVKRC

SEQ ID NO: 114562 - protein, 237 aa, Unknown
  Bacterial polypetide isolated from the Sargasso Sea
EKIKYAPEERIKMTRLRQTIAKRLKEAQENAAMLTTFNEVDMSEVISMRNQYKDEFLNKYGVKLGFMSFFVKACVIGLKNFPAINAEIQGDEIVYKNYYNISIAVGTDRGLVVPVLRETDEMSFADIEKNIGDLGQKARDGKITIEDLQGGTFTITNGGIYGSMLSTPILNPPQSAVLGMHNIVQRPVVVDGSVEPRPVMYLALSYDHRIIDGKEAVSFLKIVKDSLEKPQRLFLNI

SEQ ID NO: 114563 - protein, 248 aa, Unknown
  Bacterial polypetide isolated from the Sargasso Sea
YYEERLSLNENSLVITEREQKIPMTKVRKIIAQRLKEAQNTAAMLTTFNEVDMSAVIKLRNDYKEDFFKNYNVKLGFMSFFVKASIIALQEFPAVNAEIVQEDILYKNYYNIGVAVGTPKGLVVPVLKEAQDMNIAKIENEISNFAIKSREGKLSPSDLSGGTFTISNGGVYGSLMSTPILNKPQSGILGMHKIQKRPIAIDDKIEIRPMMYLALSYDHRIIDGREAVSFLVRIKESIEDPRRILLDI

SEQ ID NO: 114564 - protein, 368 aa, Unknown
  Bacterial polypetide isolated from the Sargasso Sea
ELETDKVTLEVPSPSAGIISNVFFSEGDSVEVENVLAVLDDLAIPTRVDEPKNLNNNLPQENKFTDSTNNTDFSPAVRRLIEEHKLNPSSIKGTGKGGRLTKGDILANIVSKDNIELKKETQPQSISNNNDPISRHEREERVPMSKVRKIIAHRLKEAQNTAAMLTTFNEVDMSAVINLRKQFKEDFIKNHNIKLGFMSFFVKASIISLEEFPAVNAEIVNEEIVYKNYYNIGVAVGTPQGLVVPVLKEAQDKNIAQIETEIANFATKSREGKLLPSDLTGGTFTISNGGIYGSLMSTPILNRPQSGILGMHKIQNRPIAIGDKIEIRPMMYLALSYDHRIIDGREAVSFLIRIKESIEDPRRILLNI

SEQ ID NO: 114565 - protein, 351 aa, Unknown
  Bacterial polypetide isolated from the Sargasso Sea
SVKEGTTVEVGTLLGSVGANDTKPVTEKKEKKYTPPPKKEKSIPIYNEEPKKNEEVVEINKPISNGKETLILNEAEEEETPLILDQEHKTEKIKKTEIKTASPSARKIAQDKNISLDQIEGSGRRGMVLKEDLINLMGTKPTPNLKKTKDGPEERIKMTRLRLTIAKRLKEAQNNAAMLTTFNEVDMHNIMEIRKNYQEEFKKKYSVKLGFMSFFVKASIAALKNYPAINAEIQDEEIVYKNYYNISFAVGTEKGLVVPVLRNPDEMSFADIEKNIANIGEKARNGKLTINDLQGGTFTITNGGIYGSMLSTPILNPPQSGVLGMHNIIDRAVVINGEIKIRPMNVFSAIL

SEQ ID NO: 114566 - protein, 361 aa, Unknown
  Bacterial polypetide isolated from the Sargasso Sea
MKNITVPELGESIIEGTLTSWLIKEGDSFESGDNLAEIETEKITIEIPAQTSGKLTKIITPEGSTVNVGQSIAEISENTTTEQKPKPETSQIEEINEEKQTIDPSNVSKVSENLTKTPAKVVDLPNFDKDDSTLDEKTIPMSKLRQTIARRLKEAQNTAAILTTFNEVDMSAIMSLRKKEQTSFQKKHGVKLGIMSFFVKACTEVLKEIPEINSEIHEDKIIYKNYFDIGIAIGSEKGLVVPIIRNAGDLSNAEIEKYIIELSEKANSNKLAMSDLSGGTFSITNGGIYGSMMSTPIINPPQSAILGMHSIIDRPIAVKKKIVIKPMMYIALSYDHRLIDGKQAVTFLVRLKELLENPKII

SEQ ID NO: 114567 - protein, 345 aa, Unknown
  Bacterial polypetide isolated from the Sargasso Sea
ENKISVDINKKKETQKIKNIIKPDIEKKLEQKNNVEPLILNNEEPLVLTNEVVEKKISISNKVLSPAVRKMVAEKKINIDQVKGTGKDGRILKGDLISQMGFNPQPNQRKIQYGEEERIKMTRLRQTIAKRLKEAQENAAMLTTFNEVDMSGIISMRQENQEDFQNRYGIKLGFMSFFVKACVVGLKLFPAINAEVESQDIVYKNYYNISFAVGTEKGLVVPVLRNADEMSFADIEKEIKRLSDKAKNGTLAIEDLQGGTFTISNGGVYGSMLSTPILNPPQSGVLGMHNIVERPIAYNGEVKIKPIMYLALSYDHRIIDGKDSVSFLKTVKENLEDPRRLFLNI

SEQ ID NO: 114568 - protein, 423 aa, Unknown
  Bacterial polypetide isolated from the Sargasso Sea
MSTEIKVPSLGESVVEATVAKWYKNQGDHVAIDEPLVELETDKVTLEVPSPCGGQLKIISAKEGETVEVGALLGQITEGEVDNKVGEKVIVGENKIPENKPQEIQQSETQDNNSETDKVDVDNKKVVTNIEKLSPAVRKIVDEQKIDLSNIEPKRSDGRITKGDLINNVNTSESQTENNEPILSNTDLSNTELRKEVPMSRLRQTIAKRLKDAQNNAAILTTFNEVDMFQLIETRNEYKESFELKYGVKLGFMSFFVKACITALKEIPDVNAEIQDNKIIYKNFYNIGVAVGTDQGLVVPVLRDADKKSIIEIEKEIFELGNKARSGKLSITDMQEGTFTVSNGGVYGSLMSTPILNPPQSGVLGMHKIEKRPIVIDDEISIRPMMYLALSYDHRIIDGKAAVTFLVRVKEGLEDPRRLLLGV

SEQ ID NO: 114569 - protein, 446 aa, Unknown
  Bacterial polypetide isolated from the Sargasso Sea
MSEKITVPSLGESVTEATVSKWLKSQGDKVIADEPVVELETDKVNVEVPAPINGFLGSITVKEGETVNVGSLLGTISNNTKQENTPKEIKTYSPPKKDKSKNIKLFEEKKEKKISKKINKPQIDEPILKLDNESVEPDEELLILEEAHQEAKVKKIIPVKKETQISPAARKMANEANVDIDKIEGTGKNGLILKEDIMSLMGSKPSPAERKIKHGPEERVRMTRLRLTIAKRLKEAQENAAMLTTFNEVDMSEVITMRNQYKDEFLKNYGVKLGFMSFFVKACVIGLKNFPSINAEIQGEEIVYKNYYNISIAVGTDRGLVVPVLRQTDEMSFADIEKNISELGQKARDGKITIEDLQGGTFTITNGGIYGSMLSTPILNPPQSAVLGMHNIVQRPMAVNGNVEIRPVMFLALSYDHRIIDGKEAVSFLKIIKESLEHPKRLFLDI

SEQ ID NO: 114570 - protein, 402 aa, Unknown
  Bacterial polypetide isolated from the Sargasso Sea
MATEIKSPTFPESVIDGTVANWIKKEGDSVSQDEVIAEIETDKVVLEVVAPFDGQILKIYKNEGEVVNSSEKIADFDKVELDKEHGEKTAEKVKDDKVTQSSDISEQQEKDISKKVNPAAKKLIKENSLDSGQINPTGKKDRVTKSDVINHMNSDEENKTIKTPPSISPRDDEERVPMSRLRTTIANRLVTVQQETAMLTTFNEVDMQPIKDLRQKYGTEFEAEHGTKLGFMGFFVSASVQALLKFPLVNASIDGADIVYHGYQDIGVAVSTDRGLVVPVIRGAQNLSIAQIEKEILSKSEKARDGSLSIEEMQGGTFTISNGGIFGSLLSTPILNSPQTGILGMHKIQDRPIAVDGEVVIRPMMYLALSYDHRLLDGKEAVTFLLTIKELLETPERLLLNL

SEQ ID NO: 114571 - protein, 267 aa, Unknown
  Bacterial polypetide isolated from the Sargasso Sea
FQNSWALGKDGRILKGDIINLMATKPLPNQKKLEKGEEERFKMTRLRQTIAKRLKEAQNSAAMLTTFNEVDMNAIIQLRKDNQEDFQKRFGIKLGFMSFFVKACVLSLKLFPSINAEVDNDHIIFKNYYNISFAVGTDRGLVVPVLRNADELSFAEIEKNIKSISEKAREGNLTIEDLQGGTFTISNGGVYGSMLSTPILNPPQSGVLGMHNIVERPIVVDGQVKVRPVMYLALSYDHRIIDGKDSVSFLKTLKENLEDPRRLFLDI

SEQ ID NO: 114572 - protein, 367 aa, Unknown
  Bacterial polypetide isolated from the Sargasso Sea
VRKDQTIAELDSDKATLDLPAEASGKITLKAQEGDSMSVGDVVCLIDTSESVTEIETDETESNIDPIKEEKTQITLSENIIVTPLARNIASEKGIDLNEIKTEGQKITKDDVLKAVPAMGVSNDDSRIETREKLSMLRRKVSERLVSVKNETAMLTTFNEADLSNIFEIRKKYKEAFSQRYGVSLGFMSFFTLSVTRALELYPDVNSMIDGDEKISYNYSDISIAVSGPKGLMTPVLRNAQKLSFSSVEQEIKRLADSVRNKTISVDDLTGGTFTISNGGVFGSMLSTPIINPPQSGILGMHNIIQRPVAVDGKVEIRPMMYLALSYDHRIIDGNQSVGFLIAVKEGVEDPENILMGGKIEKSLGLT

SEQ ID NO: 114573 - protein, 392 aa, Unknown
  Bacterial polypetide isolated from the Sargasso Sea
MKIPSPGESITEVEISQWLVSDGDIVSKDQTIAELDSDKATLDLPAETTGKISLKAEEGDTISVGEVVCVIDTSFASEENLDKTSEKEQTSSILKEEKLKSTSEEVTATPLAKKIAEETGVNLNQISTKGEKITKEDVLKAVPAMGSVNDDNRGETREKLSVLRRKVSERLVSVKNETAMLTTFNEADLSQIFDLRKNYKDIFSTKHGVSLGFMSFFTKAVTRALQMYPDVNSMIDGDHKVSYNYSDISIAVSGPKGLMTPVLRNAQNMSFASIEQEIKRLADLVRDKSITVDDLTGGTFTISNGGVFGSMLSTPIINPPQSGILGMHNIINRPVAIGDNIEIRPMMYLALSYDHRIIDGNQSVGFLIAVKEGVEDPVNVLMDGNIEKSLAI

SEQ ID NO: 114574 - protein, 236 aa, Unknown
  Bacterial polypetide isolated from the Sargasso Sea
MIKYGPEEKIKMSKLRQTIAKRLKEAQNNAAMLTTFNEIDMTKIIEMRKENQEKFQEEYGIKLGFMSFFVKACIDGLKDYPVLNAETENNEIIYKNYYNISFAVGTDKGLVVPVLKKADELSFADIEKNIKKMSDKAKDGKLNIEDLQGGTFTISNGGVYGSMMSTPILNPPQSAVLGMHNITERPVIIDGEIKARPMMYLALSYDHRIIDGREAVSFLKSIKVNLEDPKKLFQKN

SEQ ID NO: 114575 - protein, 412 aa, Unknown
  Bacterial polypetide isolated from the Sargasso Sea
MSVEIKVPSLGESVVEATVAKWYKNEGDSVSVDEPLLELETDKVTLEVPSPSNGCIQKINAEEGSTVEVGAILGSIDENASIDQKVKQSEPVNEKSVTTPEKIIPEEVKSPPKEEMPIQIDNLNNQKLSPAVRKIAAEKNININTVTSSREDGRITKSDVINYQNIEKQENTPQTIRQTDKREERVPMSRLRQTIAKRLKDAQNNAAMLTTFNEVDMSELIKTRNDHKSEFEKKYGVKLGFMSFFVKACITALRDIPEVNAEIENNDVIYKNFYNIGVAVGTDQGLVVPVVKDADKKSLVEVEKEIYQLGQKARSGQLSIEDMQGGTFTISNGGVYGSLMSTPILNPPQSGILGMHKIEERPIAIDGEIKIRPMMYLALSYDHRIVDGKGAVTFLVRVKEGLEDPSRLLLGV

SEQ ID NO: 114576 - protein, 383 aa, Unknown
  Bacterial polypetide isolated from the Sargasso Sea
MKEKILSPTYPESVEEGVIANWKKLEGEIIIQDEVLAEIETDKVVIEVVAANDGVMTKIFKTEGEVVNSGEVIGEYEVGESELIKEKKSGKDKTPKIESKEPIISNSVNKFAQENEIDLSLIKGTGKSGRIIKQDLLNYISNKEELTKKEAVRETKRVPMSRLRKTVAERLVNVQRETAMLTTFNEVDMTAIMKIREQKGEDFYKKNQIKLGYMGFFVTAAVSALNEYPQVNASIDGDEIVFHGFKDIGVAVSTDRGLTVPIIKDADLLSISDIEKLILEYSDKARNGKLTIEEMQGGTFTISNGGVFGSLLSTPILNAPQTAILGMHKIQDRPIAFEGKIEIRPMMYLALSYDHRIIDGKEAVSFLVHLKNEIENPADLYKE

SEQ ID NO: 114577 - protein, 212 aa, Unknown
  Bacterial polypetide isolated from the Sargasso Sea
LTTFNEADMSSIFDLRKKYKEKFEKKHGVGLGFMSFFTKAVVRALNLFPDVNSMIDGDHKISYEYCDISVAVSGPKGLMVPVVRNAELLSFSEIESEIKRLAIRARDGEITVDDMTGGTFTISNGGVFGSMLSTPIINPPQSGILGMHNIIQRPVAVDGKVEIRPMMYLALSYDHRIIDGKESVGFLVAVKEALEDPAEHLMSNKIEKELGF

SEQ ID NO: 114578 - protein, 395 aa, Unknown
  Bacterial polypetide isolated from the Sargasso Sea
MTIEIKVPDLPESVADATIATWHKKPGDLVARDEVLVDIETDKVVLEVPAPEAGVLGDILQSEGATVLSRQLIAMLKPAPVAGEETKEKPVEAAADDAADGLSPSVRRLVAEHDIDVAKLTGTGKGGRVTKEDVEAFIKGGNKPAAAPVAAAAPAAPVAPLAGRTEKRVPMTRLRKRIAERLLEAKNTTAMLTTFNEINMAPIMKLRKQYGEIFEKKHSIKLGFMSFYVKAVVESLKRYPEVNAALDGDDIVYHNYFDVSIAVSTPRGLVTPVLRDCDNMSLADIEKAIKDLAGKGRDGKLTVDELTGGNFTITNGGVFGSLMSTPIINPPQSAILGMHKIQDRPMAVDGKVEILPMMYLALSYDHRIIDGRESVGFLVSIKELLEDPTRLLLDV

SEQ ID NO: 114579 - protein, 440 aa, Unknown
  Bacterial polypetide isolated from the Sargasso Sea
MIEKILVPVLGESITEATISKWLKNKGENIDADEPIVELETDKVNLEVPSPVSGTLTKINFKDGDTVEVGAILGEISSESVDKKKEDFKDNEKPQKKAPDNIINFGKEKKQNPKIFEDEEKEEPLVLTKEEPLKSNKEEPLILTKELPSKQKTISKKVLSPAVRKIVEENKIDIQSIKGTGKSGQILKGDLIGLMGSTPKPSERKLKYGHEERIKMSRLRQTIAKRLKEAQENAAMLTTFNEIDMTNIIEMRKNNQEDFQKRFGIKLGFMSFFVKACVLGLKSFPAINAEIEGQEIIYKNYYNISFAVGTEKGLVVPVLRNADELSFAEIEKNIKTISEKAKEGKLTIDDLQGGTFTISNGGVYGSMLSTPILNPPQSGVLGMHNIVERPTAINEQVEIRPVMYLALSYDHRIIDGKDSVSFLKLLKENLEDPRKLFLDL

SEQ ID NO: 114580 - protein, 440 aa, Unknown
  Bacterial polypetide isolated from the Sargasso Sea
MTEKILVPVLGESITEATISKWLKNKGDSINVDEALVELETDKVNLEVPSPVDGILTAINFKEGDTVEVGAVLGEISSGSTENKKIDVKSNDKEPKEEAENVINFEKEKKQKPKIFEVEKKEEPLVLTKEEPLVLTKEEPLVLTKEEPSNQKTISQKVLSPAVRKIVEENNIDTSSVKGTGRSGQILKGDLISLMGSAPQPSERKIKYGQEERIKMSRLRQTIAKRLKEAQENAAMLTTFNEVDMTNIIEMRKNNQEDFQKRFGIKLGFMSFFVKACVLGLKAFPAINAEIEGQEIIYKNYYNISFAVGTEKGLVVPVLRNADELSFAEIEKNIKIISEKARDGKLIIEDLQGGTFTISNGGVYGSMLSTPILNPPQSGVLGMHNIVERPIAKDGEVEIRPVMYLALSYDHRIIDGKDSVSFLKLIKDNLEDPRKLFLDL

SEQ ID NO: 114581 - protein, 429 aa, Unknown
  Bacterial polypetide isolated from the Sargasso Sea
MSEKIVVPALGESVTEATVSRWLKSVGEKVDSDEPIVELETDKVNVEVPSPSDGVLENISVKEGDTVEVGALLGSIGAKKVQKVEKEEKKYTPPPKKEEVTPKIFERPKEQKPKKVEKKLILKETNEEPPLILSEEVKSDNYVQEKIVSPSARKIANEKNIDLSKIAGTGKNGVILKEDLLNLMGSKPAPNKRKITHGPEEKIKMTRLRMTIAKRLKEAQNNAAMLTTFNEVDMSKVIQMKNDYKNEFIKKFSTKLGFMSFFVKACVAALKNFPAINAEIQGDTIVYKNYYNISFAVGTDRGLVVPVLRSPDEMSFAEIEKNILSLGEKARDGKITIEDLQGGTFTITNGGIYGSMLSTPILNPPQSGVLGMHNIIERAVVKDGEIIIRPMMYLALSYDHRIVDGKEAVSFLKNVKDSLEEPQRLFLNV

SEQ ID NO: 114582 - protein, 362 aa, Unknown
  Bacterial polypetide isolated from the Sargasso Sea
DGETVEVGTVLGMISEGSVLKEEKEVEPDKGNVEKNNVINLEIEKKKDTKKTQEPLLLDEEPLVLTDEVEETKPIKQNKTLSPAVRKMVVENKINLDEVKGTGKDGRILKGDLISLMGANPQPNERKIQYGEEERIKMSRLRQTIAKRLKEAQNNAAMLTTFNEVDMSNIISMRKDNQEDFQNSYGIKLGFMSFFVKACIVGLKLFPAINAEVENDEMVYKNYYNVSFAVGTEKGLVVPVLKNADEMSFADIEKNIKDLSDKAKNGSLTIEDLQGGTFTISNGGVYGSMLSTPILNLPQSAVLGMHNIVERPVVVDGEIKARPVMFLALSYDHRIIDGKESVSFLKTVKENLEDPRRLFLNL

SEQ ID NO: 114583 - protein, 396 aa, Unknown
  Bacterial polypetide isolated from the Sargasso Sea
MSTELVVPTLGESITEATVSKWLKNIGDSFEVDEPLVEIETDKITVEVPAPHAGSLKEIRAKEGTDINIGGILGILDESKGEKLGSTKIKEQNNEVKPNIEKEKKENLQVDANSNKSSPSARKMAEENNISIQNIKSSRSDGRINKEDIVKHINSSGKDSRVSSEREEIVKMSKIRQTISKRLKEAQNTAAILTTFNEVDMSQIMEIRNSKNKEFQERYDVKLGFMSFFVKAVTETLKEFPAVNSEIKDENIIYKNHFDIGIAVGTEKGLVVPVLKDVDKMNFGEIENSIIDLSTKAKDGTLSMDDLSGGTFTISNGGVYGSMLSTPIINRPQSGILGMHNIQKRAVVVDNEIVIRPMMYLALSYDHRIIDGKESVGFLVGVKKLLENPSHLVLGI

SEQ ID NO: 114584 - protein, 246 aa, Unknown
  Bacterial polypetide isolated from the Sargasso Sea
MSSKPSPNQRKAEKGQEERVKMTRLRQTIAKRLKEAQNSAAMLTTFNEVDMSAIIQMRKDNQDDFQKTFGIKLGFMSFFVKACVLGLKLYPSINAEVDDDHIVYKNYYNISFAVGTDRGLVVPVLRDADELSFADIEKNIKTISEKARDGNLTIEDLQGGTFTISNGGVYGSMLSTPILNPPQSGVLGMHNIIERPIVVNGQIEIKPVMYLALSYDHRIIDGKDSVSFLKTVKENLEDPRRLFLNI

SEQ ID NO: 114585 - protein, 280 aa, Unknown
  Bacterial polypetide isolated from the Sargasso Sea
PAVRKIVNEQNIKLEGIKGSGKNGTILKGDLLKLMSKKPEPNQRKVKYGPEERIKMTRLRQTIAKRLKSAQENAAMLTTFNEVDMSEIISFRKNNQDEFQKKFGVKLGFMSFFVKASVKSLKSYPAINAEIENDDIIYKNYFNISFAVGTDKGLVVPVLKNADEMSFSDIESEIKTLSEKANNGNLSIEDLQGGTFTISNGGVYGSMLSTPILNPPQSGVLGMHNIVERPVVVNNEIKIRPIMYLALSYDHRIIDGKEAVSFLKEIKQYLEDPEKLFLEN

SEQ ID NO: 114586 - protein, 296 aa, Unknown
  Bacterial polypetide isolated from the Sargasso Sea
IYKAPEKKEKSKKMASPSARKIANEKNINLNEIRGSGKNGVILKEDLLSLMGSKPSLNKRKATHGPEERIKMTRLRMTIAKRLKEAQNNAAMLTTFNEVDMHEVIQMKNNYKDEFKKKYLTKLGFMSFFVKACIASLKNYPAINAEIQNETIVYKNYYNISFAVGTDRGLVVPVLRNPDEMSFAEIEKNIADLGQKARDGKISIEDLQGGTFTITNGGIYGSMLSTPILNPPQSGVLGMHNIIERPIVKNGEIIIRPMMYLALSYDHRIVDGKEAVSFLKNIKDTLEEPKRLFLNL

SEQ ID NO: 114587 - protein, 432 aa, Unknown
  Bacterial polypetide isolated from the Sargasso Sea
MTEKILVPVLGESITEATISKWLKRKGDTINADEPVVELETDKVNLEVPSPINGTLSEINYKDGDTVEVGAVLGEIELGPVDEKKEDINIVKKPDKKINDNVINFDKEKNQPKIFEEQKKDEKPLILNEEKPLILTKEFSGNQKVVTKKTLSPAVRKIVEENNIDVNLVKGTGKSGQILKGDLINLMGSTPQPSERKLKYGQEERIKMSRLRLTIAKRLKEAQENAAMLTTFNEVNMSNIIEMRKNNQEDFQNKFGIKLGFMSFFVKASILGLKAFPAINAEIEDQEIIYKNYYNISFAVGTEKGLVVPVLRNADEMSFAEIEKNIKSISEKANSGKLNIDDLQGGTFTISNGGVYGSMLSTPILNPPQSGVLGMHNIVERPIAIDGDIKIKPVMYLALSYDHRIIDGKDSVSFLKLLKENLEDPRKLFLDL

SEQ ID NO: 114588 - protein, 424 aa, Unknown
  Bacterial polypetide isolated from the Sargasso Sea
MSEKILVPVLGESITEATVTKWLKKKGDNVVADEAVVELETDKVNLEVPAPASGVISEINSKDGDTVEVGTVLGMISEGGALKEEKEAEPVKGNVEKNNVINLEIEKKKDTKKTQEPLLLDEEPLVLTDEVEETKPIKQNKTLSPAVRKMVVENKINLDEVKGTGKDGRILKGDLISLMGANPQPNERKIQYGEEERIKMSRLRQTIAKRLKEAQNNAAMLTTFNEVDMSNIISMRKDNQEDFQNSYGIKLGFMSFFVKACIVGLKLFPAINAEVENDEMVYKNYYNVSFAVGTEKGLVVPVLKNADEMSFADIEKNIKDLSDKAKNGSLTIEDLQGGTFTISNGGVYGSMLSTPILNPPQSAVLGMHNIVERPVVVDGEIKARPVMFLALSYDHRIIDGKESVSFLKTVKENLEDPRRLFLNL

SEQ ID NO: 114589 - protein, 250 aa, Unknown
  Bacterial polypetide isolated from the Sargasso Sea
NNNVQELSTKPSISKDHGSKEERVPMSRLRQTIAKRLKDAQNNAAMLTTFNEVDMGELIRTRNEHKDAFETKYGIKLGFMSFFVKACITALKDIPEVNAEVENNDVIYKNFYNIGVAVGTDQGLVVPVIRDADQKSIVEIEQEIFNLGQKARTGKLSIDDMQGGTFTVSNGGVYGSLMSTPILNPPQSGILGMHKIEERPIAVNGDIVIRPMMYLALSYDHRIVDGKGAVTFLVRVKESLEDPNRILLGV

SEQ ID NO: 114590 - protein, 432 aa, Unknown
  Bacterial polypetide isolated from the Sargasso Sea
MSEKITVPTLGESVTEATVSKWLKSQGEKVIADEPIVELETDKVNVEVPAPINGVLGTITVKEGETVNVGSLLGTINNSNQDSSKSNEIKDYSPPKKSAKEEIKLSEQKSKPLAKKINKSKILEPVLKLEKESIVDEVEPLILDEVHEEKQPQKKVKPKNIETKISPAARKMASEANVDINKIKGTGKNGIILKEDIMTLMGSKPSPSERKIQHGPEERVKMTRLRLTIAKRLKEAQENAAMLTTFNEVDMSEVISMRNQYKEEFQKNFGVKLGFMSFFVKACVIGLKNYPSINAEIQGDEIVYKNYYNISIAVGTDRGLVVPVLRETDEMSFSDIEKNIGELGKKARDGKITIEDLQGGTFTITNGGIYGSMLSTPILNPPQSAVLGMHNIIERPVVINGNVEVRPVMYLALSYDHRIIDGKEAVSFKDVK

SEQ ID NO: 114591 - protein, 396 aa, Unknown
  Bacterial polypetide isolated from the Sargasso Sea
MSIEIKVPVLPESVADATIATWHVKVGEQVSRDQNLVDIETDKVVLEVVAPEDGHIGEFLFHEGDTVLGEQVIAKFIAGAVSGQEVTKAQAEAAAPAAATEESNDALSPSVRRLLAEHNVDASKVKGTGVGGRITKEDVEAFIKSAPKAAVAPAAPAVQPLAAGRSEKRVPMTRLRKTIANRLLEAKNSTAMLTTFNEVNMKPIMDIRKQYQDIFEKRHGIRLGFMSFYVKAVTEALKRFPEVNASIDGDDIVYHNYFDVSIAVSTPRGLVTPVLRDTDTMSLADIEKAVRDLAIKGRDGKLTVADMTGGNFTVTNGGVFGSLMSTPILNLPQSAILGMHAIKDRPMAVNGQVEILPMMYLALSYDHRIIDGRESVGFLVAIKDFLEDPTRLLLDL

SEQ ID NO: 114592 - protein, 429 aa, Unknown
  Bacterial polypetide isolated from the Sargasso Sea
MSEKIVVPALGESVTEATVSKWLKTVGEKVDSDEPVVELETDKVNVEVPSPSDGVLENISVKEGDTVEVGALLGSIGAKKVQKIEKEEKKYTPPPKKEEVVPKIFDKPAEKKHKKVEQKLILKETPEEPPLILSKEIISDKQVEEQTLSPSARKIASEKNIDLSKIAGSGKNGVILKEDLLNLMGSKPAPNKRKITHGPEEKIKMTRLRMTIAKRLKEAQNNAAMLTTFNEVDMSKVIQMKNDYKNEFIKKYSTKLGFMSFFVKACVAALKNYPAINAEIQGDSIVYKNYYNISFAVGTDKGLVVPVLRSPDEMSFAEIEKNILSLGEKARDGKISIEDLQGGTFTITNGGIYGSMLSTPILNPPQSGVLGMHNIIERAVVRDGQIIIRPMMYLALSYDHRIVDGKEAVSFLKNIKDSLEEPQRLFLNV

SEQ ID NO: 114593 - protein, 442 aa, Unknown
  Bacterial polypetide isolated from the Sargasso Sea
MSEKILVPVLGESISEATVSKWLKNVGDVVNADEAIVELETDKVNLEVPASISGVLSEINSNEGEAVKVGSVLGFISDSNIKISGKEDIKNTKIEIQKKDEKIYNKNEDNKKKLTTQTEPAILNEEEEPLILNEEEEPLILNEEVEIEKKQAKPLEKNINLSPAVRKIVSEKKIDISEINGTGREGRILKGDLISLMGENPQPNQRKIQFGEEERIKMTRLRQTIAKRLKEAQENAAMLTTFNEVDMSGIISMRKENQEDFQNRYNIKLGFMSFFVKACVVGLKLFPAINAEIEGQDIIYKNYYNISFAVGTERGLVVPVLKNADEMSFADIENEIKKLSDKAKNGSLTIEDLQGGTFTISNGGVYGSMLSTPILNPPQSGVLGMHNIVERPVSENGEIKIKPVMYLALSYDHRIIDGKDYVSFLKTVKENLEDPRRLFLNI

SEQ ID NO: 114594 - protein, 400 aa, Unknown
  Bacterial polypetide isolated from the Sargasso Sea
MSTELIVPTLGESITEATVSKWLKNIGDNFEADEPLVEIETDKITVEVPAPHAGSLKEIKVSEGTDVEIGGILGILDESKGKTPSPKKTETKEEKIKEEVKAVKVETKSSPAKSSPSARKIAEENNIKLEDVTSSRSDGRINKEDVVSHLSSSNKTTTNKGEREEVVKMSKIRQTISKRLKEAQNTAAILTTFNEIDMSKVMEIRKSKNQEFQSRYEVKLGFMSFFVKAVVKSLQEYPAVNAEIKDENIIYKNHFDIGIAVGTEKGLVVPILKDADQLSFGEIETKIIDLSTKAKDGTLTMDDLTGGTFTISNGGVYGSMLSTPIINRPQSGILGMHNIQKRAVVVNDEIVIRPMMYVALSYDHRIIDGKESVGFLVKVKELLEDPSEISIRNIKWEILI

SEQ ID NO: 114595 - protein, 229 aa, Unknown
  Bacterial polypetide isolated from the Sargasso Sea
EKIKMTRLRQTIAKRLKQAQDNAAMLTTFNEVDMSGIIDMRKENQSDFQDRFGIKLGFMSFFVKACIESLKLFPAINAEIEGENIIYKNYYNISFAVGTEKGLVVPVLKNADEMSFADIEKKIKELSDKARDGKITIDDLQGGTFTISNGGVYGSMLSTPILNLPQSGVLGMHNIVERPHVVNGEIKIRPIMYIALSYDHRIIDGKEAVSFLKNTKDNLEDPRRLFLNL

SEQ ID NO: 114596 - protein, 397 aa, Unknown
  Bacterial polypetide isolated from the Sargasso Sea
MSIEIKVPVLPESVADATIATWHVKVGEQVSRDQNLVDIETDKVVLEVVAPEDGHIGEFLFQEGDTVLGEQVIAKFIAGAVSGQEVTKAEAEAAAPVAAATEESNDALSPSVRRLLAEHNVDASKVKGTGVGGRITKEDVEAFIKSAPKAAAAPAAPAVQPLAAGRSEKRVPMTRLRKTIANRLLEAKNSTAMLTTFNEVNMKPIMDIRKQYQDIFEKRHGIRLGFMSFYVKAVTEALKRFPEVNASIDGDDIVYHNYFDVSIAVSTPRGLVTPVLRDTDTMSLADIEKAVRDLAIKGRDGKLTVADMTGGNFTVTNGGVFGSLMSTPILNLPQSAILGMHAIKDRPMAVNGQVEILPMMYLALSYDHRIVDGRESVGFLVAIKDFLEDPTRLLLDL

SEQ ID NO: 114597 - protein, 426 aa, Unknown
  Bacterial polypetide isolated from the Sargasso Sea
MTEKILVPVLGESITEATISKWLKNKGESIIADEPIVELETDKVNLEVPAPTDGILSEVNFKNGDTVEVGAILGEISNSDQEIKKPVEKKVEEKKINNVINLNKEKINQPKIFEEKKDIEKVKETPLILTKELKVQKDYTSNNTLSPAVRKIVEENNIEIEAVKGTGKSGQILKGDLLSLMEATPMPSERKTKFGEEERIKMSRLRQTIAKRLKQAQENAAMLTTFNEVDMSNIIEMRKNNQEDFQNRFGIKLGFMSFFVKASVLALKSFPPINAEIEGDEIVYKNYYNISFAVGTEKGLVVPVLKNADEKSFAEIEKNIKEMSDKAKKGNLTIEDLQGGTFTISNGGVYGSMLSTPILNPPQSGVLGMHNIIERPIVINGEIKIRPIMYLALSYDHRIIDGKDSVSFLKTLKDNLEDPRKLFLDL

SEQ ID NO: 114598 - protein, 277 aa, Unknown
  Bacterial polypetide isolated from the Sargasso Sea
RKIVQEKNIDISKIHGTGKDGRVLKGDLIHLMSSRPEPDQRKLEKGQEERVKMTRLRQTIAKRLKDAQNSAAMLTTFNEVDMSAIIQMRKENQEDFQKKFGIKLGFMSFFVKACVLGLKLYPSINAEIDNDHVIYKNYYNISFAVGTDRGLVVPVLRNADEISFAEIEKNIKEISEKARKGNLTIEDLQGGTFTISNGGVYGSMLSTPILNPPQSGVLGMHNIVERPIVVEGEVQVRPVMYLALSYDHRIIDGKDSVSFLKTIKENLEDPRRLFLNI

SEQ ID NO: 114599 - protein, 361 aa, Unknown
  Bacterial polypetide isolated from the Sargasso Sea
MKNITVPELGESIIEGTLTSWLIKEGDSFKSGDNLAEIETEKITIEIPAQTSGTLTKIITPVGATVNVGQSIAEISDQITPEEITETKINRTPDTKEFKEQAAPVDKPNIVEKSKEIADKDDNLPNFDIEQGSANEKIIPMSKLRQTIARRLKDAQNTAAILTTFNEVDMSAIMALRKKEQTHFQKKYGVKLGIMSFFVKACTEVLKAIPEINSEIHENKIIYKNYFDIGIAIGSEKGLVVPIIRNAEKLSNAEIEKAIFDLSNKANSNKLAMSDLSGGTFSITNGGIYGSMMSTPIINPPQSAILGMHSIIERPIAVKKKIVIKPMMYIALSYDHRLIDGKQAVTFLVNLKELLENPKII

SEQ ID NO: 114600 - protein, 167 aa, Unknown
  Bacterial polypetide isolated from the Sargasso Sea
MSFFVKACTEVLKAIPEINSEIHENKIIYKNYFDIGIAIGSEKGLVVPIIRNVENLSNADIEKAIFDLSNKANSNKLAMSDLSGGTFSITNGGIYGSMMSTPIINPPQSAILGMHSIIERPIAVKKKIVIKPMMYIALSYDHRLIDGKQAVTFLVNLKELLENPKII

SEQ ID NO: 114601 - protein, 440 aa, Unknown
  Bacterial polypetide isolated from the Sargasso Sea
MSDKIVVPVLGESITEATVAKWLKNKGDSVEADEPVVELETDKVNLEVPSPSDGVLSEINAQNGSTVEVGAVLGSIIGGSSKKDETEDEPKEEKVVHNEDNIISLKKEVETKEVETKLFDKEEKILEPNENTSKEEPLILTEEVSSKKEKSKKTKDVSVSPAVRKIAADNKIDLKKIQGTGRGGRVSKGDLLSLMNIKPGPSERKIKFGQEEKIKMTRLRLTIAKRLKQAQDNAAMLTTFNEVDMSGIIEMRKENQNDFQDRFGIKLGFMSFFVKACIESLKLFPAINAEIEEENIIYKNYYNISFAVGTEKGLVVPVLKNADEMSFADIEKKIKDLSDKARDGKITIDDLQGGTFTISNGGVYGSMLSTPILNLPQSGVLGMHNIVERPHVVNGEIKIRPIMYIALSYDHRIIDGKEAVSFLKNTKDNLEDPRRLFLNL

SEQ ID NO: 114602 - protein, 450 aa, Unknown
  Bacterial polypetide isolated from the Sargasso Sea
MRAAPAEGIARTSSLPRLSIQENHMAIVEVKVPQLSESVSEATMLQWKKKPGEAVAQDEILIELETDKVVLEVPAPAAGVLAQVLQNDGDTVVADQLIATIDTEAKAGAAEAAAGAAEVKPAAAPAAAAPAAQPVAAAATASSTTASPAASKLLAEKGLSAGDVAGSGRDGRVTKGDALAAGSAPKAAPAAAPAKTAAAKPSLPEVKVPASAATWLNDRPEQRVPMSRLRARIAERLLESQQTNAILTTFNEVNMAPVMELRNKYKDKFEKEHGVKLGFMSFFVKAAVHALKKFPLVNASIDGNDIVYHGYFDIGIAVGSPRGLVVPILRNADQLSLAEIEKKIAEFGQKAKDGKLSIEEMTGGTFSISNGGVFGSMLSTPIINPPQSAILGVHATKERPVVENGQIVIRPINYLALSYDHRIIDGREAVLSLVAMKDALEDPARLLLDL

SEQ ID NO: 114603 - protein, 324 aa, Unknown
  Bacterial polypetide isolated from the Sargasso Sea
CLIDTSESQLEELTQPAVTKVDPIKEEKTQTTQKENISVTPLARSIASEKGIDLNVIKTKGEKITKDDVLKVVPAMGSSIDDTRVESREKLSMLRRKVSERLVSVKNETAMLTTFNEADLTKIFEIRKKYKEAFSQKHGVSLGFMSFFTKSVTRALEMFPDVNSMIDGDEKISFNYSDISIAVSGPKGLMTPVLRNAQKLSFSSVEQEIKRLADSVRNKSITVDDLTGGTFTISNGGVFGSMLSTPIINPPQSGILGMHNIIQRPVAVDGKVEIRPMMYLALSYDHRIIDGNQSVGFLIAVKEGVEDPENLLMDGKIQKSLGLS

SEQ ID NO: 114604 - protein, 441 aa, Unknown
  Bacterial polypetide isolated from the Sargasso Sea
MSEKIIVPALGESVTEATVSKWLKSVGEEVSSDEPLVELETDKVNVEVPSPSDGILEKISVKEGTTVEVGSLLGSVGASNSKPVVEKKEKKYTPPPKKEKSIPIYDEEPKKNEEVVELSKPISNGKETLVLHEEEKGETPLILDQEHKPIKIKKTQIKTASPSARKMAQDKNINLDQIEGSGRRGMVLKEDLINLMGTKPALNLKKTKDGPEERIKMTRLRLTIAKRLKEAQNNAAMLTTFNEVDMNNIIEIRKNYQEEFKKKYLVKLGFMSFFVKASIAALKNYPAINAEIQDEEIVYKNYYNISFAVGTDKGLVVPVLRNPDEMSFADIEKNISNIGEKARNGKLTINDLQGGTFTITNGGIYGSMLSTPILNPPQSGVLGMHNIIERAVVINGEIKIRPMMYLALSYDHRIVDGKEAVSFLKNIKDFLEEPKRLFLNV

SEQ ID NO: 114605 - protein, 246 aa, Unknown
  Bacterial polypetide isolated from the Sargasso Sea
MGASPQPNERKIQYGHEERIKMTRLRQTIAKRLKQAQENAAMLTTFNEIDMSGIISMRKENQEDFQSRYGIKLGFMSFFVKACVVGLKLFPSINAEVEGEDIVYKNYYNISFAVGTEKGLVVPVLRNADEMSFAEIEKEIKRLSDKAKNSTLTIEDLQGGTFTISNGGVYGSMLSTPILNPPQSGVLGMHNIVERPVVDNGEVKIKPIMYLALSYDHRIIDGKDSVSFLKTVKENLEDPRRLFLNI

SEQ ID NO: 114606 - protein, 398 aa, Unknown
  Bacterial polypetide isolated from the Sargasso Sea
MSIEIKSPTFPESVADGTIANWLKKEGESVAQDEVIAEIETDKVVLEVLAQSDGVISKILKSEGETVISSEVIGEYEEGDVPVDEKQEEPQEKDTVKSESIVSPKEEKKKSGPAVKKILAEKNLDPSEVKPSGKGNRLTKADVINHIAAKDNESVVEKVSDHQLGDRPQKRVPMSRLRSTIADRLVSVKQNTAMLTTFNEVDMLPIKELRSKYGAEFEKEHEVKLGFMGFFVIAAVQALKKFPVVNASIDGSDIVYHGFQDIGVAVSTERGLVVPVIKDADTKSLPEIEKSILEYSEKARNGKLSIDEMQGGTFTISNGGVFGSLLSTPILNAPQTAILGMHSIQDRPVAINGEVCVRPMMYLAMSYDHRLLDGREAVTFLVSIKEQLESPERLLLNL

SEQ ID NO: 114607 - protein, 394 aa, Unknown
  Bacterial polypetide isolated from the Sargasso Sea
MSVDIKVPSLGESVVEATVAKWYKNEGDSVTLDEPLLELETDKVTLEVPSPASGLIEKISSPEGSTVEVGALLGAINDTAEVKKAPENSEKIVTTKEEKPKEEPVVEKPVIKESSVPLDNTPKEILESKVSKLSPAVRKIAAEKNLDIAQVATTRSDGRITKGDILASSNNVQELSTKPSISKEHGSKEERVPMSRLRQTIAKRLKDAQNNAAMLTTFNEVDMGELIRTRNEHKDAFETKYGIKLGFMSFFVKACITALKDIPEVNAEVENNDVIYKNFYNIGVAVGTDQGLVVPVIRDADQKSIVEIEQEIFNLGQKARTGKLSIDDMQGGTFTVSNGGVYGSLMSTPILNPPQSGILGMHKIEERPIAVNGDIVIRPMMYLALSYDHRIVDG

SEQ ID NO: 114608 - protein, 366 aa, Unknown
  Bacterial polypetide isolated from the Sargasso Sea
GSVLGVISDSNIKINEAEKIIPEKIETLEEEKLSNKDEIVDDHADNHSTVQSEPMILNEEEPLILNEEVDIEKKKLKPLEKNINLSPAVRKIVSEKKIDIDQVKGTGKDGRILKGDLITLMGENPKPNQRKIQFGEEERIKMTRLRQTIAKRLKEAQENAAMLTTFNEVDMSGIISMRKENQEDFQSRYNIKLGFMSFFVKACVVGLKLFPAINAEIEGQEIIYKNYYNISFAVGTEKGLVVPVLKNADEMSFADIENEIKKLSDKAKNGNLTIEDLQGGTFTISNGGVYGSMLSTPILNPPQSGVLGMHNIVERTVVENGEIKIKPVMYLALSYDHRIIDGKDSVSFLKTIKENLEDPRRLFLNI

SEQ ID NO: 114609 - protein, 417 aa, Unknown
  Bacterial polypetide isolated from the Sargasso Sea
ATVSKWLKNKGETVKVDEAVVELETDKVNLEVPSPSSGVLSEINSKDGDTVEVGAILGLISQGNLNVEKNEQAIKPEEKKIEKIKLPKEKSNIINLEIEKKSENTKEEPLVLMDEEPLVLTEEVKSPETSNEPIVLSPAVRKMVVEKKININEVKGTGKDGRILKGDLISQMGVNPQTNQRKIQYGEEERIKMTRLRQTIAKRLKEAQENAAMLTTFNEVDMSGIIAMRKENQEDFKDRYGIKLGFMSFFVKACVVGLKLFPAINAEVEGQDIVYKNYYNISFAVGTEKGLVVPVLKNADEMSFADIEKEIKRLSDKAKNITLSIEDLQGGTFTISNGGVYGSMLSTPILNPPQSGVLGMHNIVERPVSDNGEIKIKPIMYLALSYDHRIIDGKDSVSFLKTVKENLEDPRRLFLNI

SEQ ID NO: 114610 - protein, 393 aa, Unknown
  Bacterial polypetide isolated from the Sargasso Sea
ADGTIANWVKKKGDSVKQDEVIAEIETDKVVLEVVAPFDGVVSKVLKPAGETVLSAELIAEFRKEDINQAFDTSKNEIIAEPEKEKSVEISNEIKDSSIKNGPAVKKLLKEHELNESDISGSGKNGRITKSDIVNHLDEPVSQDQEKSMSPSVKVASSSDERLEERVPMSRLRSTIANRLLTVKQETAMLTTFNEVDLKPIKDLRTKYGNEFEEEHGVKLGFMGFFVLAAVQALKKFPVVNASIDGNDIVYHGYQDIGVAVSTDRGLVVPVIRDAGNLRIADVEKSILDYSEKARHGKLSISEMQGGTFTISNGGVFGSLLSTPILNAPQTAILGMHTIQDRPVAIDGEIVIRPMMYLALSYDHRLLDGKEAVSFLIAIKDQLESPEKLLLNL

SEQ ID NO: 114611 - protein, 314 aa, Unknown
  Bacterial polypetide isolated from the Sargasso Sea
SRNFLRLAKDADVLIENYRPNVKHRLGIDFETLQKLNKKIVYGSISGFGQKGPYSKRAGLDQIAQGLGGLMSVTGMPGDGPVRVGIPIADLTAGINLAYGILVALLEREVSGEGQWVKTSLLESQIMMMDLQAARYTISGEIPQQEGNNHPTNTPTGVFPTADGVINIQASAEHLFKRMCDTLGAKEIYENGDYSSNEKRTNLRDQINAEIAEYTKKRTTAYWVKAFAESGVPCGPILNMGEVFNDPQVKTLNMNPAVNHPRLGTLNVVGQAVKLDRTPQKMRSATPDLGEHTMEILNELGIEKREFNELRKKG

SEQ ID NO: 114612 - protein, 369 aa, Unknown
  Bacterial polypetide isolated from the Sargasso Sea
VSAFSNAKTFADYRVLLSEMQDEIDAVVISTPDHTHAPASIMAMNLNKAVYCQKPLTHHISEAREMNSIAKEKNLVTQMGIQVHSFYDYKLATLLIKSGIIGKVSTVHAWSPKNWGYDGLKPSGSDPIPKSLDWNLWLGTAKKHGYKKDLYHPFNWRKLVDFGCGTLGDMGVHIFDTPYNALQLDVPKTVTNECREPNEFGYPEKNKVTYIFPGTEQTTDELKWIWYDGIGAPEKHLDLELPNNEELHDQGAIFIGEKGRLYLPHFMIEPKLIVDGQYQKMDIEKFNLGKPVRDYDKEEKFHYHEFVDACLGNDTCSAPFSYASRLTETILLGVIAGRFPGETLNWDKDLARFKEEKANKFISGTYRDF

SEQ ID NO: 114613 - protein, 474 aa, Unknown
  Bacterial polypetide isolated from the Sargasso Sea
MTKYLTKFALLCTLALAMLSTPSWAEETHNPDQTWHYVNAQGELKIKLYFFWSKTCPHCAEAHPFIDSLPQKYPWIELESHMVSAPGVQDIWQGIAAKTTTEARSVPYMASCEKAIVGYSSEAVTGEFLVNRLKNCYLSLGGQLSEADMPTTGTTAAAPTNSEPLFGTCGTDSGEGTCDATSLASNDQAEVQPVELPLVGVVTPESMSLPLLTLVLAGVDAFNPCAFFVLLFLLSIMVNAKSRSRMLLVGGIFVFFSGFIYFLFMTAWLNIFQLLGAGSDGGMIILAAGILALIAGTINVKDYFFTKGDVTLSMSAENRTSLIKRMGKLSNSSSLGALIVGSTVLAILANAYELLCTAGFPMIYTSVLSMHNLPDIERYMYLVLYNIVYVIPLAIIVIVFSATLGKRKLTEKEGQALKLMSGVMMFGMGVALVLDPTALQSVGLALGLILGSLGLTAIIVLSRKLLTAKANKTA

SEQ ID NO: 114614 - protein, 474 aa, Unknown
  Bacterial polypetide isolated from the Sargasso Sea
MTKYLTQFALLCSLALAMLSAPSWADTPNTSDQTWHYVNAQGELKIKLYFFWSKTCPHCAQAHPFIDSLPQKYPWIELESHMVSAPGVQDIWQNIAAKTATEARSVPYMASCEKAIIGYSSEAVTGEFLVNRLKNCYLSLGGQLSEADMPTKGAASAAPTNSEPLFGTCGTDSGEGTCDATSLASTDQAEVQPVELPLVGVVTPETMSLPLLTLVLAGVDAFNPCAFFVLLFLLSIMVNAKSRSRMLLVGGIFVFFSGFIYFLFMTAWLNIFKLLGAGSDGGMIILAAGVLALIAGTINVKDYFFTKGEVTLSMSAENRTSLIKRMGKLSNSSSLGALILGSTVLAILANAYELLCTAGFPMIYTSVLSMHNLPEIERYMYLVLYNIVYVIPLAIIVIVFSATLGKRKLTEKEGQALKLMSGVMMFGMGVALVIDPTALQSVGLALGLILGSLGLTFIIVLSRKLLTAKANKAV

SEQ ID NO: 114615 - protein, 106 aa, Unknown
  Bacterial polypetide isolated from the Sargasso Sea
TRLAQEKRPDLMIDGPLQYDAAVMADVAKSKAPNSPVAGRATVFIFPDLNTGNTTYKAVQRSADLISIGPMLQGMRKPVNDLSRGALVDDIVYTIALTAIQSSQQQ

SEQ ID NO: 114616 - protein, 220 aa, Unknown
  Bacterial polypetide isolated from the Sargasso Sea
LNFSMMMVSNGDADGLVAGAVTPTGDVLKAAIRIVGIKAESKWVSSSFFMISPSIDKAYTFADCAVIPEPTSDQLASIAIESAVSHRLLSGEEPRVAFLSFSTKGSASHRRVTHVRKAVKAFSESHPDILHDGELQVDSAIVPSVASHKVNDSPLQGNATVLIFPTLDAGNIAYKITERLAGYTAWGPLLQGLKKPVHDLSRGCSSSDIFNVATIAAMQK

SEQ ID NO: 114617 - protein, 178 aa, Unknown
  Bacterial polypetide isolated from the Sargasso Sea
MMTVNGQLLFIGDATINIYPDARTLAEIAIQTAKVAKRFGVKPKVAMLSFSNFGTSSEMRTDRIEEAIQMVREMDPDLVIDGPMQADTALVLEIQEDYPFMSFNGPANVLICPNLASANIAYKLLQRVAGAEMTGPILEGLSRPAHVLQRRDSVRDVVHMAAICAVDAQRASRERLID

SEQ ID NO: 114618 - protein, 124 aa, Unknown
  Bacterial polypetide isolated from the Sargasso Sea
SYSTGSSGAGSDVEKVREATKIAQELRPDLLIDGPLQYDAAAIESVGRSKAPNSPVAGKANVFVFPDLNTGNTTYKAVQRSFDLVCIGPMLQGMRKPVNDLSRGALVDDIVFTIALTAIQAAGN

SEQ ID NO: 114619 - protein, 315 aa, Unknown
  Bacterial polypetide isolated from the Sargasso Sea
KQQRIVLPEGDEPRTLRAACQCQQQGIAHITLLGDPKKIQAQANSLGLTLPDDIRVLDPQKVYRDYIDDLVQLRQHKGMNKPIAEEQLQDRIVLGTMMLQRKEVDGLVSGAVHPTASVLRPALQLIKTAPHAVKVSSVFFMCFPHQVMIFGDCAVNPNPDIETLADIAIQSAHTAKIFGIEPKVAMISYSTGSSAGGEEVTRVQAATELVRQKSPDIIIDGPLQYDAAIIPHVAQQKAPNSPVAGQATVLIFPDLNTGNTTYKAVQRSAHLLCIGPMLQGLNQPVNDLSRGASVEDIIYTIALTARQAQSEKILN

SEQ ID NO: 114620 - protein, 130 aa, Unknown
  Bacterial polypetide isolated from the Sargasso Sea
RIAMISYSTGTSGTGADVEKVAEATKIAQQRRPDLLIDGPLQYDAASVESVGRQKAPDSKVAGRANVFIFPDLNTGNTTYKAVQRAANVVSVGPMLQGLNKPVNDLSRGALVDDIVFTIALTAIQAKQQD

SEQ ID NO: 114621 - protein, 193 aa, Unknown
  Bacterial polypetide isolated from the Sargasso Sea
VIGPDPNSHRIVGMYMMTVNGQLMFIGDATINIYPDARTLAEIAVQTAKVAKRFGVKPKVAMLSFSNFGTSAEMRTDRIEEAIEIVREIEPDLVIDGPMQADTALIPDIQQDYPFMSFNGPANVLICPNLASANIAYKLLQRVAGAEMTGPILEGLSRPAHVLQRRDSTRDVVHMAAICAVDAQRAASQRLID

SEQ ID NO: 114622 - protein, 48 aa, Unknown
  Bacterial polypetide isolated from the Sargasso Sea
VQRSADLVSIGPMLQGMRKPVNDLSRGALVDDIVYTIALTGIQAAQAE

SEQ ID NO: 114623 - protein, 249 aa, Unknown
  Bacterial polypetide isolated from the Sargasso Sea
MSLKEEIFRKAAKNPKRILFPEGEDERILQAASELAKKGIGEPVVLVDVKKVRNDLPKTKVEHIEWLDPASYPHLQDLAEIYASRRSNVNEKMALRLLKRPLYLAGMLLDQGKVDAVVAGATKTTGQVITAASLTVDMQDGVSQPSSFFLMIFPGTRERILVFADCALMVDPDPKELANIAKLTAQNARTLLNLEPRVAMLSFSTHGSAKHGRVDKVKQALERLKEMEPELIVDGELQLDAALSSEVAL

SEQ ID NO: 114624 - protein, 246 aa, Unknown
  Bacterial polypetide isolated from the Sargasso Sea
QQRGRRGLTREDAIRQLKSTTFFAPMMVRMGDADGYLGGISHQYPDIVKPCLQVIGPDPNSHRIVGMYMMTVNGQLMFIGDATINIYPDARTLAEIAVQTAKVAKRFGVKPKVAMLSFSNFGTSAEMRTDRIEEAIEIVREIEPDLVIDGPMQADTALVPDIQQDYPFMSFNGPANVLICPNLASANIAYKLLQRVAGAEMTGPILEGLSRPAHVLQRRDSTRDVVHMAAICAVDAQRAASQRLID

SEQ ID NO: 114625 - protein, 383 aa, Unknown
  Bacterial polypetide isolated from the Sargasso Sea
MSAMNGVKLGALLLTGNYHPEPQVMALCQQAMATGLPIMITGTNTWQTAVSLQNFNVDIPEDDRERIELVQDYVAGHIDKHWIESLSAKSTRSRRLSPPAFRYQLTELARQANKRVVLPEGEEPRTIKAAAICAERGIARPVLLGNPEEIRRVAEQQGVVLTDRVEIIDPVAVRERYVARLVELRKNKGMTEVVAREQLEDNVVLGTMMLERNEVDGLVSGAVHTTANTIRPPMQIIKTAPGSSLISSIFFMLLPDQVLVYGDCAINPDPTAEQLAEIAIQSADSAAAFGIEPRVAMISYSTGTSGAGADVEKVREATELAKAKRPDLIIDGPLQYDAAIMENVAKSKAPNSPVAGKATVFVFPDLNTGNTTYKAVQRSADLV

SEQ ID NO: 114626 - protein, 271 aa, Unknown
  Bacterial polypetide isolated from the Sargasso Sea
MAKRQLIDLGYELLEPQDFQSKKDQYRKNLEQEHFFRKLSDESKKKFMENTLNFSMMLVSNGDADGIVAGAVTPTKDVLKAAIRIVGIKAESKWVSSSFFMISPSADKAYTFADCAVIPEPTSDQLASIAGESAVSHRLLSGEEPRVAFLSFSTKGSASHRRVTHVRQAVETFSETHPDILHDGELQVDSAIVPAVASHKVNDSPLQGNASVLIFPTLDAGNIAYKITERLAGFTAWGPLLQGLNKPVHDLSRGCSSSDIFNVATIAAMQK

SEQ ID NO: 114627 - protein, 138 aa, Unknown
  Bacterial polypetide isolated from the Sargasso Sea
MLSFSSNGSARHPNVANVQQATEIVRERAPQLTVDGELQFDAAFVPDVAAQKAPASPLKGNANVMVFPSLEAGNIGYKIAQRLGGYRAVGPLIQGLAAPLHDLSRGCSVQEIIELALVAAVPRQTDMSRENASHTLVV

SEQ ID NO: 114628 - protein, 118 aa, Unknown
  Bacterial polypetide isolated from the Sargasso Sea
IYRVDKVRNAVEIFAHKYPNIKHDGEIQFDAAIIPEVGRVKTPNSPLSGNANVFIFPNLDAGNIGYKIAQRLGSYSAWGPLLQGLNKPVHDLSRGCSVDDIVNVAAIAALQRNMYANI

SEQ ID NO: 114629 - protein, 226 aa, Unknown
  Bacterial polypetide isolated from the Sargasso Sea
MVYAAMLVRMGHATGTVGGAVATTSDVVRTAIQVIGKAPDAAMISSFFLMYPSENATPHARAMLYSDSGLVINPSADELAEIAAASARSCRALMREEPRIAFLSFSTKGSARHEKVTKVTDALAKLHDDHPDLHADGELQFDAAFVPSVGASKAPGSEIAGQANVMIFPNLDAGNIGYKMTQRLGGYAAIGPILQGLAQPANDLSRGCSAGDVTEMIAVTVLQAMD

SEQ ID NO: 114630 - protein, 717 aa, Unknown
  Bacterial polypetide isolated from the Sargasso Sea
MSRNIMLIPIGTGVGLTSLSLGMVRALERHGVKVQFFKPISQLRPNDNGPERSTTILSKSPTVNPLEPFDMAHAEALIRADQTDVLMEQIIARAAECASNTETLIVEGLVPTRNHPFADDVNYAIAKAMDADVIFIATPGSDTPTGLMNRLEIAYNSWGGKNNKRLIGAVINKIGAPVDDEGRARPDLSEVFDHQGVQRSDASIMFQLPGKSPLRILGSVPYNLDLVAPRASDLAKHLRARILNAGEMNTRRLRKVTFCARSLPNMVNHIKTDSLLVTSGDRSDVIVSACLAAMNGVKIGALLLTGSYEPEPEILKLCEQAFETGLPVFLIDTNTWQTSLNIQRFDHEVPVDDAVRIDLVQEYVASHIDQSWIESVTKNSPREHRLSPPAFRYKLTELARAAHKTVVLPEGDEPRTIKAAAICAERGIARCVLLGKKDEIQRIAAQQDVVLGEGVVIVDPDEVRDRYVEPMLDLRRNKGLTEVVAKEQLEDNMVLGTMMLAQNEVDGIVSGAVNTTANTIRPPLQLIKTAPGSSLVSSIFFMLMPDQVLVYGDCAINPDPNAEQLADIAIQSAESAKAFGIEPRVAMISYSTGNSGTGSDVDKVREATRIAKEKRPDLVIDGPLQYDAAVMPNVARSKAPNSPVAGQATVFVFPDLNTGNTTYKAVQRSADLISIGPMLQGMRKPVNDLSRGALVDDIVYTIALTAIQASQNDASKA

SEQ ID NO: 114631 - protein, 229 aa, Unknown
  Bacterial polypetide isolated from the Sargasso Sea
AQELLEDNVTLGTMMLQQDDVDGLVSGAVNTTANTIRPALQLIKTAENASLVSSVFFMLLPDQVLVYGDCAINPDPNAQQLADIAIQSAESAQMFGIEPRVAMISYSTGSSGAGSDVEKVREATKIAQSLRPDLLIDGPLQYDAAAIESVGKSKAPNSPVAGKANVFVFPDLNTGNTTYKAVQRSFDLVCIGPMLQGMRKPVNDLSRGALVDDIVFTIALTAIQAAGNV

SEQ ID NO: 114632 - protein, 332 aa, Unknown
  Bacterial polypetide isolated from the Sargasso Sea
SPPAFRYQLSERARAAAKRIVLPEGSEPRTIQAAIICHQRNLAHCALIGDPHEIRSVAASQGVELPNDLEIIDPQSVRERYVAPMVELRKHKGLTPDMAEAMLEDNVVLGTMMVAMDEADGLVSGAIHTTANTVRPALQLIKTHDNAKVVSSVFFMLLPQQVLVYGDCAINPDPNAEELADIAIQSAESAEAFGIEPVVAMISYSTGESGSGEDVDKVREATRIARERRPDLLIDGPLQYDAAAIESVAKSKAPGSKVAGKATVFVFPDLNTGNTTYKAVQRSANVVSVGPMLQGLRKPVNDLSRGALVEDIVFTIALTAVQAKQVADAGAA

SEQ ID NO: 114633 - protein, 717 aa, Unknown
  Bacterial polypetide isolated from the Sargasso Sea
MSRNIMLIPIGTGVGLTSLSLGMVRALERHGVKVQFFKPISQLRPNDNGPERSTTILSKSPTVNPLEPFDMAHAEALIRADQTDVLMEQIIARAAECASNTETLIVEGLVPTRNHPFADDVNYAIAKAMDADVIFIATPGSDTPTGLMNRLEIAYNSWGGKNNKRLIGAVINKIGAPVDDEGRARPDLSEVFDHQGVQRSDASIMFQLPGKSPLRILGSVPYNLDLVAPRASDLAKHLRARILNAGEMNIRRLRKVTFCARSLPNMVNHIKTDSLLVTSGDRSDVIVSACLAAMNGVKIGALLLTGSYEPEPEILKLCEQAFETGLPVFLIDTNTWQTSLNIQRFDHEVPVDDAVRIDLVQEYVASHIDQTWIESVTKNSPREHRLSPPAFRYKLTELARAAHKTVVLPEGDEPRTIKAAAICAERGIARCVLLGKKDEILRIAAQQDVVLGEGVVIVDPDEVRDRYVEPMLDLRRSKGLTEVVAKEQLEDNMVLGTMMLAQDEVDGIVSGAVNTTANTIRPPLQLIKTAPGSSLVSSIFFMLMPDQVLVYGDCAINPDPNAEQLADIAIQSAESAKAFGIEPRVAMISYSTGNSGTGSDVDKVREATRIAKEKRPDLVIDGPLQYDAAVMPNVARSKAPNSPVAGQATVFVFPDLNTGNTTYKAVQRSADLISIGPMLQGMRKPVNDLSRGALVDDIVYTIALTAIQASQNDAKKS

SEQ ID NO: 114634 - protein, 332 aa, Unknown
  Bacterial polypetide isolated from the Sargasso Sea
MKHKLPLEILEELATNQKPTIVMSEGSDPRIITGAAAAFDTGMCQIVLLGNEIIIKTECKKLGMELPSGIKIIDPENSDLLVEFEKEYLNLHKKTGISAGEAQRKIKEPLNFAALMVRLGHAAGTVGGAVETTSNVVRAAIQIIGKSDDVQIISSCFLMYPKSNYPMVYSDCGLVIDPTEDELASIAVMAAGSCKNLLQAEPRLAMLSFSTKGSASHPKVSKVVAATKIVKTKNPEIQIDGELQFDTAISTEIAKSKADGSPTAGKANVMIFPNLDAGNIGYKITQRLGGAEAIGPILQGLAKPANDLSRGCSATDVTQMIAVTLLQANHSK

SEQ ID NO: 114635 - protein, 246 aa, Unknown
  Bacterial polypetide isolated from the Sargasso Sea
AEIYASRRSNVNEKMALRLMKRPLYLAGMLLDQGKVDAVVAGATKTTGQVITAASLTVGMEDGVSQPSSFFLMLFPGTPERILVFADCALMVDPDPEALANIAKLTAQNARTLLNLEPRVAMLSFSTHGSAKHGRVDKVKQALERLKEMEPELIVDGELQLDAALSSEVALRKSPDSPLKGDANILIFPDLDAGNIGYKLAQYLGGAQAIGPITQGFQKPFNDLSRGSSVDDILLLAAVSSIQPDF

SEQ ID NO: 114636 - protein, 186 aa, Unknown
  Bacterial polypetide isolated from the Sargasso Sea
ADDAQIISSCFLMYPKSNYPMVYSDCGLIIDPTEDELASIAVMAANSCKNLLQAEPRVAMLSFSTKGSANHSKVSKVLAATKIVQSKNPEIQIDGELQFDTAISPEIAKSKTDGSPTAGKANVMIFPNLDAGNIGYKITQWLAGAEAIGPILQGLAKPANDLSRGCSATDVTQMIAVTILQANHSR

SEQ ID NO: 114637 - protein, 182 aa, Unknown
  Bacterial polypetide isolated from the Sargasso Sea
MTKKSEDIVFTTALRTAIGKYKGMWKDLQAHDLGTAVIKKILLKSKVDPNFVDEVVMGQVLTGDVGQNPARQAAIKGGIPKEKTSYVVNQVCGSGLRSIVAGYQSILLNDTKIIIAGGQESMTNSKEEMMLKDGLIDAFNNYHMGVTAENVAEKWNISRKEQDDFACSSQLKAQEAIKNKKF

SEQ ID NO: 114638 - protein, 94 aa, Unknown
  Bacterial polypetide isolated from the Sargasso Sea
ALEIAGWSSKDLDLIEANEAFAAQSCAVVKELSLPMEKVNVNGGSIALGHPIGASGTRIFVTLIHEMLKRDSKKGLATLCIGGGMGVAMCIERK

SEQ ID NO: 114639 - protein, 189 aa, Unknown
  Bacterial polypetide isolated from the Sargasso Sea
MTNKFNEVFIVAAVRTPIGTYKGSLKNISADKLGSIVIKEVIDRSRIDKEEINEVIMGQVLTAGAGQNPARQAAINAGLPKSIPAHLVNQVCGSGLRSVVSGYQSISLRENKIVIAGGQENMSRATHAIYYREDQKFSENKLVDTMIKDGLLDSFNDYHMGVTAENVAHKYKISRDEQDNFSLNSQKKT

SEQ ID NO: 114640 - protein, 115 aa, Unknown
  Bacterial polypetide isolated from the Sargasso Sea
MTNKSNEVVIIGAVRTPIGTYKGSLKDIKADQLGSIVIKEVLKKSKIHKNEIDEVIMGQVLTAAGGQNPARQAAINAGIQSSIPAYMVNQVCGSGLRAVISGYQSIKLGETKKII

SEQ ID NO: 114641 - protein, 130 aa, Unknown
  Bacterial polypetide isolated from the Sargasso Sea
TAKKLGAKPLARIVSHATHAQEPEWFATAPLGATQKALAKAGWQVGDVQLWEINEAFAVVPMALMKELDLPHDKVNVNGGACALGHPIGASGARIMVTLIHALKARGLTKGLATLCIGGGEATAVALELV

SEQ ID NO: 114642 - protein, 94 aa, Unknown
  Bacterial polypetide isolated from the Sargasso Sea
MSKNSKDIVLTSALRTSVGKFGGIHKKLQAHELGSIVIKGILKKTNVDPLEIDEVILGQVLTSLGGQNPARQALIKSGIPKEKTAFNINQVCGS

SEQ ID NO: 114643 - protein, 271 aa, Unknown
  Bacterial polypetide isolated from the Sargasso Sea
MAKNSKDIVITAALRTAIGKYKGMWNNFKAHELGKVVIKKILKITKIDAKLIDEVIMGQVLTGGTGQNPARQAAIGAGIPKETTGYIVNQVCGSGLRSIVAGYQSILLNDSKIVIAGGQESMSNSKSEVMLKDGLIDAYNNYHMGITAENVAEKWNISRKDQDIFAVNSQEKAQEAIKNKKFDNEIIDNKTEDEHPRKEVTLENLSKLKSAFKENGTVTAGNSSGINDGAAAVLIMSREESDKKGLKPLAKIVSWATCGVDPALMGSGAIP

SEQ ID NO: 114644 - protein, 289 aa, Unknown
  Bacterial polypetide isolated from the Sargasso Sea
VGSFSGSFGNTPAHDLGTTVLEALVSRAQVDKSEVSETIMGQVLTAGQGQNPARQAHVNAGLPVESAAWCINQVCGSGLRAVALAAQHVQLGDASIVCAGGQENMSLSPHVAHLRSGYKMGDVKYIDSMIRDGLWDAFNGYHMGQTAENVAEKWQISRDMQDEFALSSQNKAEAAQIAGKFEDEIVPFTVSNRKGDITVDKDEYIRHGATIENMHKLRPAFAKDGSVTAANASGINDGAAGALVMSAEEANKRGIEPLARIASYATAGLDPKIMGVGPIYASRKALEKA

SEQ ID NO: 114645 - protein, 268 aa, Unknown
  Bacterial polypetide isolated from the Sargasso Sea
MQKNSKDVVIVSALRTVIEKYNGIWAKIEAHNLGRSVIQNILLKSKVNKSSIDEVIMGQVLTGGAGQNPARQAARGAGIQDEKTAYVINQVCGSGLRAIISGYQSILLNDSKIIIAGGQENMSLSNQENMLQDGLIDAFNKYHMGVTAENVADKCNISRKEQDNFALSSQKKTQEAIKNKKFKDEILDDKSNKNFLDEHPRLDVTIESLSKLKPAFKENGTVTAGNSSGINDGAAAVLIMTREEAEKRELIPLAKIVSWASCGVNPAL

SEQ ID NO: 114646 - protein, 229 aa, Unknown
  Bacterial polypetide isolated from the Sargasso Sea
MIDKSKEVVIVAAVRTPIGSYKGSLKNMRADQLGSIVINEVLKKSKFNKEEIDEVIMGQVLTAGGGQNPARQAAINAGLPISKPAHIVNQVCGSGLRAVISGYQSIKLGEVKTVISGGQENMSIAPHSIFYRDEKKLLEQKLVDTMVNDGLIDAFNNYHMGVTAENVAQKFNITRQQQDEFALDSQRKTEIAINNNRFSDELVKISDNENVYNKDEHPRFGLKLSDLEN

SEQ ID NO: 114647 - protein, 100 aa, Unknown
  Bacterial polypetide isolated from the Sargasso Sea
MSKSVVITSAARTAVGSLGKALKNIPSEELGSVVIKEVIKRSDIKSSDIDETIMGQVLTGGSGQNPARQAAMKSGIPKEKPAYIVNQVCGSGLRSIASGF

SEQ ID NO: 114648 - protein, 123 aa, Unknown
  Bacterial polypetide isolated from the Sargasso Sea
MTKKSNDVVFTTALRTSIGKYKGSWAKHQAHDLGAMVIKNIITNSKIEPHLVDEVIMGQVLTGGTGQNPARQAAIKSGIPEDKTGYLVNQVCGSGLRSIVNGYQSILLNDAKIIIAGGQESMS

SEQ ID NO: 114649 - protein, 207 aa, Unknown
  Bacterial polypetide isolated from the Sargasso Sea
MTKKTEDIVFTAALRTAIGKYKGIWSKYQAHDLGESVLKNILKKSKVEPKLIDEVIMGQVLTGGTGQNPARQAAIRAGIPKEKTGYVINQVCGSGLRSIVAGYQSILLNDAKIVIAGGQESMTNSKEEMMLKDGLIDAYNDYHMGITAENVAEKWNISRQEQDAFAVSSQLKTQEAIKNKKFLEEIIDTSSEDEHPRKEVTIENLSN

SEQ ID NO: 114650 - protein, 308 aa, Unknown
  Bacterial polypetide isolated from the Sargasso Sea
ARQVALGSGLPYSTPATTINKVCGSSLEAAMLASNSIRAGHSKVIIAGGMESMSNSPQLLMGQRRGKKMGDSKLVDSMIHDGLWDVYNEIHMGNTGETVANVSGISRNDSDEFSVQSHLRAAKAWESGWFDWESFSVEVPQRRGEPIIFSKDEGVKPNTSTEILSKLRPVFNKEGQVTAGNASTLNDGASAVLLADADFAKEQGWEIIAHVEDYCTSGVAPDQVMSAPIPAIRMLLERNSLDVLDVDIYEHNEAFASASCAVAKEVGIPNDRFNLHGGAVSLGHPLGSSGTRCLITMLGVMRRVEAKS

SEQ ID NO: 114651 - protein, 229 aa, Unknown
  Bacterial polypetide isolated from the Sargasso Sea
MSNKLKEVVIISGIRTPIGTYNGSLKNLRSDQLGSIVIKEALKKSEFTGDEIDEVIMGQVLTAGAGQNPARQAAVNAGIPISKPAHLVNQVCGSGLRAVISGYQSIKLGESNNIISGGQESMSLAPHSIFYRDEKKISEDKLLDTMLNDGLIDAFNNYHMGVTAENVAKKFNITRQEQDEFALKSQKKAELAIANKKFNEELVKINHDGNILDTDEHPRLGLKISDLEK

SEQ ID NO: 114652 - protein, 264 aa, Unknown
  Bacterial polypetide isolated from the Sargasso Sea
MEKNSKDIVFTTALRTAIGKYKGLWNKYQAHDLGTSVIKNILKTSEIEPNDVDEVIMGQVLTGGTGQNPARQAAIKAGIPNDKTGYIVNQVCGSGLRAIVQGYQSILLNDAKIIIAGGQESMSNCKKDYMLKDGLVDVYNNYHMGVTAENVAEKWNISRKDQDIFSVSSQLKAIEAIKNRKFEKEIIEKNFNDEHPRKNISLESLSTLKTVFKKNGTVTAGNSSGINDGAAAVLIMGREEANKRGLKPLAKIISWATCGVDPAL

SEQ ID NO: 114653 - protein, 107 aa, Unknown
  Bacterial polypetide isolated from the Sargasso Sea
WFTTAPSKAIGNVLNKAGLKANDIDLWEINEAFAVVAMAAIEDYNIQYENVNIYGGAVALGHPIGASGARILTTLINGMNHQNVDRGLATLCIGGGEASALIVEKYD

SEQ ID NO: 114654 - protein, 140 aa, Unknown
  Bacterial polypetide isolated from the Sargasso Sea
MGKNLDDIVITNALRTPIGRYKGKLSLYQAHDLGCEVIKNLLEQSKLSSEDVDEVVMGQVLTGNTGQNPARQASLNAGIPNSKTAYLVNQVCGSGLRSIALAYQSILSKDSKVVIAGGQESMSNCDKDMMLKDGLIDVYN

SEQ ID NO: 114655 - protein, 154 aa, Unknown
  Bacterial polypetide isolated from the Sargasso Sea
MTKKEIVITSAVRTAVGSLGKSLKNVPSEELGSCAISSAIDQSNIKNTDIDEVIMGQVLTGGAGQNPARQSAMKCGIPKEKPAFVVNQVCGSGLRSVASGFQSIKAGDSKIIVAGGQESMSLAPHSIHLRDGKKLGETKLTDTMIKDGLWDAFN

SEQ ID NO: 114656 - protein, 238 aa, Unknown
  Bacterial polypetide isolated from the Sargasso Sea
MDNKDIVITSAFRTAISSLDGSLSEYSASELGSFVIKKCMEHSNLQKDDVDTVYMGQVLQAGTGQNPARQSAMKAGIDKSTSATTINQVCGSGLSAISLGFNSLKLKDTKIVIAGGQESMTNSPHYINFRKDKILSENKLKDSMIVDGLIDFYNQYHMGVTAENVAKKFSISRNDQDLFAYKSQIKTKEAIDNGKFNDEIVSIKLKTGSTFNKDEHPRMDVDIEKYLNLNLHLRKTEQ

SEQ ID NO: 114657 - protein, 148 aa, Unknown
  Bacterial polypetide isolated from the Sargasso Sea
MGKNSKDIVFTSVLRTAIGKFNGSLKEFQAHELGKLVIKKILEQSKMKANDIDEVIMGQVLTGGTGQNPARQAAIGAGIPESKTGFVINQVCGSGLRSIVAGYQSILSGDAKIVISGGQESMSNSKEELMLKDGLIDAYNNYHMGITA

SEQ ID NO: 114658 - protein, 221 aa, Unknown
  Bacterial polypetide isolated from the Sargasso Sea
TRENQDQYALESLSRAIAAEKNGHLANEISPVTRISKNGEVLIERDEQPQNARPSKILTLRPAFKENGTVTAANSSSISDGAAALVLMRQQQALDRGLDFQARIVGYAGHANEPAWFSTAPIPAVKKLLKKIKWDVSDVGLWEINEAFAVVPMAFSREFGLSMDKINISGGACALGHPIGASGARIIVTLINNLKTHKLKRGVAAICIGGGEATAVAIELE

SEQ ID NO: 114659 - protein, 67 aa, Unknown
  Bacterial polypetide isolated from the Sargasso Sea
VIKELKIPEEKVNVNGGAVALGHPIGASGCRIVVTLLHEMKRRNVKRGLATLCIGGGMGISMCLERI

SEQ ID NO: 114660 - protein, 252 aa, Unknown
  Bacterial polypetide isolated from the Sargasso Sea
GSIVIKEVLKRSKFKEDEIDEVIMGQVLTAGAGQNPARQAAINAGIPISKPAYMVNQVCGSGLRAIISGYQSIKLGENKNIICGGQENMSMAPHSIFYRDKKEISSDELKDTLINDGLLDAFNNCHMGVTAENVAKKYNITRKEQDQFALNSQKKTERAITNNKFDDEIIKISHNGSVIAQDEYPRLGCKIADLEKLKTAFQENGTVTAGNSSGINDGASAILLTSLEETKKKSIKPLAKLYHGLRWDWILR

SEQ ID NO: 114661 - protein, 275 aa, Unknown
  Bacterial polypetide isolated from the Sargasso Sea
MNNSVVITSALRTAVGSLGKSLKNVPAFELGSAVISKNIEKSKIKNSEVDEIIMGQVLTGGAGQNPARQALIKSGIPIEKPAYLVNQVCGSGIRSVASGFQSIRSGDSQIIIAGGQENMSLAPHAIHLRDGKKLGDIELTDTMIKDGLWDVFNGYHMGVTAENVATKFQVTREQQDEFALSSQEKALKAQKENKFKDEIINYKIKSNKAEIDFTKDEHPRDGINLDALKRLKPVFQKNGTVTAGNASGINDGAAAVTLMSEKESKKRGLKKISYY

SEQ ID NO: 114662 - protein, 178 aa, Unknown
  Bacterial polypetide isolated from the Sargasso Sea
MTDIVIASAARTAVGSFGGSFAKIPAHDLGSTVLSALVERAGIKKEEVSETILGQVLSSGQGQNPARQAHVNAGLPIESAAWGINQVCGSGLRAVALAAQHVMLGDADIVAAGGQENMTLSPHLSHLRSGQKMGDVKYIDSMIKDGLWDAFNGYHMGQTAENVAEKWQISREMQDEFA

SEQ ID NO: 114663 - protein, 245 aa, Unknown
  Bacterial polypetide isolated from the Sargasso Sea
MSKNSNDVVITSALRTPIGRYNGSLKNLSASKLGSIAIKEVIYKSQLDVEEIDEVIMGHVLTSGLGQNPARQASIGAGVPVSKPAHIINQVCGSGLRSVVSGYQSIRLGENQVVVAGGQENMSRANHAIYYREDKKYSEKKLVDTMIKDGLLDSFNDYHMGVTAENVADKYKISRDEQDIFSLNSQKKTEKAYSENKFKNELIKLQIESGDEKFIFEKDEHPRQNLSLDDLKKLKPVFKENGTVT

SEQ ID NO: 114664 - protein, 160 aa, Unknown
  Bacterial polypetide isolated from the Sargasso Sea
MSDKKTVVITSAVRTAIGSLGGTLKNISAHKLGSAVISEAIKKSSLKSSDINEVIMGQVLTGGAGQNPARQASMDSGIPKETPSYVVNQVCGSGLRSIASGFHSILSNNSNIVVAGGQESMSQSPHVIHLRDGKKLGDTKLIDSMIKDGLWDAFNGYHMG

SEQ ID NO: 114665 - protein, 159 aa, Unknown
  Bacterial polypetide isolated from the Sargasso Sea
MSSKSNQVVIISAIRTPIGTYKGSLKKMRSDQLGSIVIKETLKQSKFSKEEIDEVIMGQVLTAGAGQNPARQAAINAGIPISKPAHIVNQVCGSGLRAVISGFQSIKLGESMTIISGGQENMSIAPHSIFYRDEKKISEDKLLDTMVNDGLIDAFNNYH

SEQ ID NO: 114666 - protein, 257 aa, Unknown
  Bacterial polypetide isolated from the Sargasso Sea
MNNSNNEVVIVEAIRTPIGTYKGALKDLRADKLGAIVISEILKRTKFDKNEIDEVIMGQVLTAGVGQNPARQAAINAGIDISKPAHIINQVCGSGLRAVISGYQSIKLGEVKCVISGGQENMSLAPHSIFYRDSKKVSEEQLVDTMINDGLIDAFNNYHMGVTAENIAKKFDILRDEQDDFALNSQEKTEVAIRTNRFDEELIKINQTGGVLYKDEHPRKGLIKSDLKKLKAVFLDHGTVTAGNSSGINDGAAALLL

SEQ ID NO: 114667 - protein, 113 aa, Unknown
  Bacterial polypetide isolated from the Sargasso Sea
MNVKEKSIVITSALRTAIGTFNGSLKNMEAHDLGSIVIKENIKKSKLKSNEVDEVIMGQVLTGAAGQNPARQAAIKAGVPIEKTAYVINQVCGSGLRAIVAGYQSIISNDAKI

SEQ ID NO: 114668 - protein, 168 aa, Unknown
  Bacterial polypetide isolated from the Sargasso Sea
MNSDKDIVITSAFRTAIGSFQGSLKDHKATELGTAVVKKCMEHSNLNGSEVDTVILGQVLQTGCGQNPARQAAINSGIDKDKTATTINQVCGSGLAAVTLGFNSLKLNDTNIVIAGGQESMTNSPHYLNYRMEKNLSEEKLKDSMLIDGLIDAYDDYHMGVTAENVAE

SEQ ID NO: 114669 - protein, 161 aa, Unknown
  Bacterial polypetide isolated from the Sargasso Sea
MREAVIVSAARTPIGKAYRGAYNKTAAPTLASYSIKEAIDRAGIDPKEVEDVVMGCAQQQGTQAINIGRLSGIAAGLPENVPGMTIDRQCSSGMMAIATASKQVITDNMDIVVAGGVESISLVQTADFRVDIDPNVTAHAQHAYMPMIETADHVAEKYNVT

SEQ ID NO: 114670 - protein, 248 aa, Unknown
  Bacterial polypetide isolated from the Sargasso Sea
MSKKLDDVVITSALRTPIGTYKGSLKSLSAEKLGALVIKEAVYKSNLKAAQIDEVIMGHVLTSGLGQNPARQASIHAGIPVTKPAYVVNQVCGSGLRSIVSGFQSIKLDAEMIVVSGGQENMSRAPHALFYRENKKLDDSKLIDTMLNDGLIDSFNHYHMGVTAENVAEKFKISRDEQDNFALNSQKKTQEALSKNKFKDEIIKLEIKTDKKVLVFDKDEHPRGNLILDDLKKLKTVFKEKGTVTPGN

SEQ ID NO: 114671 - protein, 227 aa, Unknown
  Bacterial polypetide isolated from the Sargasso Sea
MTKKSDDIVITCALRTPIGKYNGNLGSYKSYDLGSIVIKNLLLKSKIPASDIDEVVLGQVLTGNTGQNPARQAAINGGIPINKTAYIINQVCGSGLRSIASAYQSLKAKDANIIIAGGQESMTNCDKNVMLKDGLIDVYNKYHMGVTAENVADKWNITREEQDKFAIKSQNKAAEAMKQNKFNDEIISGLIEKDEHPRSDVTIENLSSLKTIFKENGTVTAGNSSGI

SEQ ID NO: 114672 - protein, 179 aa, Unknown
  Bacterial polypetide isolated from the Sargasso Sea
MSEKEKSVVITSALRTAIGSFNGSLKNMQAHELGSIVIKEVIKKSNLKFNDIDDLIMGQVLTAGAGQNPARQAGIKAGLPIEKPAYIVNQVCGSGLRSIAAGYQSIISSDTKIVVAGGQESMTNAPHTINFRNDKKLEESKLIDTMIKDGLWDAFNGYHMGMTAENVAEKWQITRSDQD

SEQ ID NO: 114673 - protein, 164 aa, Unknown
  Bacterial polypetide isolated from the Sargasso Sea
MDSLKPVFEKDGTITAANASKINDGAAALLLMTREKANELELEIHATVVGQSSYANDPEWFTTAPIGAIDKVLEKSSLKVDDIDLWEINEAFAVVPMSVINNFDLDQSKVNVNGGGIALGHPIGASGARILTTLIYAMKKRGVKRGLATLCIGGGEASALVIER

SEQ ID NO: 114674 - protein, 258 aa, Unknown
  Bacterial polypetide isolated from the Sargasso Sea
MNDKDIVITSAFRTPIGSYKGSLSEVSAVDLGAEVIKKCLKNSKLNSKDVDMIFMGQVLQTGSGQNPARQAAMKAGIDKEKSATTINQVCGSGLSAISLGFNSLKLNDANIVIAGGQESMSNAPFYIKPKEIDKEIDKDKLEHSMLIDGLIDSYNHYHMGVTAENVAQKYQITRKDQDEFALNSQNKAAKALENKKFNDEIVPLKLKNNIEFKEDEHPRKDSNIEKLSKLKTVFKTNGTVTAGNSSGLNDGAAANNNA

SEQ ID NO: 114675 - protein, 148 aa, Unknown
  Bacterial polypetide isolated from the Sargasso Sea
MIKNSKDVVITNALRTPIGKYNGNLSKYHSDDLGSNVIKNLLKQSKIIPDEVDEIILGQVLTGNTGQNPARQSAIKAGIPKEKTAYIINQVCGSGLRSIASAYQSIMVKDSKIVIAGGQESMSICDKDLMLKDGWIDVYNKYHMGSYC

SEQ ID NO: 114676 - protein, 183 aa, Unknown
  Bacterial polypetide isolated from the Sargasso Sea
MSKNSSDVVITSALRTPIGRYKGSLKNLSASKLGSIAIKEVIYKSKLDLEEIDEVIMGHVLTSGLGQNPARQASIVAGVPVSKPAHIVNQVCGSGLRSVVSGYQSISLGENKIVIAGGQENMSRATHAIYYREDKKFSENKLVDTMIKDGLLDSFNDYHMGVTAENVAEKYKISRNEQDNFSL

SEQ ID NO: 114677 - protein, 265 aa, Unknown
  Bacterial polypetide isolated from the Sargasso Sea
MSKIPKDVVITSALRTPIGKYKGSLKNISADKLGALVIKEAIFKSSLKGEDVDEVIMGHVLTAGLGQNPARQASIHAGVPVSKPAHIVNQVCGSGLRSIISAYQSIKLEQNEIVVAGGQENMSRATHAIFLRDDKKFIEDNLIDTMIKDGLTDSFNNYHMGVTAENIAEKYHITRREQDIFSISSQKKAKKAYEEKKFNDELIKLQIQSNNEKFIFEHDEYLRNNITLDDLEKLNTVFKENGTVTPGNSSGLNDGAAALVLMTRE

SEQ ID NO: 114678 - protein, 129 aa, Unknown
  Bacterial polypetide isolated from the Sargasso Sea
MLNNSLVVAAKRTPIGSFQGILSPFSAPELGAKVFENIIQNFPMRNSFIDEVIMGNVLSAGLGQAPARQAAIFSGISNKVPSLTINKMCGSGLKAIMLADRAIKCQDAHVVLAGGMESMSNAPFLLSDY

SEQ ID NO: 114679 - protein, 174 aa, Unknown
  Bacterial polypetide isolated from the Sargasso Sea
MSKNSKDIVFVAAQRSAIGRYKGIYKDLQAHDLGSLVIKSLIQKTKLIEDKIDEVIFGQVLTGSCGQNPARQAAINAGIPKEKTAIIINQVCGSGLRSIVNGYQSLITNSANFIIAGGQESMTNSLHDQMMNDGLTDAFYNYHMGVTAENVAKKYNISREEQDKFAYESQHKAN

SEQ ID NO: 114680 - protein, 289 aa, Unknown
  Bacterial polypetide isolated from the Sargasso Sea
MSKNYSDVVITSALRTPIGRYKGSLKNLSASKLGSIVIKEVIYKSKLDLEEIDEVIMGHVLTSGLGQNPARQASIGAGVPVSKPAHIVNQVCGSGLRSVVSGYQSISLGENKIVIAGGQESMSRATHAIFYREDKKFSEKKLVDTMINDGLLDSFNDYHMGVTAENVAEKYKISRDEQDNFSLNSQKKTEKAYSENKFKDELIKLQIEDGDKKFVFEKDEHPRENLSIDDLRKLKTVFKENGTVTPGNSSGINDGAAALVLMSREQSEKKSLESLVKIVSWATCGVEPS

SEQ ID NO: 114681 - protein, 193 aa, Unknown
  Bacterial polypetide isolated from the Sargasso Sea
MSKNSNDVVITSALRTPIGRYKGSLKNLSASKLGSIVIKEVIYKSKLDIEEEIDEVIMGHVLTSGLGQNPARQASIGAGVPVSKPAHIVNQVCGSGLRSVVSGYQSIKLGENQIVIAGGQENMSRATHAIYYREDKKFSENKLVDTMIKDGLLDSFNDYHMGVTAENVADKYKISRDEQDNFSFNSQKKTEKA

SEQ ID NO: 114682 - protein, 143 aa, Unknown
  Bacterial polypetide isolated from the Sargasso Sea
INDGAAALTLMSADEIKKRNIDPMARIVSWASAGVDPSIMGTGPVPSSKRALEKAGWTINDLDLIESNEAFAAQSCAVNKELGWDTSKVNVNGGAIAIGHPIGASGARILVTLLNQMKRQDAKKGLATLCIGGGMGIALCVER

SEQ ID NO: 114683 - protein, 236 aa, Unknown
  Bacterial polypetide isolated from the Sargasso Sea
MSKKDIVITSAFRTAIGSFKGSLGQLKAHQLGSSVIKKCLSHSKLNNFDVDEIFMGQVLQAGGGQNPARQAAMDAGIDKSKTATTINQVCGSGLSAISLGYNSLKINDNKIVIAGGQESMTNSPHYINFRENENIKKENLKDTMLVDGLIDAYNHYHMGVTAENVATKFNISRNEQDEFAYNSQKKAIEAIKSKKFEQEIVPIKLSDKTFEKDEHPRENIELNKLAELKTVFRENG

SEQ ID NO: 114684 - protein, 260 aa, Unknown
  Bacterial polypetide isolated from the Sargasso Sea
LIAGSSSVTVAGGFESMTNAPYLLDKARSGYRMGNNSIYDHMFLDGLEDSIESPGKLMGSFAEDTAQEYQFTREQQDNFAIESLRKAKKANEDGSFREEIVPIKIKSKKTEITIDKDELPFKAKIDKIPQLKPAFREGGSVTAANSSAISDGAAALVLMMRSTAEKKGYKPLAKVLGHATQSQEASKFTTAPIGAINKLYEKVRWSGKDVDLYEINEAFAVVTMAAIRDLNLDQSIVNINGGACALGHPIGASGSRIVVT

SEQ ID NO: 114685 - protein, 137 aa, Unknown
  Bacterial polypetide isolated from the Sargasso Sea
MSKEKTVVITSAVRTAIGSLGGTLKNVPAYKLGSTVISNAIKKSNLKPTEINEIIMGQVLTGGAGQNPARQASMDSGIPKETPSYVVNQVCGSGLRSVASGFQSIMSGHSDIVVAGGQESMSQAPHVVHLRDGKKLG

SEQ ID NO: 114686 - protein, 193 aa, Unknown
  Bacterial polypetide isolated from the Sargasso Sea
PISVKNKKKEVLVEQDEEPFSAPLDKMPSLRPAFSKDGTVTAANASTINDGAALLLLMEEEYAKEKGYKILAKIIAVDAFSQEPCWFTTAPIHSIRRVLEKSNKSISDISQFEINEAFSVVPLVAIKELGLNPELVNPYGGAVALGHPIGASGARILVTLIHGLLAQKNARFGLASICIGGGEANSILIEKCE

SEQ ID NO: 114687 - protein, 140 aa, Unknown
  Bacterial polypetide isolated from the Sargasso Sea
MNNDSFIVNAFRTPIGSFGGELSSFSAPQLGSKVIEHIIKKTNIDVKNYDEVIMGNVLSAGLGQAPARQAAILGGLPNSTECLTINKMCGSGLKAVMIGDNEIRSRGADTIIAGGMESMSNAPLLMKKNPNKIGHHKMLD

SEQ ID NO: 114688 - protein, 168 aa, Unknown
  Bacterial polypetide isolated from the Sargasso Sea
MSKENGVVITSAVRTAIGDLGGSLKNVSAHKLGSTAISSAIEKSNIKASDINEIIMGQVLTGGAGQNPARQAAMDAGIPKETPSYVVNQVCGSGLRSIASGYHSILSGNSNIVLAGGQESMSQSPHVVHLRNGKKLGDTSLVDSMIKDGLWDAFNGYHMGITAENVAQ

SEQ ID NO: 114689 - protein, 113 aa, Unknown
  Bacterial polypetide isolated from the Sargasso Sea
MTEIVIASAARTAVGSFGGSFAKTPAHDLGSTVLSALVERAGIEKEEVSETILGQVLSSGQGQNPARQAHVNAGLPIESAAWGINQVCGSGLRAVALAAQHIMLGDADIVAAG

SEQ ID NO: 114690 - protein, 245 aa, Unknown
  Bacterial polypetide isolated from the Sargasso Sea
MTDKSKEVVIVSAVRTPIGSYKGSLKKMRSDQLGSLVIKEALKFTKFSSDEVDEVIMGQVLTAGAGQNPARQAAINAGIPISKPAHIINQVCGSGLRAVISGYQSIKLGESLNVISGGQENMSIAPHSIFFRDERKISEDKLIDTMINDGLTDAFNNYHMGVTAENIAKKFDISKREQDEFALNSQKKTEDAIKNNKFDDELIKINQGNNMLDLDEHPRKGLKISDLEKLKTVFKENGTVTPGNS

SEQ ID NO: 114691 - protein, 164 aa, Unknown
  Bacterial polypetide isolated from the Sargasso Sea
MQKLRPAFTKDGTVTAANASGINDGAAGVLVMSKEQSENKGIEPLATIKSYATAALDPAIMGVGPVNASTKALDKAGWRVEDLDLVEANEAFAAQALAVNKDMGWDPEIVNVNGGAIAIGHPIGASGARILNTLLFEMKRRDVKRGLATLCIGGGMGVAMCLER

SEQ ID NO: 114692 - protein, 241 aa, Unknown
  Bacterial polypetide isolated from the Sargasso Sea
FDKGRLMGTFAEECADAFGFSREAQDAYALESLRRAQVAISEGRFAEEIVALEVTQGKQQRHIRDDEQPPKTMPEKIPSLKPAFREGGTVTAANSSSISDGAAALLLMRRSEAERWGLQPQAVIHGHAAYADAPNLFTTAPIGAIRKLMERTGWSTEDVDLFEINEAFAVVAMASMRELGLDHAKVNVNGGACALGHPIGASGARILVTLLSALRARGLRRGVAAICIGGGEATAMAVELI

SEQ ID NO: 114693 - protein, 90 aa, Unknown
  Bacterial polypetide isolated from the Sargasso Sea
AGWSVSDLDLVEANEAFAAQACAVNKDMGWDPSIVNVNGGAIAIGHPIGASGARILNTLLFEMKRRSAKKGLATLCIGGGMGVAMCLERD

SEQ ID NO: 114694 - protein, 181 aa, Unknown
  Bacterial polypetide isolated from the Sargasso Sea
MSKNSKDIVFVAAQRSAIGRYKGIYKNLQAHNLGSLVIKSLIEKTKLKVDEIDEIILGQVLTGSCGQNPARQAAINSGIPKEKTAIIINQVCGSGLRSIVNGYQSILTSSANFIIAGGQESMTNSIHDQMMKDGLTDAFYNYHMGVTAENVAAKYNISRQEQDKFALQSQHKANLAINKKK

SEQ ID NO: 114695 - protein, 185 aa, Unknown
  Bacterial polypetide isolated from the Sargasso Sea
MTKNSNDIVITNALRTPIGKYKGNLASYEAHDLGSIVIKNLLIQSKLTPEQIDEVIMGQVLTGNTGQNPARQAAIKAGIPNEKTAYIINQVCGSGLRSIVSGYQNLKLNDANVIIAGGQESMTNCDKDVMLKDGLIDVYNRYHMGVTAENVAEKWNISRKEQDIFALDSQYKAQVAIKNNKFNDE

SEQ ID NO: 114696 - protein, 163 aa, Unknown
  Bacterial polypetide isolated from the Sargasso Sea
MTKNYNDVVITSALRTPIGGYKGSLKNLSASKLGSIVIKEVIYKSKLNTDEIDEVIMGHVLTSGLGQNPARQASIGAGVPVSKPAHIINQVCGSGLRSVVSGYQSISLGENKIVIAGGQENMSRATHAIYYREDKKFSEKKLVDTMIKDGLLDSFNDYHMGIT

SEQ ID NO: 114697 - protein, 130 aa, Unknown
  Bacterial polypetide isolated from the Sargasso Sea
MNSKKKNVVITSALRTAIGSFNGSLKNMQAHDIGSIVIKEVIAKSNLKSKDIDDLIMGQVLTAGTGQNPARQAGIKAGLAVEKPAYIINQVCGSGLRSIAAGYQSIISNDAVIVVSGGQESMSNAPHAIN

SEQ ID NO: 114698 - protein, 206 aa, Unknown
  Bacterial polypetide isolated from the Sargasso Sea
KTIKAMDSKKFIDEIVPIKLKNDILVKEDEYPRRDTSIEKLSKLKTVFKSNGTVTAGNSSGLNDGAAAIAMMNYKLSKEKKLLPLAKIVSWAQCGVDPSLMGTGPIPATKLALKKANWKVSDLELVESNEAFAAQSIAVIKELGLNSDIVNVNGGAISLGHPIGASGSRIVVTLLHEMKKRKLKKGLATLCIGGGMGIAMCVENFI

SEQ ID NO: 114699 - protein, 243 aa, Unknown
  Bacterial polypetide isolated from the Sargasso Sea
MQKNSKDVVIVSALRTVIGKYNGIWAKIEAHNLGKSVIQNILSQSKVNQSSIDEVIIGQVLTGGTGQNPARQAAKGAGIPDDKTAYVINQVCGSGLRAIISGYQSILLNDSKIVIAGGQENMSLSNKDNMLQDGLIDAFNNYHMGVTAENVAEKCNISRKEQDSFALSSQIKTQEAIKNNKFKDEILDNKSNQIFLDEHPRSDVTIESLSKLKPSFKENGTVTAGNSSGINDGAAAVLIMTRE

SEQ ID NO: 114700 - protein, 119 aa, Unknown
  Bacterial polypetide isolated from the Sargasso Sea
MSKEKTVVITSAVRTAIGSLSGALKNIPAYKLGSTVISGAIKKSNLKFEDISEVIMGQVLTGGAGQNPARQAAIDSGIPKEIPSYVVNQVCGSGLRSIASGFQSIMSNDSSIVVQEDKK

SEQ ID NO: 114701 - protein, 188 aa, Unknown
  Bacterial polypetide isolated from the Sargasso Sea
LVIKKILEDTKLNSNLIDEVIMGQVLTGNAGQNPARQAAIRAGIPKEKTGYIINQVCGSGLRSIAAGYQSILLNEAKIIIAGGQESMSNSNEDEMLKDGLIDAYNNYHMGITAENVAEKWNISRQEQDSFAVSSQQKTQEAIKFKKFDEELIDKAISDQHPRSDVTLESLSTLKPAFKNNGTVTPGNS

SEQ ID NO: 114702 - protein, 242 aa, Unknown
  Bacterial polypetide isolated from the Sargasso Sea
LWDIFNNYHMGMTAENLAEKYNISREEQDKFAIESQGKAKKAMRQGVFKPEIVPVELAKGVFDTDEHPREVSMAALSRLKPVFTTEGSVTAGNASGINDGAAAMIVSSEEKAKELGLKPVGEVISYAVSGVEPSVMGIGPVPAMNKALAKAGLTIDDIDLVELNEAFAVQSLAVLSDFPIPAEKLNVNGGAVALGHPIGASGSILIVKLLHEMQRRKVKRGLVSLCVGGGQGIAMVIENPNA

SEQ ID NO: 114703 - protein, 172 aa, Unknown
  Bacterial polypetide isolated from the Sargasso Sea
MSKNSNDVVITSALRTPIGRYKGSLKNLSASKLGSIVIKEVIYNSKLDVEEIDEVIMGHVLTSGLGQNPARQASIGAGLPVSKPAHIVNQVCGSGLRSVVSGYQSISLGENQIVVAGGQENMSRATHAIYYREDKKFSEKNLVDTMIKDGLSDYFNDYHMGVTAENVAEKYK

SEQ ID NO: 114704 - protein, 189 aa, Unknown
  Bacterial polypetide isolated from the Sargasso Sea
MTDKSKEVVIVSAIRTPIGTYKGSLKNMRSDQLGSIVIKEVLKKSEFDKNEIDEIIMGQVLTAGAGQNPARQAAINAGIPISKPAHLINQVCGSGLRAVISGYQSIMLGDANKVIAGGQENMSKAPHSIFYRDQKKISQDKLLDTMINDGLIDAFNNYHMGVTAENVAKKFNISRQEQDEFALNSQKKT

SEQ ID NO: 114705 - protein, 216 aa, Unknown
  Bacterial polypetide isolated from the Sargasso Sea
MTDIVIASAARTAVGSFGGSFANVPAHDLGSTVLSALVERAGIKKEEVSETILGQVLSSGQGQNPARQAHVNAGLPIESAAWGINQVCGSGLRAVALAAQHVMLGDADIVAAGGQENMTLSPHVSHLRSGQKMGDVKYIDSMIKDGLWDAFNGYHMGQTAENVAEKWQISREMQDEFAVASQNKAENAQKLDKFKDEIIPFVVKHRKGEITVDKDE

SEQ ID NO: 114706 - protein, 118 aa, Unknown
  Bacterial polypetide isolated from the Sargasso Sea
MSKFLKEVVFVSALRTSIGRYKGIHSKLKAHELGSQVIKKLIKNTNLKTKEINEVIFGQVLTGSTGQNPARQAAISAGIPFEKTALLINQVCGSGLRSIVSGYQSIMMNDSEIVIAGG

SEQ ID NO: 114707 - protein, 262 aa, Unknown
  Bacterial polypetide isolated from the Sargasso Sea
KGSLKNISADKLGALVIKEAIFKSSLKGEDVDEVIMGHVLTAGLGQNPARQASIHAGVPVSKPAHIVNQVCGSGLRSIISAYQSIKLEQNEIVVAGGQENMSRATHAIFLRDDKKFIEDNLIDTMIKDGLTDSFNNYHMGVTAENIAEKYHITRREQDIFSISSQKKAKKAYEEKKFNDELIKLQIQSNNEKFIFEHDEYLRNNITLDDLEKLNTVFKENGTVTPGNSSGLNDGAAALVLMTREKAELKSLEILASIVSWSS

SEQ ID NO: 114708 - protein, 308 aa, Unknown
  Bacterial polypetide isolated from the Sargasso Sea
DVVITSALRTPIGKYKGSLKNISADKLGALVIKEAIFKSSLKGEDVDEVIMGHVLTAGLGQNPARQASIHAGVPVSKPAHIVNQVCGSGLRSIVSAYQSIKLEQNEIVVAGGQESMSRATHAIFLRDDKKFIEDNLIDTMIKDGLTDSFNDYHMGVTAENIAEKYHITRREQDTFSISSQKKAKKAYEEKKFNDELIKLQIQSNNEKFIFEHDEYLRNNITLDDLEKLNTVFKENGTVTPGNSSGLNDGAAALVLMTREKAELKSLEILASIVSWSSSGVEPSLMGLGPIPSIKEALIKAQWQVEDID

SEQ ID NO: 114709 - protein, 106 aa, Unknown
  Bacterial polypetide isolated from the Sargasso Sea
FTTAPSKAIGKVLNKAGLKANDIDLWEINEAFAVVAMAAIEDHNIQYENVNIYGGAVALGHPIGASGARILTTLIHGMNRQNVDRGLATLCIGGGEASALIVEKYD

SEQ ID NO: 114710 - protein, 127 aa, Unknown
  Bacterial polypetide isolated from the Sargasso Sea
KNRNIEPMARIVSWASAGVDPSIMGTGPIPASRRALEKAGWSINDLDLIESNEAFAAQSCAVNKELGWDTSKVNVNGGAIAIGHPIGASGTRILVTLLHQMKKQDAKKGLATLCIGGGMGIALCVER

SEQ ID NO: 114711 - protein, 123 aa, Unknown
  Bacterial polypetide isolated from the Sargasso Sea
MNEVVIVQAIRTPIGAYKGSLKKLSADKLGSIVIKEILRKTKFNKDDIDEIIMGQVLTAGGGQNPARQAALNAGIDISKPAHIVNQVCGSGLRAVISGYQSIRLGEAKSVISGGQENMSLAPH

SEQ ID NO: 114712 - protein, 245 aa, Unknown
  Bacterial polypetide isolated from the Sargasso Sea
MNKKPYDVVITSALRTPIGRYKGSLKNLSASKLGSIVIKEVIYKSKLDVEEIDEVIMGHVLTSGLGQNPARQASIGAGVPVSKPAHSVNQVCGSGLRSVVSAYQSISLGENQIVVAGGQENMSRATHAIYYREDKKFSEKKLVDTMIKDGLLDSFNDYHMGVTAENVAEKYKISRDEQDNFSLNSQKKTEKAYIENKFKDELIKLQIEDSNKKFIFEKDEHPRQNLSLDDLKNLKTVFKKNGTVT

SEQ ID NO: 114713 - protein, 207 aa, Unknown
  Bacterial polypetide isolated from the Sargasso Sea
MIKKDIVITSASRTAVGSLGKSLKNIPGDDMGSAVILDTIKKTNIKTEEVDEVIMGQVLSASTGQNPARQAAMKSGIPKEKPAYVVNQVCGSGLRSIASGYQSIIAGDSKIVIAGGQESMSLAPHAVHLRDGKKLGNTEMTDTMIKDGLWDAFHGYHMGMTAENVSTKFQVTREDQDKFALKSHEKTLKAQKENKFKEEIINFKIKS

SEQ ID NO: 114714 - protein, 143 aa, Unknown
  Bacterial polypetide isolated from the Sargasso Sea
MANEVFIVSGARTPIGSFMGNLSSFSAPELAAAAIQKTLDTSSIEADQIDEVLIGNVVSAGLKQAPARQAMRLAGIPDRCGATTINKVCGSGMKATMLAFDLIRSGSADTVLTGGMESMSNAPYLLANARSGLRMGHSDTLDS

SEQ ID NO: 114715 - protein, 228 aa, Unknown
  Bacterial polypetide isolated from the Sargasso Sea
MNNSLNDVVIIEAVRTPIGAYKGSLKELSADKLGSIVIKEILRKSKLDKDDIDEIIMGQVLTAGGGQNPARQAAINAGINISKPAYIVNQVCGSGLRAVISGYQSIKLGEAKNVISGGQENMSLAPHSIFYRDNKKISEKHLIDTMINDGLIDAFNNYHMGVTAENVAKKFNISRAEQDDFALNSQKKTEIAINTNKFKEELIKINQPGINLDKDEHPRKELNKSDLE

SEQ ID NO: 114716 - protein, 212 aa, Unknown
  Bacterial polypetide isolated from the Sargasso Sea
MTDIVIASAARTAVGSFGGSFAKIPAHDLGSTVLSALVERAGIKKEEVSETILGQVLSSGQGQNPARQAHVNAGLPIESAAWGINQVCGSGLRAVALAAQHIMLGDADIVAAGGQENMTLSPHVSHLRSGQKMGDVKYIDSMIKDGLWDAFNGYHMGQTAENVAEKWQISREMQDEFAVASQNKAENAQKLNKFKDEIVPFVVKHRKGDITV

SEQ ID NO: 114717 - protein, 163 aa, Unknown
  Bacterial polypetide isolated from the Sargasso Sea
LKPAFDKDGSITAANASKLNDGAAVMLITSEENAKDLGLKPLVRIIEQASASHQPEWFTTAPSKAIGKVLNKAGLKANDIDLWEINEAFAVVAMAAIEDYNIQYENVNIYGGAVALGHPIGASGARILTTLINGMNRQNVDRGLATLCIGGGEASALIVEKYD

SEQ ID NO: 114718 - protein, 98 aa, Unknown
  Bacterial polypetide isolated from the Sargasso Sea
MSNSIKDVVIVGAVRTPIGTYKGSLKNMRSDQLGSIVINGLMEKSKFSKEEIDEVIMGQVLTAGAGQNPARQAAINAGIPNSKTAHIVNQVCGSGLRS

SEQ ID NO: 114719 - protein, 186 aa, Unknown
  Bacterial polypetide isolated from the Sargasso Sea
MYSHSVIIKARRTPIGSFQGELSSFSAVDLASFVIEDIFKDRRISPEMVNEIILGNVLSAAQGQAPARQAALKGGCINLIEALTINKMCGSGLKAIMLADQAIRCGDAELVFAGGMESMSNAPHLLTNLRSGERLGHSTVIDSLIHDGLWDVYTQQHMGSCAELLAEERKYSREDQDNFAIKSYSK

SEQ ID NO: 114720 - protein, 200 aa, Unknown
  Bacterial polypetide isolated from the Sargasso Sea
QVLTTGGGQNPARQAAINAGLSISKPAHIVNQVCGSGLRAVISGFHSIKLGYAKSVIAGGQENMSISPHSIFYREEKKIAEDKLLDTMIHDGLLDAFNNYHMGVTAENVAKKFSISRQDQDEFALNSQRKTEQAFNNGRFDNEMVKVNHNGNFLDRDEYPRFNLKISDLEKLNSVFQNDGTVTAGNSSGINDGAAALLLT

SEQ ID NO: 114721 - protein, 158 aa, Unknown
  Bacterial polypetide isolated from the Sargasso Sea
MSGNSKDVVIVEAARTPIGTYNGSLKDIKAHQLGSIVINEVLKRSNVNPNEVDEIIMGQVLTAGMGQNPARQAAINAGIPVSKPAYIVNQVCGSGLRAIISGFQSIKLGDSKIVISGGQENMSIAAKIEIKKNEKKNSENKFLDVMMNDGLLDAFKNY

SEQ ID NO: 114722 - protein, 152 aa, Unknown
  Bacterial polypetide isolated from the Sargasso Sea
MKNIVITSATRTAIGSLNRSLKNVQGFELGSCVIKDSILKSKINNDEVDEVILGQVLTGGAGQNPARQASIHSGIPKEKPAYIVNQVCGSGIRSVASGFQSIKSGDSNIIIAGGQESMSLAPHAIHLRDGQKLGDTELTDTMIQDGVWDAFH

SEQ ID NO: 114723 - protein, 257 aa, Unknown
  Bacterial polypetide isolated from the Sargasso Sea
GHGQTLDHMMLDGLENAYDGKAMGCFAQDTADSESITREQMDEFALGSLSKANKAIADGTFVDEIAPVTVKSRKGDLVVDTDEGPGNARPEKIPALRPAFKKDGTVTAANSSSISDGAAALVIMSESKANALGLKPLAKIVAHATNAIKPEDFTVAPVGAIEKVFAQTGWTKDDVDLFEINEAFAMVTMLGMNKLGLDSSKVNIKGGACALGHPIGASGARIVVTLLHALKQQGLKKGVAALCIGGGEGTALAVEML

SEQ ID NO: 114724 - protein, 137 aa, Unknown
  Bacterial polypetide isolated from the Sargasso Sea
MTKNSNDVVITSALRTPIGGYKGSLKNLSASKLGSIVIKEVIYKSKLNIEEIDEVIMGHVLTSGLGQNPARQASIAAGVPVSKPAHIVNQVCGSGLRSVVSGYQSISLGENKIVIAGGQESMSRATHAIFYREDKKF

SEQ ID NO: 114725 - protein, 88 aa, Unknown
  Bacterial polypetide isolated from the Sargasso Sea
LFSGLDKSTQCLSINKMCGSGLQCIVIADQIINNNPDEIIIAGGMENMSQSPHYLLNSRTGNRLGDGKLVDGMIIDGLWDVYNNKHMG

SEQ ID NO: 114726 - protein, 145 aa, Unknown
  Bacterial polypetide isolated from the Sargasso Sea
MSFDKNSIVITSAVRTAIGTFRGSLKEMQAKDLGALVTKAAMKKSNLNPPEVDELIMGQVLTGATGQNPARQAAIQSGLPNEKTAYVINQVCGSGLRSIAAGYQAIVSNDSKIIIAGGQESMTNAPHAINFRNGEKLEESKLVTQ

SEQ ID NO: 114727 - protein, 87 aa, Unknown
  Bacterial polypetide isolated from the Sargasso Sea
TTTDVDLWEINEAFAMVTMLAINELKLDESKVNVNGGACALGHPIGASGARILVTLIHALKNRGLKKGVASLCIGGGEAVAMAVEAY

SEQ ID NO: 114728 - protein, 192 aa, Unknown
  Bacterial polypetide isolated from the Sargasso Sea
MNEVVIVEAIRTPIGAYKGSLKELSADRLGSIVIREILRKSKLGKNDIDEVIMGQVLTAGGGQNPARQAAINAGIDISKPAHIVNQVCGSGLRAVISGYQSIKLGEVKIVISGGQENMSLAPHSIFYRDSKKILEEHLIDTMINDGLIDAFNNYHMGVTAENVAKKFNISRVEQDNFALNSQKKTEIAINTN

SEQ ID NO: 114729 - protein, 273 aa, Unknown
  Bacterial polypetide isolated from the Sargasso Sea
MNEVYITSALRTAVGSLGKSLKNVKAEELGSKVIKNVIKESKLQSQDIDEVIMGQVLTGGSGQNPARQAAIKSGVPKEKPAFVVNQVCGSGIRSIASGFQSIKAGDSKILVAGGQENMSLAPHMIHLRDGKKLGDTELIDTMIRDGLWDAFNGYHMGVTAENVAEKFQVTRKEQDKFALNSQEKALKAQKENKFKNEIVDLMVASKKTEINFKKDEHPREGINLDTLSRLKPVFKKDGTVTAGNASGINDGAAAVMLMSSEEAKKKDIKKFGI

SEQ ID NO: 114730 - protein, 237 aa, Unknown
  Bacterial polypetide isolated from the Sargasso Sea
MKKNSKDVVITVALRTAIGRYKGVWSKFKAHDLGEMVIKNILNNSKIEPKLIDEVVMGQVLSGDTGQNPARQAAIRAGIPNEKTGYLINQVCGSGLRAIVAGYQSILLGDAKIIIAGGQESMTSCNQEVMLKDGLIDAFNNYHMGITAENVAEKWNITRNDQDIFAASSQTKAQEAIKNNKFNEEIINDQSSTDEHPRSGVTIETLSKLKPAFKENGTVTAGNSSGINDGAAAVLLM

SEQ ID NO: 114731 - protein, 170 aa, Unknown
  Bacterial polypetide isolated from the Sargasso Sea
MQRKSVIVAAKRTPIGSFQGQLSSYSASDLGSFVIKQILQETKLDKNSIDEVILGNVLSAGQGQAPARQATIKSGCPNTIETLTINKMCGSGLKAVMLADQIIRCGDADIILAGGMESMSNTPFISQNMRLGQRLGHARFIDSMIHDGLWDAYTNQHMGNCAEMLAKDRN

SEQ ID NO: 114732 - protein, 214 aa, Unknown
  Bacterial polypetide isolated from the Sargasso Sea
QDQYSVQSYNRAQNAQEKGYFSDEIVPIKNADGTLICSDEEPTKAKYDKIPLIKPAFDKNGTITAANASKLNDGAAAVMLMSKKKVEECGIKPMARILSHCSFAHDPKWFTTAPGYAITKVLKQSGLDKNDIDLWEINEAFAAVAMAAIDDFQLDSTKVNINGGSIALGHPIGASGARILTTLIYALEKMNKSLGLATLCIGGGEASAMIIEKL

SEQ ID NO: 114733 - protein, 138 aa, Unknown
  Bacterial polypetide isolated from the Sargasso Sea
MSKIPKDVVITSALRTPIGKYKGSLKNISADKLGALVIKEAIFKSSLKGEDVDEVIMGHVLTAGLGQNPARQASIHAGVPVSKPAHIVNQVCGSGLRSIISAYQSIKLEQNEIVVAGGQENMSRATHAIFLRDDKKNF

SEQ ID NO: 114734 - protein, 193 aa, Unknown
  Bacterial polypetide isolated from the Sargasso Sea
MNEVVIVEAIRTPIGAYKGSLKELSADKLGSIVIREILRKSKLDKDDIDEVIMGQVLTAGSGQNPARQAAINAGIHFSKPAHIVNQVCGSGLRAVISGYQSIKLGEVKNVISGGQENMSLSPHSILYRDNKKISEKHLVDTMINDGLIDAFNNYHMGVTAENVAKKFNISRVHQDEFALNSQKKTETAINNNR

SEQ ID NO: 114735 - protein, 224 aa, Unknown
  Bacterial polypetide isolated from the Sargasso Sea
MKEKSIVITSALRTAIGSFNGALKNMQAHDLGKFVIKESIKNSKLKLDEIDEVIMGQVLTSASGQNPARQAAINAGVPIKKTAYVINQVCGSGLRSVASGYQSIISNDSKIVIAGGQESMSNAPHAVHFRNRKKLEEKDLIDTMIKDGLWDAFNGYHMGVTAENVANKWGITRKDQDHFAFSSQNKTANAQKAGKFRNEIIPIVLKSSGKNITFEVDEHPRNEI

SEQ ID NO: 114736 - protein, 128 aa, Unknown
  Bacterial polypetide isolated from the Sargasso Sea
KAQNKTVLAHVVGHATHSQEPELFTVAPVGAVTKLLAKLGWTTSDVDLWEINEAFAMVTMLAIKELKLDVNKVNVNGGACALGHPIGASGARLLVTLIHALKARGLKRGIATLCIGGGEAVALAVELP

SEQ ID NO: 114737 - protein, 169 aa, Unknown
  Bacterial polypetide isolated from the Sargasso Sea
MSKENGVVITSAVRTAIGDLGGSLKNVSAHKLGSTAISSAIEKSNIKASDINEIIMGQVLTGGAGQNPARQAAMDAGIPKETPSYVVNQVCGSGLRSIASGYHSILSGNSNIVLAGGQESMSQSPHVVHLRNGKKLGDTSLVDSMIKDGLWDAFHGYHMGITAENVAQK

SEQ ID NO: 114738 - protein, 396 aa, Unknown
  Bacterial polypetide isolated from the Sargasso Sea
MTTQDPIVIVGMARTPMGGFQGDLAAASASDLGAVAIRAALERANVPAERIDEIVFGCVLPAGQGQAPARQAALKAGLPLAAGATTVNKMCGSGMKAAMFAHDLLLAGSAGVAVAGGMESMTNAPYLLPKARAGMRMGHGQVLDHMFLDGLEDAYEKGRLMGTFAEDCAQAYQFTREAQDAFAIASLTRAQRAIADGHFVSEIAPVTVKAGKVETVVSIDEQPGKAKLDKIPTLKPAFRDGGTVTAANASSISDGAAALVMMRRSEAERLGLTPKAVIVGHSTYADKPGLFATAPIGALRKLSEKTGWNLRDVDLFEINEAFAVVPMAAMRDLDLPHEKVNVHGGACALGHPIGASGARVMVTLLAALETYGMKRGVASLCIGGGEATAIAIERVA

SEQ ID NO: 114739 - protein, 396 aa, Unknown
  Bacterial polypetide isolated from the Sargasso Sea
MSEKENIVITGMARTPMGAFQGTLKDASCAELGADSIRAALERSRVGADEVSETIMGCVLPAGQGQAPARQAALGAEMPLSVCCTTVNKMCGSGMKSAMLAHDLLLGGEERILVAGGMESMTNAPYLLPRARSGMRLGHGEVVDHMFLDGLEDAYDRGKLMGTFAEATAGRYGFSREAQDEFAIRSLTRAKKAIEEGIFKEEIVPVTIKGRKGDAVVETDETPLKANLEKIPTLKPAFAKDGTVTPANSSSISDGAAALVMMRESTAEKRGIRPIARILGHTEHAHEPAWFTTAPVTAIKKLLEKLEWNAGDVDLYEINEAFAVVTMAAISELELDPEKVNVHGGACALGHPIGASGARIIVTLLAALKHHGQRRGLASLCIGGGEATALAVELIE

SEQ ID NO: 114740 - protein, 255 aa, Unknown
  Bacterial polypetide isolated from the Sargasso Sea
MNNKSYIVQSARTPIGSFGSQLLNFSAPELGALVIEEIIERTGLDKDTVEEVIFGNVLSAGIGQAPARQAALISGLPDKVECLTINKMCGSGLKAVMLADQAIRTNSAGVIIAGGIESMSNAPYLISKSLSRFGHKRMIDSMIHDGLWDAYNDMHMGNCAEMLATKRSYTREDQDKYSIQSYKRAQNAQEKGYFSDEIVPIKNADGTLIYSDEEPTKAKYDKIPLIKPAFDKNGTITAANASKLNDGAAAIMLMS

SEQ ID NO: 114741 - protein, 230 aa, Unknown
  Bacterial polypetide isolated from the Sargasso Sea
MLRTIWQITRDAQDAFAMSSQCKAELAQKEGKFKDEIIAVNVKSRRGDTIVEEDEYPKHGTNLETLGSLRPAFSKEGTVTAENASGINDGAAAVVLMSSEDARRRGIEPLARIKSFATRGVDPSIMGTGPIPASRAALEKAGWTVDDLDLIEANEAFAAQACAVNKDMGWDTQKVNVNGGSIALGHPIGASGARVLITLLHEMKKRDAKKGLTTLCIGGGMGVAMCLERD

SEQ ID NO: 114742 - protein, 176 aa, Unknown
  Bacterial polypetide isolated from the Sargasso Sea
MSNKSIEVVIVSATRTPIGTYKGSLKKLRCHELGSIVIKDVLKKSKYTAEEINEVIMGQVLTAGAGQNPARQAAMNAGIPISKPAYTINQVCGSGLRAVITGYQSIKLGEFKNVISGGQENMSLAPHSIFYRDEKKISEDKLLDTMINDGLIDAFNNYHMGVTAENVAKKFSITRQ

SEQ ID NO: 114743 - protein, 396 aa, Unknown
  Bacterial polypetide isolated from the Sargasso Sea
MSTEQFNQEIVIVAAKRTPMGGFQGSLSGVTSPSLAATAIKALLADTQVAPDKVDEVLMGCVLPAGLGQAPARQATLGAGLPLSVGATTVNKVCGSGMKTVMLAHDLLKAGSAKLVVAGGMESMSQAPYLLDKARAGMRMGHGKVLDHMFLDGLEDAYTGGAMGTFAQKTADEYGLTREQMDAFALSSLEKANAAINSGAFKAEIVPVTVSDRRGDVTIDTDEQPGNARPEKIPALRPAFAKDGTITAANSSSISDGAAALMLTTRANAEQLGLTVLATIKGHTTHAQEPSLFTTAPVGAMAKLLSNVGWSKDEVDLFEINEAFAMVTMLAVSELGLDMAKVNVNGGACALGHPIGCSGARLLVTLIHALKARGLKRGVASLCIGGGEATAMAIEV

SEQ ID NO: 114744 - protein, 386 aa, Unknown
  Bacterial polypetide isolated from the Sargasso Sea
MSVPVICAYARTPVGKFRGSLSQFSAVELGIMAVKEVCVRSGIDPAGGVVDQVYMGQVLQAGCGQAPARQVAIGAGLPVTTPCTTINKVCGSSLKAAMIAATEIRAGVSEVVIVGGMESMTNAPHIARNVAKGQDVPFGSLESVLIGDGLKDAFTGESMGNTGETVAEEHGITREESDKFAVRSHSMANEAWEKGWISEEVFPVGSLSIDEGIRPETNEEILSSLRTVFSEDGQVTAGNASQVSDGASAVLIASEEKAKREGWPILARIVDYATSGVESNRVMSAPIPTVEKLLKITGMRLEDVDILEHNEAFASASCAIRDSLGIPDGSFNPHGGAIAIGHPLGATGARCLMTLVNAMRRRGSRRGIVTVCLGGGNAVAMMVECP

SEQ ID NO: 114745 - protein, 148 aa, Unknown
  Bacterial polypetide isolated from the Sargasso Sea
MVNKLKEVVIVSAVRTPIGTYKGSLKEIRSNQLGSIVIREVLKKSKFNNDEVDEVIMGQVLTAGEGQNPARQAAVNAGIPISKPAYIVNQVCGSGLRAVISGFQSIKLGESKNVISGGQENMSIAPHSIFFREKKKITEKDLSDTMIN

SEQ ID NO: 114746 - protein, 122 aa, Unknown
  Bacterial polypetide isolated from the Sargasso Sea
MNEVVIVEAIRTPIGAYNGSLKELSADKLGSIVIREILRKSKLGKNDIDEVIMGQVLTAGGGQNPARQAAINAGIDISKPAHIVNQVCGSGLRAVISGYQSIKLGEVKNVISGGQENMSLAP

SEQ ID NO: 114747 - protein, 99 aa, Unknown
  Bacterial polypetide isolated from the Sargasso Sea
MPKNLKDIVFVSALRTSIGKLNGIYSKYKSHELGASVIKETLNRTNLDPKKIDEVIMGQVLTGLTGQNPARQSAMSANIPNDKTAYVINQVCGSGLRSV

SEQ ID NO: 114748 - protein, 199 aa, Unknown
  Bacterial polypetide isolated from the Sargasso Sea
MDDKSYIVQSVRTPIGSFGSRLSHFSAPELGSLVIKEIVTKIGLDKEIIEEVIFGNVLSAGIGQAPARQAALLSGLPDKVECLTINKMCGSGLKAVMLADQAIRTNSAGVVIAGGTESMSNAPYLIPKSLSRFGHKRMIDSMIHDGLWDAYNDMHMGNCAEMLAAKRNYTRDNQDKYCIQSYNRAQNAQQKGYFSDEIC

SEQ ID NO: 114749 - protein, 94 aa, Unknown
  Bacterial polypetide isolated from the Sargasso Sea
MEKLEWNAGDVDLYEINEAFAVVTMAAISELELDAEKVNVHGGACALGHPIGASGARIIVTLLAALKHHGQRRGLASLCIGGGEATALAVELIQ

SEQ ID NO: 114750 - protein, 221 aa, Unknown
  Bacterial polypetide isolated from the Sargasso Sea
EAQDEYAIESYSRAQQATTDGIFRTEIVPVVIPQRKGEPLVIDEDEEPAKARFEKIPALKPAFDKDGTITAANSSKLNDGAAVMLITSEENAKDLGLKPLVRILEQASASHQPEWFTTAPSKAIGKVLNKAGLKANDIDLWEINEAFAVVAMAAIEDYNIQYENVNIYGGAVALGHPIGASGARILTTLINGMNRQNVDRGLATLCIGGGEASALIVEKYD

SEQ ID NO: 114751 - protein, 146 aa, Unknown
  Bacterial polypetide isolated from the Sargasso Sea
MSKENGVVITSAVRTAIGDLGGSLKNVSAHKLGSTAISNAIKKSNIKASDINEIIMGQVLTGGAGQNPARQAAMDAGIPKETPSYVVNQVCGSGLRSIASGYHSILSGSSNIVLAGGQESMSQSPHVVHLRNGKKLGDTSLVDSMI

SEQ ID NO: 114752 - protein, 171 aa, Unknown
  Bacterial polypetide isolated from the Sargasso Sea
TWGNIDGMQKLRPAFTKDGTVTAANASGINDGAAGVLVMSKNQSEKKGIEPLATIKSYATAALDPAIMGVGPINASRKALDKAGWSVKDLDLVEANEAFAAQALAVNQDMGWDPEIVNVNGGAIAIGHPIGASGARILNTLLFEMKRRDVKRGLATLCIGGGMGVAMCLER

SEQ ID NO: 114753 - protein, 197 aa, Unknown
  Bacterial polypetide isolated from the Sargasso Sea
MTDIVIASAARTAVGSFGGSFANVPAHELGATVLSALVERAGIKKEEVSETILGQVLSSGQGQNPARQAHVNAGLPIESAAWGINQVCGSGLRAVALAAQHVMLGDADIVAAGGQENMTLSPHVSHLRSGQKMGDVKYIDSMIKDGLWDAFNGYHMGQTAENVAEKWQISREMQDEFAVASQNKKENAQKLDKFKDE

SEQ ID NO: 114754 - protein, 396 aa, Unknown
  Bacterial polypetide isolated from the Sargasso Sea
MSTEQFNQEIVIVAAKRTPMGGFQGSLSGVTSPSLAATAIKALLADTQVAGDKVDEVLMGCVLPAGLGQAPARQATLGAGLPLSVGATTVNKVCGSGMKTVMLAHDLLKAGSAKLVVAGGMESMSQAPYLLDKARAGMRMGHGKVLDHMFLDGLEDAYTGGAMGTFAQKTADEYGLTREQMDAFALSSLEKANAAIQSRAFKAEIVPVTVSDRRGDVIIDTDEQPGNARPEKIPALRPAFAKDGTITAANSSSISDGAAALMLTTRANAEQLGLTVLATIKGHTTHAQEPSLFTTAPVGAMAKLLSNVGWSKDEVDLFEINEAFAMVTMLAVSELGLDMAKVNVNGGACALGHPIGCSGARLLVTLIHALKARGLKRGVASLCIGGGEATAMAIEV

SEQ ID NO: 114755 - protein, 218 aa, Unknown
  Bacterial polypetide isolated from the Sargasso Sea
DQDNFSLNSQKKAIEAIKENKFKEEIIPVKLNNQKIFDKDEFPRLDSNIQKLSTLKTVFKQNGTVTAGNSSGLNDGAAALVLMNYKTSKDRDLKPIAKIVSWAQCGVDPALMGTGPIPASKLALKKAGWNINDLDLIESNEAFSAQSLAVIKELGLKNELVNVNGGAIALGHPIGASGARILVTLVHEMQKRKSKKGLATLCIGGGMGIAMCIEGIFN

SEQ ID NO: 114756 - protein, 272 aa, Unknown
  Bacterial polypetide isolated from the Sargasso Sea
MSASPHVLPGSRDGFRMGDAKLVDTMIVDGLWDVYNQYHMGITAENVAKEYGITREEQDAFAALSQNKAEAAQKAGRFDDEIVPVAIPQRKGEPLQFATDEFVRHGVTAESLAGLKPAFSKDGSVTAANASGLNDGAAAVLVMSAQKAAALGLTPLARIKAYANAGVDPSVMGMGPVPASRRALERAGWTPGDLDLMEINEAFAAQALAVHKQMGWDTSKVNVNGGAIAIGHPIGASGCRILVTLLHEMAKRDAKRGLASLCIGGGMGVALA

SEQ ID NO: 114757 - protein, 285 aa, Unknown
  Bacterial polypetide isolated from the Sargasso Sea
KSNLKTHDIDDLIMGQVLTAGSGQNPARQAGIKAGLPVEKPACVINQVCGSGLRSIANGYQSIISNDAKIIVAGGQESMTNSPHTINYRKNKKLDESKLVDSMIKDGLWDAFNGYHMGVTAENVAKKWKITRKDQDEFAFSSQVKTEKAQKIGNFENEIVPIKNFKIDEHPRKGMSIERLQKLKPSFKKNGTVTPGNASGINDGAAAVVLMEESEATKRGLEPLARIVSWATFGVDPSLMGSGPIPASKKALAKAGWKVSDLDLIESNEAFAAQSLAVIKDLDYQ

SEQ ID NO: 114758 - protein, 151 aa, Unknown
  Bacterial polypetide isolated from the Sargasso Sea
AGNSSGLNDGAAGIVLMHSETALKKKLLPLARIVSWAQCGVDPSIMGTGPIPAVKLALKKAGWNKNDLDLIESNEAFAAQSIAVIKELNLNPEIVNVNGGAIALGHPIGASGARILVTLIHEMNKKKLRKGIATLCIGGGMGIAMCVETEN

SEQ ID NO: 114759 - protein, 213 aa, Unknown
  Bacterial polypetide isolated from the Sargasso Sea
MNSNEDIVITSAFRTPIGSFQGSLKDHKATELGATIVKKCMEHSNLSSSEVDTVILGQVLQAGCGQNPARQSAINAGIDKDKTATTINQVCGSGLAAITLGFNSLRLNDTKIVIAGGQESMTNAPHYLNYRLEKNISDEKLKDTMLIDGLIDAYNDYHMGVTAENVAEKYQITRNDQDNFAFNSQTKAIKAISENKFKEEIVPIKLKDQKVLI

SEQ ID NO: 114760 - protein, 85 aa, Unknown
  Bacterial polypetide isolated from the Sargasso Sea
ANEAFAAQALAVGESLNWDNDRVNVNGGAIALGHPIGASGCRILVTLLHEMARSNATKGLATLCVGGGQGVALAVERLQEVSHAK

SEQ ID NO: 114761 - protein, 278 aa, Unknown
  Bacterial polypetide isolated from the Sargasso Sea
LRAIISGYQSILLNDSKIIIAGGQENMSFSNQDNMLQDGLIDAFNNYHMGVTAENVADKCNISRKEQDNFALSSQTKTQEAIKNKKFKDEILDDKSNKIFLDEHPRSDVTIESLSKLKPAFKENGTVTAGNSSGINDGAAAVLIMTREEAEKRDLIPLAKIVSWATSGVDPALMGLGPIPASKKALEKACWEIKDLDLIESNEAFAAQSLAVVKELKIPKEKVNVNGGAIALGHPIGASGCRIVVTLIHEMKRRNVKRGMATLCIGGGMGIFMCLERV

SEQ ID NO: 114762 - protein, 308 aa, Unknown
  Bacterial polypetide isolated from the Sargasso Sea
CDRYFYGSLKSKQAHDLGSIVIEENIKKSQLKSNEIDEVIMGQVLTSAAGQNPARQAAIKAGIPIEKTAYIINQVCGSGLRAVAAGYQSILSNDSKIVIAGGQESMSNAPHAIHFRNNKKLEETNLIDTMIKDGLWDAFNGYHMGVTAENVAEKWGITRKEQDNFAMSSQTKAEAAQKKGNFYNEIIPTVLKFDEHPRNGMTIERLEKLKPSFKSDGTVTAGNASGINDGAAAVVLMSQNESEKRKLNPLAKIVSWATCGVDPSLMGSGPIPASKKALEKAGWKVKDLDLIESNEALAAQSLAVIKEL

SEQ ID NO: 114763 - protein, 155 aa, Unknown
  Bacterial polypetide isolated from the Sargasso Sea
NGTITAANASKLNDGAAAIMLMSKKKVEECGIKPMARILSHCSFAHDPKWFTTAPGYAITKVLKQSGLDKNDIDLWEINEAFAAVAMAAIDDFQLDSSKVNINGGAIALGHPIGASGARILTTLIYALEKMNKNLGLATLCIGGGEASAMIIEKL

SEQ ID NO: 114764 - protein, 70 aa, Unknown
  Bacterial polypetide isolated from the Sargasso Sea
SLAVIKELKIPIEKVNVNGGAIALGHPIGASGSRIVVTLIHEMIKRNVTKGLATLCIGGGMGISMCIERD

SEQ ID NO: 114765 - protein, 257 aa, Unknown
  Bacterial polypetide isolated from the Sargasso Sea
GQILTSGEGQNPARQASINAGIPNTTPAHIVNQLCGSGLRAIISGYQLLMLDDANIVITGGQENMSRSPHTILYRLDKKLDKNKLVDSMINDGLMDAFNNYHMGVTAENVARKFNITREQQDEFALDSQKKASLANSQKRFDDEIININLNNNKKIVLDKDEYPKKNISIEDLKKLKAIFEENGTVTSGNSSGLNDAAAIVVLMKRGTAEKKNQKIFAKIKSWANSGVDPSIMGIGPIPATKLALKKAGWKIEDIDL

SEQ ID NO: 114766 - protein, 156 aa, Unknown
  Bacterial polypetide isolated from the Sargasso Sea
KKDGTVTAGNSSGINDGAAAVTLMAAEEASKRNLQKLVTIKSWASSGVDPALMGTGPIPASKKALDLAGWSIKDVDLFEVNEAFAAQSIAVLRTLSIPEEKLNVNGGAIALGHPIGASGTRILVTLIHEMIKRDAKRGLATLCIGGGMGIAMCVER

SEQ ID NO: 114767 - protein, 100 aa, Unknown
  Bacterial polypetide isolated from the Sargasso Sea
MDDKDIVITSAFRTPIGSFLGSLSSYKATELGTEVIKKCLLDSNLKNDDVDIIYLGQVLQTGSGQNPARQSAMNAGINKEKTATTINQVCGSGLAAITLG

SEQ ID NO: 114768 - protein, 217 aa, Unknown
  Bacterial polypetide isolated from the Sargasso Sea
MVKNLKDVVIVSAARTAIGKLRGIWSKYQAHELGANVILNILKKSKISNDSIDEIIMGQVLTGDTGQNPARQAAMKAGLPTDKTAYIINQVCGSGLRAVVAGYQSILSNDAKIVIAGGQESMSNSKEEFMLKDGLIDAYNNYHMGITAENVAEKFGISRKEQDKFAVASQLKAQEAIKQKKFKEEIIEGDNLLDEHPRANVTEESLSKLNTAFKENG

SEQ ID NO: 114769 - protein, 102 aa, Unknown
  Bacterial polypetide isolated from the Sargasso Sea
GPIPSSKKALKIAGWSVNDVDLIESNEAFAAQSLAVIKDLKIPIEKINVNGGAIALGHPIGASGTRILVTLVHEMSKRDVKKGLATLCIGGGMGIAMCIEKD

SEQ ID NO: 114770 - protein, 142 aa, Unknown
  Bacterial polypetide isolated from the Sargasso Sea
MSKNSKDIVLTSALRTSVGKFGGIHKKLQAHELGSIVIKGILKKTNIDPLEIDEVILGQVLPNLSGQNPARQALIKSGIPKEKTAFSINQVCGSGLRAIVLGYQSIAMGSSKFVIAGGQESMSNSNEKEMLTNGLIDAFNNY

SEQ ID NO: 114771 - protein, 249 aa, Unknown
  Bacterial polypetide isolated from the Sargasso Sea
EVYITSAVRTAVGSFYGSLASLPAHDLGKVVIKEAISRSNLESADVEEVILGQVLTAATGQNPARQASINAGLNKETPAWLVNQVCGSGLRSVALAYQSIMNGDADIIIAGGQESMSQSPHCTYLRSGTKMGDDKLIDSMIKDGLWDAFNGYHMGTTAENVAEQWQITRDQQDEFAFNSQQKASKAKAEGIFKDEIVGVEVKNRKETIIFENDEYIKDGVQLEKISSLRPAFAKEGTVTAANASGINDG

SEQ ID NO: 114772 - protein, 88 aa, Unknown
  Bacterial polypetide isolated from the Sargasso Sea
WDIREIDLVESNEAFAAQSIAVIKELKLSPDIVNVNGGAIALGHPIGASGTRIVVTLLHEMRKRDLKKGLATLCIGGGMGIAMCLQRY

SEQ ID NO: 114773 - protein, 281 aa, Unknown
  Bacterial polypetide isolated from the Sargasso Sea
VAGGMESMSGAPYLLPKARGGYRMGHGKVLDHMMMDGLENAYDGQAMGCFAQATADAEGLTREMMDEFAIGSLSKANEAINSGTFGDEIVPVTISTRKGDVVVDTDEGPGSARPDKIPSLRPAFKRDGTVTAANSSSISDGAAALLVMSESKAAELGLTPLAKVVAHATNSIAPEDFTVAPVGAMEKVLDKAGWSKDDVDLFEINEAFAMVTMLAIKKLGLDESKVNIKGGACALGHPIGASGARILVTLLHGLKQKGLSKGIASLCIGGGEGVALAVEML

SEQ ID NO: 114774 - protein, 236 aa, Unknown
  Bacterial polypetide isolated from the Sargasso Sea
GLIDVYNKYHMGITAENVAEKWNISREEQDTFAVSSQSKAQDAIKNKKFNEEIIPGNLEDEHPRNNVTLESLSNLKPAFKKNGTVTAGNSSGVNDGAAAVMIMKRDLAEKKNLPTLAKIVSWATCGVDPALMGSGPIPASKEAIKKAGWHIKDLDLIESNEAFAAQSLAVIKELKISPEKVNVNGGAIALGHPIGASGTRIVVTLIHEMIRRDIKKGLATLCIGGGMGIAMCVERD

SEQ ID NO: 114775 - protein, 305 aa, Unknown
  Bacterial polypetide isolated from the Sargasso Sea
IKSHELGSIIIKGILEQSKFSSNEIDEVIMGQVLTTGAGQNPARQAAVHAGIPISKPAHIINQVCGSGLRAVISGFQSIKLGEAKNIISGGQENMSITPHSIFYKDKIHISKDNLINTMINDGLLDAFNDYHMGVTAENIAKKFNISRKEQDEFAFLSQKKTENAINQKKFNDEIIKINQNGTILSKDEHPRIGLNISDLEKLKTVFLKDGTVTPGNSSGINDGAAALLLTTSKEAKKKSVKPLARIVSWSSVGVEPALMGLGPIEAVRQATHKAKWNIEDIDLFEINEAFAAQSIAVIKELGIE

SEQ ID NO: 114776 - protein, 133 aa, Unknown
  Bacterial polypetide isolated from the Sargasso Sea
MSEDEAIKRKLQKLVSIKSWASCGVEPSLMGTGPIPSSKKALDLAGWSIKDVDLFEINEAFAAQSLAVLKTLSIPEEKVNVNGGAIAIGHPIGASGTRILVTLIHEMIKRDVKKGLATLCIGGGMGIAMCIER

SEQ ID NO: 114777 - protein, 258 aa, Unknown
  Bacterial polypetide isolated from the Sargasso Sea
MSDNSKEIVITSAVRTPIGTFRGSLKDIKAKDLGALAVKEVIKKSNLDTKDIDELIMGQVLTSATGQNPARQAAIKAGIPIDKTAYVINQVCGSGLRSVVAGYQAIKSNDAKIIVAGGQENMSNAPQAIYFSKGKKLDNSDLIDTMIKDGLWDAFHGYHMGVTAENVAEKWQITRNEQDNFALLSQLKTEKAQKEEKFKEEIIPVMFDDKSKLKIDEHPRSGMTLDTLSKLKPSFKKDGTVTAGNASGINDGAAAVVL

SEQ ID NO: 114778 - protein, 241 aa, Unknown
  Bacterial polypetide isolated from the Sargasso Sea
APARQVAIGSGLPVETPCTTINKVCGSSLKATMIAATEIRVGVSKVIISGGMESMSNAPFITRNPKKGEDVSFASLESVMMSDGLIDAYSGESMGNTGETVAEEFGISRQVSDEFSVRSHFLANRAWDEGWLENEVFPVGELSRDEGIRPDTNMEALSVLKAVFKEKGLVTAGNASQVSDGASAVLIASEEAANENGLPIIARIIDYTTSGVDPGRVMSAPIPAVNMLLEKTRLKIEDIDI

SEQ ID NO: 114779 - protein, 239 aa, Unknown
  Bacterial polypetide isolated from the Sargasso Sea
QENMSLAPHAIHLRNGKKLGDTHAVDTMIKDGLWDAFNNYHMGVTAENVATKFQITRAEQDKFALNSQEKAFKAIKDNKFKDEIVSLKIKSKKSEINFDKDEHPRDGVNMEILGKLKPVFQKDGTVTAGNSSGINDGAAAVTLMNEKEAEKRGLKKLVKIKSWASCGVDPALMGTGPIPASKKALELAGWSIKDLDLFEVNEAFASQSIAVLKTLSVPEEKINVNGGAIALGHPIGASG

SEQ ID NO: 114780 - protein, 272 aa, Unknown
  Bacterial polypetide isolated from the Sargasso Sea
KVCGSGLKAVMLAANAIVAGDAEIVIAGGQENMSASPHVLPGSRDGFRMGDAKLVDTMIVDGLWDVYNQYHMGITAENVAKEYGITREEQDAFAALSQNKAEAAQKAGRFDDEIVPVAIPQRKGEPLQFATDEFVRHGVTAESLAGLKPAFSKDGSVTAANASGLNDGAAAVLVMSAQKAAALGLTPLARIKAYANAGVDPSVMGVGPVPASRRALERAGWTPGDLDLMEINEAFAAQALAVHKQMGWDTSKVNVNGGAIAIGHPIGASGCR

SEQ ID NO: 114781 - protein, 290 aa, Unknown
  Bacterial polypetide isolated from the Sargasso Sea
AVISGYQSIKLGESVSVISGGQENMSISPHSIFYRDEKKILENKLIDTMINDGLMDAFNNYHMGVTAENIAKKFKISRQEQDEFALNSQKKTQAALSKNKFNDELVKIDYQGNILNKDEHPRTDLKIEDLKKLKTVFQNNGTVTPGNSSGINDGAAALLLTSLEEAKNKSIKPLAKIVSWSSVGVDPSVMGLGPIGAIREASKKAKWTLDEIDLFEINEAFASQSIAVIHELGIDQAKVNVNGGAIALGHPIGASGARILVTLIHEMKRQKKDKGCAALCIGGGMGIALC

SEQ ID NO: 114782 - protein, 100 aa, Unknown
  Bacterial polypetide isolated from the Sargasso Sea
MNTKFIEVVIVAAARTPIGTYRGSLKNIKADQLGSIVIKELINRANISSEEIDEVILGQVLTAGTGQNPARQASINAGLPKSIPAHLVNQVCGSGLRSVI

SEQ ID NO: 114783 - protein, 173 aa, Unknown
  Bacterial polypetide isolated from the Sargasso Sea
MSKNSKDIVFVAAQRSAIGRYKGIYKDLQAHNLGSLVIKSLIKKTKLKADKIDEVILGQVLTGSCGQNPARQAALNSGIPKEKTAIIINQVCGSGLRSIVNGYQSLITNSANFIIAGGQESMTNSFHDQMMKDGLTDAFYNYHMGVTAENVAAKYNISRQEQDEFAYESQQKA

SEQ ID NO: 114784 - protein, 185 aa, Unknown
  Bacterial polypetide isolated from the Sargasso Sea
MSKNSKDIVFVAAQRTAIGRYKGIYKDLQAHNLGSLVIKSLIEKTKLKVDEIDEVILGQVLTGSCGQNPARQAAINSGIPKEKTAIIINQVCGSGLRSIVNGYQSILTSSANFIIAGGQESMTNSIHDQMMKDGLTDAFYNYHMGVTAENVAAKYNISRQEQDKFALQSQHKANLAINKKKFDDE

SEQ ID NO: 114785 - protein, 78 aa, Unknown
  Bacterial polypetide isolated from the Sargasso Sea
INEAFAAQSIAVIRELGIDQNKVNVNGGAIALGHPIGASGARIIVTLLHEMKRQKKNKGCATLCIGGGMGIALCVERI

SEQ ID NO: 114786 - protein, 158 aa, Unknown
  Bacterial polypetide isolated from the Sargasso Sea
FDKEGTVTAGNASGINDGAAALVMMTEEEAEKRGITPMARIVSWAQVGVDPAIMGSGPIPASRKALEKAGWSADDLDLVEANEAFAAQACAVNKDLGLDTDKVNVNGGAIAIGHPIGASGARILTTLLYEMQKQDAKKGLATLCIGGGMGIAMCVERD

SEQ ID NO: 114787 - protein, 196 aa, Unknown
  Bacterial polypetide isolated from the Sargasso Sea
MSKNSKDIVLTSALRTSVGKFGGIHKKLKAHELGSIVIKGILKKTNVDPIEIDEVILGQVLPSLGGQNPARQALIKSGIPQEKTAFNINQVCGSGLRAIVLGYQSIGMGSSKFIIAGGQESMSNSDEKEMLTNGLIDAFNNYHMGVTAENVAEKFNISRDEQDHFALDSQSKTESSIKSKKFLNEIIDNNQDEHPR

SEQ ID NO: 114788 - protein, 52 aa, Unknown
  Bacterial polypetide isolated from the Sargasso Sea
NGGAIALGHPIGASGTRILVTLIHEMIRRNVKKGLATLCIGGGMGIAMCVER

SEQ ID NO: 114789 - protein, 139 aa, Unknown
  Bacterial polypetide isolated from the Sargasso Sea
MSKNSKDIVFVAAQRSAIGRYKGIYKDLQAHDLGSLVIKSLIEKIRLNVDEIDEVILGQVLTGSCGQNPARQAAINSGIPKEKTAIIINQVCGSGLRSIVNGYQSLLTNSANFIIAGGQESMTNSIHDQMMKDGLTDAF

SEQ ID NO: 114790 - protein, 112 aa, Unknown
  Bacterial polypetide isolated from the Sargasso Sea
MSKNSKDIVLTSALRTSVGKFGGIHKKLQAHELGSIVIKGILKKTNLDPLEIDEVILGQVLPSLGGQNPARQALIKSGIPQEKTAFNINQVCGSGLRAIVLGYQSIGMGSSK

SEQ ID NO: 114791 - protein, 263 aa, Unknown
  Bacterial polypetide isolated from the Sargasso Sea
IVSAKRTPIGSFQGNLSSISASELGSIVIKAILNETGIDPNIIDEVIMGNVLSAGQGQAPARQAAISAGLPSKVECFTINKMCGSGLKSVMLASHAIQAGDAEIIIAGGMENMSKAPYLLLNNRKGLRLGHDQILDSMIVDGLWDVYNDKHMGECAETCASDKKYTRESQDLFAQESYSRAQAAQSKGAFQNEIVPLVIDQKKGDSITIIKDEDPDKANFEKMKLLKPVFKENGTITAANASKINDGAAALLLMTRDKAKEID

SEQ ID NO: 114792 - protein, 218 aa, Unknown
  Bacterial polypetide isolated from the Sargasso Sea
QDKFAFDSQSKALKAQKENKFDDEIVPYEIELKKGNTIFNKDEHPRATTSLDTLSRLRGAFKKDGTVTAGNASGINDGAAAVILMSKEEAEKRGLKPLAEIKSWASCGVDPSIMGTGPIPSSKKALEIAGWSSKDLDLIEANEAFAAQSCAVVKELSLPMEKVNVNGGSIALGHPIGASGTRIFVTLIHEMIKRDSKKGLATLCIGGGMGVAMCIERK

SEQ ID NO: 114793 - protein, 274 aa, Unknown
  Bacterial polypetide isolated from the Sargasso Sea
LRSIVAGYQSILLGDAKIVIAGGQESMTNSKKEMILKDGLIDAYNDYHMGITAENVADKWKISREEQDSFAASSQLKAQEAIKNKKFRDEIIDELTEDEHPRKDVTIEKLSKLEPAFKKNGTVTAGNSSGINDGSAAIQLMSREESDKKGLAPLAKIVSWATCGVDPALMGSGPIPASKKALEKAGWDINSLDLVESNEAFAAQSLAVIKELKIPIEKVNVNGGAIALGHPIGASGTRIVVTLIHEMIKRNAKKGLATLCIGGGMGIAMCIERD

SEQ ID NO: 114794 - protein, 190 aa, Unknown
  Bacterial polypetide isolated from the Sargasso Sea
QFSDELITNLIDKDEHPRSDVTLESLSTLKTVFKEEGTVTAGNSSGINDGAAGIILMSRKEAEKRNLKPLAKIVSWATCGVDPSLMGSGPIPSTKKALEKASWNINQLDLVESNEAFAAQSLAVIKELNIPKEIVNVNGGAIALGHPIGASGSRIIVTLIHEMNKREVKKGLGTLCIGGGMGIAMCIERD

SEQ ID NO: 114795 - protein, 134 aa, Unknown
  Bacterial polypetide isolated from the Sargasso Sea
YVKKKVEECGIKPMARILSHCSFAHDPKWFTTAPGYAIKKVLKQSGLEKNDIDLWEINEAFAAVAMAVIDDFQLDTTKVNINGGAIALGHPIGASGARILTTLIYALERMNKSFGLATLCIGGGEASAMIIEKL

SEQ ID NO: 114796 - protein, 95 aa, Unknown
  Bacterial polypetide isolated from the Sargasso Sea
KALKKAGWNINDLDLVESNEAFAAQSIAVIKELGLKEGIVNVNGGAIALGHPIGASGARILVTLVHEMQKRKYKRGLATLCIGGGMGISMCVESI

SEQ ID NO: 114797 - protein, 211 aa, Unknown
  Bacterial polypetide isolated from the Sargasso Sea
MQEVVIVGAVRTPIGSFRGVFSTLSAVDLGAGVVRSLLARCSLPATAVDELIFGQVLTAGCGQNPARQTALRAGLPVSCPAVTVNLVCGSGLKAVQQAVQAIRSGDSQVVIAGGQESMSNAPYLIDGARAGLRVGHRSMQDSMIQDGLWDAFNDYHMGVTAENLADRYAIDRQRQDAFAAGSQQKAAAAIEAGRFEQEIVPVVVRQGKQPP

SEQ ID NO: 114798 - protein, 61 aa, Unknown
  Bacterial polypetide isolated from the Sargasso Sea
NTEKVNVNGGAIALGHPIGASGARVLVTLVHEMQKRKSKKGLATLCIGGGMGIAMCVESIF

SEQ ID NO: 114799 - protein, 298 aa, Unknown
  Bacterial polypetide isolated from the Sargasso Sea
RSVVLGYQSLISNDAKIIIAGGQESMSNAPHAIHFRNGKKLEESKLIDTMIKDGLWDAFNGYHMGVTAENVATKWQITRKEQDDFALLSQTKTEKAQKEGKFKNEIIPLTLKEKEKKFEIDEHPRAGMTLDRLKKLKPSFKNDGTVTPGNASGINDGAAAVVLMSLKEAKKRNLKPLAKIISWATCGVDPSLMGSGPIPAAKKALEKAGWEINELDLIESNEAFAAQSLAVIKDLGISKEKVNVNGGAIALGHPIGASGTRILVTLLHEMEKRNSKKGLATLCIGGGMGIAMCVERNY

SEQ ID NO: 114800 - protein, 194 aa, Unknown
  Bacterial polypetide isolated from the Sargasso Sea
MNSDKDIVITSAFRTPIGSFQGSLKDHKATELGTAVIKKCMEHSNLNGAEVDTVILGQVLQTGCGQNPARQTAINAGINKDKTATTINQVCGSGLAAVTLGFNSLKLNDTNIVIAGGQESMTNSPHYLNYRIEKNLSEEKLKDSMLIDGLIDAYNDYHMGVTAENVAEKYQITRNDQDNFALNSQKKAIKAINE

SEQ ID NO: 114801 - protein, 283 aa, Unknown
  Bacterial polypetide isolated from the Sargasso Sea
YNSVGVVIAGGTESMSNAPYLIPKGLNRFGHKRMIDSMIHDGLWDAYNDMHMGNCAEILAAKRNYTRENQDKYCIQSYNRAQNAQEKGYFSDEIVPIKNADGTLIYSDEEPTKAKYDKIPMIKPAFEKNGTITAANASKLNDGAAAIMLMSKKKVEEYGIKPMARILSHCSFAHDPKWFTTAPGYAITKVLKQSGLDKNDIDLWEINEAFAAVAMAAIDDFQLDSSKVNINGGAIALGHPIGASGARILTTLIYALEKMNKSLGLATLCIGGGEASAMIIEKL

SEQ ID NO: 114802 - protein, 266 aa, Unknown
  Bacterial polypetide isolated from the Sargasso Sea
MSEVYISSATRTAVASFNGSLANLPAHDLGKVVIQESLKRSNLDPSEVDEVILGQVLTAATGQNPARQASMNAGIAKETPAWVVNQVCGSGLRSVALAYQSIMNGDANVIIAGGQESMSQSPHCMHLRNGTKMGDDKMIDSMIKDGLWDAFNGYHMGTTAENVAQQWQITRDQQDEFAFNSQQKASKAKQAGVFKDEIVGVEVKSRKETVVFEEDEYIKDGVQLEKIASLRPAFAKEGSVTAANASGINDGAAALTVMSADEIKKK

SEQ ID NO: 114803 - protein, 249 aa, Unknown
  Bacterial polypetide isolated from the Sargasso Sea
MSNSKEELMLKDGLIDAYNNYHMGITAENIAEKWNISRKDQDAFAVSSQSKTQDAIKNKKFSEEIIESSLLEDEHPRKDVTLEGLSKLKPAFKKNGTVTPGNSSGINDGAAAVMLMAREEAEKRGLSPLAKIMSWATCGVDPALMGSGPIPASKKALDKAGWSVKDLDMVESNEAFASQSIAVIKELNIPQEIVNVNGGAIALGHPIGASGSRIIVTLIHEMIKRNAKKGLATLCIGGGMGISMCVERD

SEQ ID NO: 114804 - protein, 64 aa, Unknown
  Bacterial polypetide isolated from the Sargasso Sea
CLGWDTEKVNINGGAIALGHPIGASGARVLTTLLYAMQKGYVKKGLATLCIGGGMGIAICVERP

SEQ ID NO: 114805 - protein, 152 aa, Unknown
  Bacterial polypetide isolated from the Sargasso Sea
VTAGNSSGINDGAAVVIMTTRDIAEKKGLQPLAKICSWATCGVDPSLMGSGPIPSSKKALKIAGWSVNDVDLIESNEAFAAQSLAVIKDLKIPIEKINVNGGAIALGHPIGASGTRILVTLVHEMSKRDVKKGLATLCIGGGMGIAMCIEKD

SEQ ID NO: 114806 - protein, 286 aa, Unknown
  Bacterial polypetide isolated from the Sargasso Sea
GSGLKAVMLAANAIVAGDAEIVIAGGQENMSASPHVLPGSRDGFRMGDAKLVDTMIVDGLWDVYNQYHMGITAENVAKEYGITREEQDAFAALSQNKAEAAQKAGRFDDEIVPVAIPQRKGEPLQFATDEFVRHGVTAESLAGLKPAFSKDGSVTAANASGLNDGAAAVLVMSAQKAAALGLTPLARIKAYANAGVDPSVMGVGPVPASRRALERAGWTPGDLDLMEINEAFAAQALAVHKQMGWDTSKVNVNGGAIAIGHPIGASGCRILVTLLHEMAKRDAKRG

SEQ ID NO: 114807 - protein, 244 aa, Unknown
  Bacterial polypetide isolated from the Sargasso Sea
MTDVVIASAARTPVGSFNGALSSLTASDLGKVAIEAALERAGIAAEDVSEVIMGQILTAAQGQNPARQAAIRAGLPVEVPAYGVNQLCGSGLKSVAMGLQAILNGDSGIVVAGGQESMSAAPHAANLRNGTKMGNTEFVDTMIKDGLWDAFNGYHMGNTAENVAEKWQITREQQDEFAVNSQQKAEAAQKAGKFKDEIAPVTYSTRKGDVTVEEDEYPKHGTTIDNLTKLRPAFDKEGTVTAGN

SEQ ID NO: 114808 - protein, 281 aa, Unknown
  Bacterial polypetide isolated from the Sargasso Sea
MNKDKDIVITSAFRTPIGSFQGSLKDHKATELGTAVVKKCMEHSNLSGSEVDTVILGQVLQTGCGQNPARQTAINSGIDEDKTATTINQVCGSGLAAVTLGFNSLKLNDANIIIAGGQESMTNSPHYLNYRMEKNLSEEKLKDSMLIDGLIDAYDDCHMGVTAENVAEKYQITRNDQDNFALNSQKKAIKAINENRFKEEIVPIKLKNQKMFDKDEYPRSDTNLEKLSNLKTVFKENGTVTAGNASGLNDGAAAVTLMNYKTSQDKGLKPLLNYLMGTKWS

SEQ ID NO: 114809 - protein, 56 aa, Unknown
  Bacterial polypetide isolated from the Sargasso Sea
VNVNGGAIALGHPIGASGTRVFVTLIHEMLKRDSKKGLATLCIGGGMGVAMCIERK

SEQ ID NO: 114810 - protein, 60 aa, Unknown
  Bacterial polypetide isolated from the Sargasso Sea
IPEEKVNVNGGAIALGHPIGASGTRILVTLIHEMIKRDVKKGLATLCIGGGMGIAMCIER

SEQ ID NO: 114811 - protein, 260 aa, Unknown
  Bacterial polypetide isolated from the Sargasso Sea
MSKENGVVITSAVRTAIGDLGGSLKNVSAHKLGSTAISSAIEKSNIKASDINEIIMGQVLTGGAGQNPARQAAMDAGIPKETPSYVVNQVCGSGLRSIASGYHSILSGNSNIVLAGGQESMSQSPHVVHLRNGKKLGDTSLVDSMIKDGLWDAFNGYHMGITAENVAQKFQVTRKDQDKFAFDSQTKALKAQKENKFDDEIIPYTIQLKKGTAVFKKDEHPREGISMEALQRLKTAFQKEGTVTAGNASGINDGAAAVVL

SEQ ID NO: 114812 - protein, 67 aa, Unknown
  Bacterial polypetide isolated from the Sargasso Sea
VVKELSLPMEKVNVNGGAIALGHPIGASGTRVFVTLVHEMLKRDSKKGLATLCIGGGMGVAMCVERK

SEQ ID NO: 114813 - protein, 300 aa, Unknown
  Bacterial polypetide isolated from the Sargasso Sea
VIKKCIEHSNLKTNEVDMVYMGQVLQTGSGQNPARQSLINSGINNSKTATTINQVCGSGLAAVALGFNSLKLNDANIIIAGGQESMTNSPHYQNLRKGERNDESKMKDSMIIDGLVDVYNKYHMGVTAENVAEKYQITRKQQDEFAANSQKKAAEAIKNNKFKDEIIPIQIKDGKIFDTDEYPKKDTTTEVLATLKTVFKKDGTVTAGNASGLNDGAAALTLMSAKTAKDKNLKPLAKIISWAQCGVDPSIMGTGPIPASKLALKKAGWAEEELDLIEATRLLLHKQFLLIKNLVFILRK

SEQ ID NO: 114814 - protein, 282 aa, Unknown
  Bacterial polypetide isolated from the Sargasso Sea
IKAGLPTAVPGMTINKVCGSGLKAVMLAANAIVAGDAEIVIAGGQENMSASPHVLPGSRDGFRMGDAKLVDTMIVDGLWDVYNQYHMGITAENVAKEYGITREEQDAFAALSQNKAEAAQKAGRFDDEIVPVAIPQRKGEPLQFATDEFVRHGVTAESLAGLKPAFSKDGSVTAANASGLNDGAAAVLVMSAQKAAALGLTPLARIKAYANAGVDPSVMGMGPVPASRRALERAGWTPGDLDLMEINEAFAAQALAVHKQMGWDTSKVNVNGGAIAIGHPIG

SEQ ID NO: 114815 - protein, 290 aa, Unknown
  Bacterial polypetide isolated from the Sargasso Sea
VDEVIMGQVLTGGTGQNPARQAAIHSGIPKEKPAFIVNQVCGSGIRSVASAFQSIKSGDSKIIIAGGQENMSLAPHSIHLRDGKKLGDTEMTDTMIKDGLWDAFHGYHMGITAENVATKFQVTREEQDKFALYSQEKALKALKEKRFDDEIISFKIKSKKAEINFKTDEHPRDGINLEALKRLKPVFKKDGSVTAGNASGINDGAAAVTLMSSSDAEKRGLKKMVTVKSWASCGVDPALMGTGPIPSAKKALELAGWSIKDLDLLEINEAFAAQSIAVIKTLGISEEKVN

SEQ ID NO: 114816 - protein, 269 aa, Unknown
  Bacterial polypetide isolated from the Sargasso Sea
MGDNHIVIAGGQESMSLAPHTIHLRDGKKLGDTELIDSMIKDGLWDAFHGYHMGITAENVAEKFQVTRDEQDKFALKSQEKAIKAQKGDKFKDEIIKFKIKTKNTEVDFLKDEHPREGINLEALSRLKPVFKKDGTVTAGNASGINDGAAAVTLMSDSEAKKRDLKKLVSIKSWASCGVDPALMGTGPIPSTKKALDIAGWSVKDVDLFEINEAFAAQSLAVMKTLSIPEEKVNVNGGAIAIGHPIGASGTRILVTLIHEMIKRDVKKG

SEQ ID NO: 114817 - protein, 106 aa, Unknown
  Bacterial polypetide isolated from the Sargasso Sea
MGTGPIPASKLAIKKAGWTEDQIDLVEANEAFAAQAISVNKELGFNTEKVNVNGGAIALGHPIGASGARVLVTLVHEMQKRKSKKGLATLCIGGGMGIAMCVESIF

SEQ ID NO: 114818 - protein, 206 aa, Unknown
  Bacterial polypetide isolated from the Sargasso Sea
IFKALKENKFKDEIVNFKIKSKKAEIDFNIDEHPRVGLNSDALKRLKPVFKKDGTVTAGNASGINDGAAAVTLMSEDEAQKRKLNKLVTIKSWASCGVEPSLMGTGPIPSSKKALDIAGWSIKELDLLEINEAFAAQSIAVIKTLGVPEEKVNVNGGAIAIGHPIGASGTRILVTLIHEMIKRDVKKGLATLCIGGGMGIAMCIER

SEQ ID NO: 114819 - protein, 349 aa, Unknown
  Bacterial polypetide isolated from the Sargasso Sea
PDQIDEVIMGNVLSAGQGQAPARQATIKSGCPNTTESLTINKMCGSGLKAIMLADQAIRTGDADVIVAGGMESMTNSPYLIENARSGQRLGHGKLVDSMIHDGLWDVYNDKHMGNCAEMLAAERNFTRQLQDEYAIDSYNKSISAIKNKIFSTEIVPVEVNQRKGKSIFAMDDEEPGRVKFDKITKLRPAFAIDGTITAANASKLNDGAAALLVMSEQKANECGLKPLGSILGHASSAHDPEWFTTAPSKVIKKLLNKVSLESNDIDLWEINEAFSVVSMAAIEDFSIDKDKVNIYGGAVALGHPIGASGARILTTLLNGMERTDSQLGLATLCIGGGEASALIIEKND

SEQ ID NO: 114820 - protein, 127 aa, Unknown
  Bacterial polypetide isolated from the Sargasso Sea
KRGIKPLVEIKSWASCGVDPSVMGTGPIPSSKKALEIAGWKSKDLDLIEANEAFAAQSCAVVKELSLPMEKVNVNGGAIALGHPIGASGTRVFVTLIHEMLKRDSKKGLATLCIGGGMGVAMCVERK

SEQ ID NO: 114821 - protein, 337 aa, Unknown
  Bacterial polypetide isolated from the Sargasso Sea
MSEVVIVGAARTAIGSFGGSLSSLSAAELGQIAIEEALSRAAVSGEEVDEVILGQVLTAAAGMNPARQASMAAGIPKEKTAMTINQVCGSGLRAVALGAQAIRSGDADIVVAGGQESMSQSPHAQNLRSGQKMGNLELIDTMIKDGLWDHFNGYHMGSTAENVANQWQITRDAQDAFALSSQSKAETAQKEGKFKDEIVPVTIKSRRGETIVEEDEYPKHGTNLETLGSLRPAFSKEGTVTAGNASGINDGAATVVLMSSENARTRGIEPLARITSFATRGVDPSIMGTGPIPASRAALEKVGWNVEDLDLIEANEAFAAQACAVNKDMGWDTKKVN

SEQ ID NO: 114822 - protein, 269 aa, Unknown
  Bacterial polypetide isolated from the Sargasso Sea
MSKENGVVITSAVRTAIGDLGGSLKNVSAHKLGSTAISNAIKKSNIKASDINEIIMGQVLTGGAGQNPARQAAMDAGIPKETPSYVVNQVCGSGLRSIASGYHSILSGSSNIVLAGGQESMSQSPHVVHLRNGKKLGDTSLVDSMIKDGLWDAFNGYHMGITAENVAQKFQVTRKDQDKFAFDSQTKALKAQKENKFDDEIVPYTIQLKKGTAVFKKDEHPRDGISMEALQRLKTAFQKEGTVTAGNASGINDGAAAVVLMSKKEAEKK

SEQ ID NO: 114823 - protein, 317 aa, Unknown
  Bacterial polypetide isolated from the Sargasso Sea
GIPKEKPAYIVNQVCGSGLRSIASGFQSIKSGDSKIVIAGGQENMSLAPHAIHLRDGKKIGDTELIDTMIKDGLWDAFHGYHMGVTAENVATKFQVTRQEQDKFALKSQEKALIAIKENKFKDEITNFKIKSKKAEIDFNKDEHPRDGINLEGLTRLKPVFQKDGTVTAGNASGINDGAAAVTLMSEEEAKKRDLNKLVTIKSWASCGVEPALMGTGPIPATKKALDLAGWKIDDVDLFEVNEAFAAQSIAVLKTLGIPDEKVNVNGGAIAIGHPIGASGTRILVTLIHEMIKRDVKRGLATLCIGGGMGIAMSIER

SEQ ID NO: 114824 - protein, 126 aa, Unknown
  Bacterial polypetide isolated from the Sargasso Sea
FGIKPMARILSHCSFAHDPKWFTTAPGYAITKVLKQSGLDKSDIDLWEINEAFAAVAMAAIDDFQLDSSKVNINGGAIALGHPIGASGARILTTLIYALDRMNKNLGLVTLCIGGGEASVMIIEKL

SEQ ID NO: 114825 - protein, 286 aa, Unknown
  Bacterial polypetide isolated from the Sargasso Sea
DIVVAGGMESMSNAPYLSKESRNGIRMGHSGLVDHMFLDGLEDAYDKGKLMGVFAENTAELLQLTRNMQDNYAIDSLDRAMKASKDGAFENEVQPIKLKFRGEQTTVLSDEQPRNANIEKIPSLRPAFKEGGTVTAANSSSISDGAAAMVITKLSIAEQLGVKPLATIVAHVTHAQEPEWFTTAPIGAIKKVLEKTDWGKDEVDLYEINEAFSVVVLAALKELDLDREKVNIHGGACAIGHPIGASGARIMVTLLNSLEKYSLKKGVASLCIGGGEATAVAIEKFH

SEQ ID NO: 114826 - protein, 224 aa, Unknown
  Bacterial polypetide isolated from the Sargasso Sea
TAENVAEKWNISRKEQDKFAFESQTKAQEAIKNNKFEEEILNEFGVLDEHPRSDVTTDSLAKLKTIFKENGTVTPGNSSGINDGAAGVIMMQRSESERRKLNPLVKIVSWASCGVDPALMGSGPIPSAKKALEKANWEIKDLDLVESNEAFAAQSLAVIKDLKIPKEIVNVNGGAIALGHPIGASGTRIIVTLIHEMIRRNVKKGLGTLCIGGGMGIAMCIERD

SEQ ID NO: 114827 - protein, 105 aa, Unknown
  Bacterial polypetide isolated from the Sargasso Sea
TTAPGKAINKVLLKTNLKPDDIDLWEINEAFSVVTMAAMDDFKIKHDKVNIYGGAIALGHPIGASGARILTTLINAMTRQNAKKGLASLCIGGGEASAIIIERYD

SEQ ID NO: 114828 - protein, 134 aa, Unknown
  Bacterial polypetide isolated from the Sargasso Sea
MSKKEAEKKGIKPLAEIKSWASCGVDPSVMGTGPIPSSKKALEIAGWQSKDLDLIEANEAFAAQSCAVVKELALPMEKVNVNGGAIALGHPIGASGTRIFVTLIHEMLKRDSKKGLATLCIGGGMGVAMCIERK

SEQ ID NO: 114829 - protein, 77 aa, Unknown
  Bacterial polypetide isolated from the Sargasso Sea
ANEAFAAQAIAVGRELHWDSAKVNVNGGAIALGHPIGASGCRILVSLIHEMQRRDARRGLATLCIGGGQGVALAIER

SEQ ID NO: 114830 - protein, 371 aa, Unknown
  Bacterial polypetide isolated from the Sargasso Sea
MQGRSVIVSAVRTPIGAFQGYLSSLSASDLASICIKDILDQTGIQTNQINEVILGNVLSAGQGQAPARQATLKSGCPDSVEALTINKMCGSGLKAVMLADQAIRCGDADLILAGGMESMSNAPYLLNDARAGKKLGHSKVIDSMIHDGLWDAYNDKHMGNCAEMLAKDRNYSREAQDEYAIESYNRAQQATTDGIFQTEIVPVVIPQRKGEPLVIDEDEEPAKARFEKIPALKPAFDKDGTITAANASKLNDGAAVMLITSEENAKDLGLKPLVRILEQASASHQPEWFTTAPSKAIGKVLNKAGLKANDIDLWEINEAFAVVAMAAIEDYNIQYENVNIYGGAVALGHPIGASGARILTTLINGMSRQNV

SEQ ID NO: 114831 - protein, 268 aa, Unknown
  Bacterial polypetide isolated from the Sargasso Sea
MPKARYGYRMALEAQDTVLDGMVYDGLWDIFNNYHMGMTAENLAEKYNISREEQDKFAIESQGKAKKAQRAGTFKKEIVPVQLKKGIFDIDEHPREVSMAALSRLKPVFTPEGSVTAGNASGINDGAAYMVVSSEEKAKELGLDPVGEVISYAVAGVEPSIMGIGPVPAMNKALAKAGLTIDDIDLVELNEAFAVQSLAVLSDFPIPAEKLNVNGGAVALGHPIGASGTILVVKLLHEMQRRKAKRGLVSLCVGGGMGIAMVIENPKA

SEQ ID NO: 114832 - protein, 283 aa, Unknown
  Bacterial polypetide isolated from the Sargasso Sea
KILIAGGQENMSLAPHAIHLRDGKKLGDTQLIDTMIKDGLWDAFHGYHMGITAENVAEKFQVTRDEQDKFSLKSQQKALKAQKENRFKDEIIDLKIKLKKTESSFNKDEHPREGISLEALSRLKPVFKKDGTVTAGNASGINDGAAAVTLMTKDEADKRGVKKLVSIKSWASCGVDPALMGTGPIPSSKKALDLAGWKVKDVDLFEINEAFAAQSLAVLKTLSIPEEKVNVNGGAIALGHPIGASGTRILVTLIHEMIKRDVRKGLATLCIGGGMGIAMCVER

SEQ ID NO: 114833 - protein, 92 aa, Unknown
  Bacterial polypetide isolated from the Sargasso Sea
KKANWKLKDIDLFEINEAFAAQCIAVRRELKIDQSKVNINGGAIALGHPIGASGARILVTLLHEMKRSNKKKGCATLCIGGGMGIALCIERN

SEQ ID NO: 114834 - protein, 297 aa, Unknown
  Bacterial polypetide isolated from the Sargasso Sea
TGQNSARQAAIKAGISISKPAFIVNQVCGSGLRAVISGFQSIKLGESKKVISGGQENMSIAPKLILNKDLKKNLQNELIDSMIYDGLLDAFNNYHMGMTAENVAKKFDISREEQDKFALNSQKKTQEAIKYNKFKKEIVEIKLNGNILKKDEHPRDNLNLKDLQKLKTVFKKNGTVTPGNSSGINDGAAALLLTNLEEVEKKSIEPLGKIVSWASVGVDPSLMGLGPIGAVKKAIKKAKWKIEDIDLFEINEAFAAQSIAVINELNIDKSKVNVNGGAIALGHPIGASGARILVTLC

SEQ ID NO: 114835 - protein, 305 aa, Unknown
  Bacterial polypetide isolated from the Sargasso Sea
NQVCGSGLRSVVAGYQAIISNDSKIIIAGGQESMTNAPHAIHFDKDKKLNESKLIDTMIKDGLWDAFFDYHMGVTAENVATKWQITRKDQDHFAFSSQLKADRAKKEKKFKNEIIPAIFKGKNKLEIDEHPREGMTLERLEKLKPSFKNNGTVTPGNASGINDGAAAVVLMSSNEAKKRSLKPLAKIISWATCGVDPSLMGSGPIPASKKALQKAGWKISDLDLIESNEAFAAQSLAVIKELGIPEEKVNVNGGAIALGHPIGASGTRILVTLIHEMQKRKSKKGLATLCIGGGMGIAMCIERNV

SEQ ID NO: 114836 - protein, 109 aa, Unknown
  Bacterial polypetide isolated from the Sargasso Sea
DPALMGLGPIEAIRGAIKKAKWDLDEIDLFEINEAFAAQSIAVIRELGIDQSKVNVNGGAIALGHPIGASGARILVTLIHEMKRQNKNKGCATLCIGGGMGIALCVEKI

SEQ ID NO: 114837 - protein, 166 aa, Unknown
  Bacterial polypetide isolated from the Sargasso Sea
ALQRLKTAFQKEGTVTAGNASGINDGAAAVVLMSKKEAEKKGIKPLAEIKSWASCGVDPSVMGTGPIPSSKKALEIAGWQSKDLDLIEANEAFAAQSCAVVKELALPMEKVNVNGGAIALGHPIGASGTRIFVTLIHEMLKRDSKKGLATLCIGGGMGVAMCIERK

SEQ ID NO: 114838 - protein, 248 aa, Unknown
  Bacterial polypetide isolated from the Sargasso Sea
MMVDGLIDSYNHYHMGVTAENIAEKYQITRADQDKFALNSQKKAINAIDTNKFKDEVIPIKINGKLILEKDEYPRKDTNINKLSSLKTVFKDGGTVTAGNASGLNDGAAAVVIMNNQSAKKRNLKPLAKIVSWAQCGVDPSLMGTGPIPASKLALKKAGWNVKDLELIESNEAFAAQAIAVNKELGLNSEIVNVNGGAIALGHPIGASGARILVTLIHEMKKRKLQKGLATLCIGGGMGIAMCIESIL

SEQ ID NO: 114839 - protein, 184 aa, Unknown
  Bacterial polypetide isolated from the Sargasso Sea
MGSFLYRDEHPRKGLIKSDLKKLKTVFLNNGTVTAGNSSGINDGAAALLLTTAEEAKKKSIEPLAKIISWASVGVDPALMGLGPIGAITEAIKKAKWSINDIDLFEINEAFAAQSIAVIRELNIDKFKVNVNGGAIALGHPIGASGARILVTLVHEMKKRKKNKGCATLCIGGGMGIALCIERI

SEQ ID NO: 114840 - protein, 258 aa, Unknown
  Bacterial polypetide isolated from the Sargasso Sea
MQDVVIVAATRTPIGSFHGALAPLSAVELGTAVVRSLLEKTAVAPEQIDEVILGQVLTTGCGQNPARQTALRAGLPSTTPALTINLVCGSGLKAVHQAVQAIRCGDAQIVIAGGQESMSNAPYFLDGARAGLRLGHASMKDSVVHDGLWDAFNDYHMGITAENLADKFVISREQQDAFALRSQQKAAAAIEAGRFSAEITPVSVPQGKKPPRVVDRDEQPRPDTQADKLAQLKPAFRPGNGTVTAGNASSINDGAAAV

SEQ ID NO: 114841 - protein, 290 aa, Unknown
  Bacterial polypetide isolated from the Sargasso Sea
KSKLSKQEVDEIILGQVLTAGLGQNPARQAAIKAGIPKEKPAYVVNQVCGSGIRSVVSGYQSLSSGNSKVVIAGGQENMSLAPHAIHLRDGKKLGDAKLIDTMIKDGLWDAFHGYHMGVTAENVAEKFQITREQQDKFALRSQEKALNAQKQKRFQDEIMNFKITANKAEINFNKDEHPREGINLDALSRLKPVFKKDGTVTAGNASGINDGAAAVILMTADEAEKKNKQKLVSIKSWASCGVDPALMGTGPIPSSKKALELAGWDIKDVDLFEINEAFAAQSLAVLKTL

SEQ ID NO: 114842 - protein, 160 aa, Unknown
  Bacterial polypetide isolated from the Sargasso Sea
MVFQKNGTVTPGNSSGINDGAAALLLTTLDEAKKKSIKPLAKIVSWASVGVDPALMGLGPIEAVRQALKKAKWKIDEIDLFEINEAFAAQSIAVIQELDIDKNKVNVNGGAIALGHPIGASGARILVTLIHEMRRQNKSKGCVTLCIGGGMGIALCVEKI

SEQ ID NO: 114843 - protein, 288 aa, Unknown
  Bacterial polypetide isolated from the Sargasso Sea
KRETIKIVISGAQESMSLAPHAIFLRKGKKLGDAEIIDTMIKDGLWDAFHGYHMGITAENVAEKFQVTREEQDKFALKSQEKAIRAQKENKFKDEIINVKIKSKKAEIDFNKDEHPREGINLEALSRLKPVFKKDGTVTAGNASGINDGAAAVTLMSSSEAEKRGLKKLVSIKSWASCGVEPALMGTGPIPSTKKALDIAGWSVKDVDLFEINEAFAAQSLAVLKTLSIPEEKVNVNGGAIALGHPIGASGTRILVTLIHEMIKRDVKKGLATLCIGGGMGIAICIER

SEQ ID NO: 114844 - protein, 164 aa, Unknown
  Bacterial polypetide isolated from the Sargasso Sea
KKLKTVFKKNGTVTPGNSSGINDGAAALLLTTLEEAEKKSIKPLAKILSWACVGIEPALMGLGPIEAVREATKKAKWNLDEIDLFEINEAFAAQSIAVIRELGIDQNKVNVNGGAIALGHPIGASGARILVTLLHEMKRQNKKKGCATLCIGGGMGIAMCVEKI

SEQ ID NO: 114845 - protein, 326 aa, Unknown
  Bacterial polypetide isolated from the Sargasso Sea
SFKKTKFVNDEIDEVIMGQVLTAGTGQNPARQAAINAGIPISKPSHMINQVCGSGLRAVISGYQSIKLGESKNVISGGQENMSLAPHSIFYRDKKKILEDKLLDTMVNDGLIDAFNNYHMGVTAENVAKKFNITRKEQDEFALKSQKKTELAIANNKFNEELVKINHNGSILNIDEHPRIGLKMTDLEKLKTVFQDNGTVTPGNSSGINDGAAALLLTSLEEAEKKSIKPLVKIVSWSSVGVDPSVMGLGPIEAVREAIKTAKWNLDEIDLFEINEAFASQSIAVIRELGIDQNKVNVNGGAIALGHPIGASGARILVTLIHEMKR

SEQ ID NO: 114846 - protein, 105 aa, Unknown
  Bacterial polypetide isolated from the Sargasso Sea
MGLGPIEAVRQATHKAKWNIEDIDLFEINEAFAAQSIAVIKELGIELKKVNVNGGAIALGHPIGASGARILVTLIHEMIKQKKDKGCASLCIGGGMGIALCIERI

SEQ ID NO: 114847 - protein, 278 aa, Unknown
  Bacterial polypetide isolated from the Sargasso Sea
AHHTINVRNGLKMGDGKLKDSMIIDGLWCAMNNYHMGTTAENIARKYNISKEEQDEFATFSQNKTEEAQKNGYFKNEISPIKIKIKKESVLFEQDEFPRHGTTLEKINALKPVFDKEGTVTAGNASGLNDGAAATLIMREEKANELGLTPLARIISSASVGVDPKIMGIGPVPAVKKALEIAKWKIDEVDLIEANEAFAAQSLAVIKELELDKSKVNVNGGAIALGHPIGASGARVIVTLIHELKRQKKQKGIATLCIGGGQGIAMCIEALKMSKVVL

SEQ ID NO: 114848 - protein, 304 aa, Unknown
  Bacterial polypetide isolated from the Sargasso Sea
EYYGSVLTGGSGQNPARQASMKSGIPKEKPAFIVNQVCGSGIRSVASAFQSIRADDSKIVIAGGQESMSLAPHAIHLRDGKKLGDTELVDTMIKDGLWDAFNGYHMGITAENVAEKFQVTRDQQDKFALNSQNKALKAQKENKFLDEIIKFKIKSNKAEVDFYKDEHPREGINLSALSRLKPAFKKDGTVTAGNASGINDGAAAVVVMSSEEADKRGIEKLVSIKSWASCGVDPALMGTGPIPSSKKAMDLAGWSVKDIDLFEINEAFAAQSLAVLKTLSIPEEKVNVNGGAIAIGHPIGASGT

SEQ ID NO: 114849 - protein, 106 aa, Unknown
  Bacterial polypetide isolated from the Sargasso Sea
MMGLGPIPSSKKALEIAKWNVKDLDLVEINEAFAAQSIAVIKELKIPKEKVNVNGGAIALGHPIGASGARIVVTLLNELKKISGKKGLATLCIGGGMGISMCIEKD

SEQ ID NO: 114850 - protein, 217 aa, Unknown
  Bacterial polypetide isolated from the Sargasso Sea
RFDQDDFALNSQKKTENAINTNRFEEELIKINQPGINLDTDEHPRKKLTKSDLEKLKAVFKKNGTVTPGNSSGINDGAAGLLLTTLEEAKKKFIQPLVKIISWASVGVDPSLMGLGPIEAVRKAVKKANWDLNDVDLFEINEAFAAQSIAVIRELNIDEYKVNVNGGAIALGHPIGASGARILVTLIHEMIKQKKNKGCATLCIGGGMGIAICVERI

SEQ ID NO: 114851 - protein, 81 aa, Unknown
  Bacterial polypetide isolated from the Sargasso Sea
MGLGPIEAVRAAIKKAKWNLNEIDLFEINEAFAAQSIAVIRELGIDEDKVNVNGGAIALGHPIGASGARILVTLVHELNRQ

SEQ ID NO: 114852 - protein, 241 aa, Unknown
  Bacterial polypetide isolated from the Sargasso Sea
AFHGYHMGVTADNVATKFQVTRDDQDKFALNSQEKALKAQKENKFKEEIINFKIKSKKNEIIFNKDEHPREEINLEALKRLKPVFKKDGTVTAGNASGINDGAAAVTLMSEKEAEKRKLKKLVSIKSWTSCGVDPALMGTGPIPASKRALDLAGWSIKDVDLFEINEAFAAQSIAVLRTLSIPEEKINVNGGAIALGHPIGASGTRILVTLIHEMIKRDVNKGLATLCIGGGMGIAMCVER

SEQ ID NO: 114853 - protein, 147 aa, Unknown
  Bacterial polypetide isolated from the Sargasso Sea
ASGLNDGAAAVLVMKKEKANYLGLEPLVSIVSSSTIGVDPSIMGIGPVPAVKKALQQAKWSIDDLDLIEANEAFAAQSLAVSNELSWDMNKVNVSGGAIALGHPIGASGTRILVTLIHELERQNKKKGIATLCIGGGQGVAMCVERI

SEQ ID NO: 114854 - protein, 338 aa, Unknown
  Bacterial polypetide isolated from the Sargasso Sea
ISEVLKKSAFKKDEIDEIIMGQVLTAGGGQNPARQAAINAGIPISKPAYIVNQVCGSGLRAIVSGYQSIKLGESKNVISGGQENMSMAPYSIFYQDEKKISEKQMLSTMINDGLTDAFNNYHMGVTAENVAKKFNISREAQDQFALESQKKTEVAINNNKFDEEIIKINQNGNILNKDEHPRIGLKLIDLKKLKTVFQENGTVTPGNSSGINDGAAALLLTTLEEAEKKSIKPLVKIVSWASVGVDPALMGLGPIEAVRKAAEKAKWSLEEIDLFEINEAFAAQTLAVIRELGIDRNKVNVNGGAIALGHPIGASGARILVTLIHEMKKQKKIKGCAT

SEQ ID NO: 114855 - protein, 202 aa, Unknown
  Bacterial polypetide isolated from the Sargasso Sea
LTKRFKEEIIPVIVKKKKEEYEITDDEFPRHGSTIEKMQSLKSVFQKNGTVTAGNASGLNDGSAAVCLMKESKANELNISPLARIVSWASVGVDPSIMGIGPVNAVRTALSRAKWNIEDLDLIEANEAFAAQALAVSNELGWNMGKVNVNGGAIALGHPIGASGARILVTLIHELIKQKKEKGIATLCIGGGQGIAMCIERI

SEQ ID NO: 114856 - protein, 227 aa, Unknown
  Bacterial polypetide isolated from the Sargasso Sea
ATKFQVTRDDQDKFSLQSQEKALKAQKENKFKEEIINFKVNSKKTEIDFNNDEHPRPDITLEALKRLKPVFKKDGTVTAGNASGINDGAAAVTLMTEEESKKRKLNKLVSIKSWASCGVDPALMGTGPIPASKKALDLAKWSIKDVDLFEVNEAFAAQSIAVIRTLSIPEEKVNVNGGAIALGHPIGASGTRILVTLIHEMIKRDVNKGLATLCIGGGMGIAMCVER

SEQ ID NO: 114857 - protein, 308 aa, Unknown
  Bacterial polypetide isolated from the Sargasso Sea
GQNPARQSLINSGIENSKSATTINQVCGSGLAAVALGYNSLKLNDANIIIAGGQESMTNSPHYQVLRKGEKNEESKMKDSMLIDGLIDVYNQYHMGVTAENVAEKYQITRMEQDEFAVNSQSKASAAIKLNKFKNEIVPIKLKNGKMFDTDEYPKIGTNIEKLSTLKTVFKENGTVTAGNASGLNDGAAALTLMTLKTAKDKNLKPLAKIVSWAQCGVDPSIMGTGPIPASKLAIKKAGWTKDQIDLVEANEAFAAQAISVNKELGFNDEKVNVNGGAIALGHPIGASGARVLVTLIHEMQNRKSKKG

SEQ ID NO: 114858 - protein, 222 aa, Unknown
  Bacterial polypetide isolated from the Sargasso Sea
TRKDQDKFAFESQSKALKAQKENKFDDEIIPFTIQSKKGSTIFKKDEHPREGISMEALQRLKTAFQKDGTVTAGNASGINDGAAAVVLMSKEEAEKRGIKPLAEIKSWASCGVDPSVMGTGPIPSSKKALEIAGWKPKDLDLIEANEAFAAQSCAVVKELSLPIEKVNVNGGAIALGHPIGASGTRVFVTLIHEMLKRDSKKGLATLCIGGGMGVAMCIERK

SEQ ID NO: 114859 - protein, 259 aa, Unknown
  Bacterial polypetide isolated from the Sargasso Sea
ENMSLAPHAIHLRDGKKLGDTELVDTMIKDGLWDAFHGYHMGVTAENVATKFQVTREDQDKFAINSQKKALKAQAENKFKEEIVNCKIKSKKNENDFNIDEHPRDGVNLETLSRLKPVFKKDGTVTAGNASGINDGAAAVILMSNNEAEKKNIQKLVTIKSWASCGVDPALMGTGPIPASKKALDIAGWAIKDVDLFEINEAFAAQSIAVVKTLSIPEEKVNVNGGAIALGHPIGASGTRILVTLIHEMLKRDVKKGLA

SEQ ID NO: 114860 - protein, 303 aa, Unknown
  Bacterial polypetide isolated from the Sargasso Sea
FQSIKSGDAKILVAGGQENMSLAPHVIHLRDGKKLGDAELIDTMIKDGLWDAFNGYHMGITAENVAEKFQVTRDEQDKFALNSQEKALKAQKEGKFKDEIINFKIKSKNAELNFEKDEHPRKGINLDTLSRLKPVFKKDGTVTAGNASGINDGAAAVTLMTNDEAEKRNIEKLVSIKSWASCGVDPALMGTGPIPSAKKALDLAGWTIKDVDLFEINEAFAAQSLAVIKTLSIPSEKVNVNGGAIALGHPIGASGTRILVTLIHEMIKRDVKKGLATLCIGGGMGIAMCVEDNNLNYLCNDYH

SEQ ID NO: 114861 - protein, 219 aa, Unknown
  Bacterial polypetide isolated from the Sargasso Sea
EQDNFSLNSQKKTEKAYKENKFQDELIKLQIEDGDKKFIFEKDEHPRENLSIDDLKKLKTVFKENGTVTPGNSSGINDGAAALVLMSREQAEKKSLEPLVKIVSWATCGVEPSLMGLGPIPSIQEALSKANWKIDEVDLFEINEAFAAQSIAVIEELKIPEQNVNVNGGAIALGHPIGASGARILVTLVHEMIKQDKKKGCAALCIGGGMGIAMCIERS

SEQ ID NO: 114862 - protein, 219 aa, Unknown
  Bacterial polypetide isolated from the Sargasso Sea
DQDQFAYNSQIKALNAQKENRFKDEIIPYEIKSKKGSSIFKIDEHPREGISLNVLEKLKTVFQKDGTVTAGNASGINDGAAAVVMMSKSEAEKRGIKPIVEIKSWASCGVDPSIMGTGPIPSSNKALKIAGWNSKDLDLVEANEAFAAQSCAVVKELSLPMEKVNVNGGAIALGHPIGASGTRVFVTLLHEMQKRDSKKGLATLCIGGGMGIAMCVEKK

SEQ ID NO: 114863 - protein, 310 aa, Unknown
  Bacterial polypetide isolated from the Sargasso Sea
KRSNIKPAELDEIIFGQVLTGGSGQNPARQAAINAGIPKEVPAYVVNQVCGSGIRSVVSGFQSIKAGNSKKLIAGGQENMSLAPHAIHLRDGKKLGDAELIDTMIRDGLWDAFNGYHMGVTAENVAEKFQVTRDEQDKFSLKSQEKALNAQKKNKFKEEIINLKIRSKKTEIDFNIDEHPREGINLDTLSRLRPVFKKNGTVTAGNASGINDGAAAVTLMSKQEAEKRGLEKLVTVKSWASCGVDPALMGTGPIPSSKKALELAGWDIKDVDLFEINEAFAAQSLAVIRTLSIPEEKVNVNGGAIALGHP

SEQ ID NO: 114864 - protein, 247 aa, Unknown
  Bacterial polypetide isolated from the Sargasso Sea
KDGLWDAFHGYHMGITAENVAEKFQVTREEQDKFALKSQEKAIKAQKENKFKSEIVNFKIKSKKAEVDFEKDEHPREGINLEALKRLKPVFKKDGTVTAGNASGINDGAAAVTLMSEDEAEKRKLQKLVSIKSWASCGVEPSLMGTGPIPSSKKALDIAGWSVKDVDLFEINEAFAAQSLAVLKTLSIPEEKVNVNGGAIALGHPIGASGTRILVTLIHEMIKRDVKKGLATLCIGGGMGIAMCVER

SEQ ID NO: 114865 - protein, 285 aa, Unknown
  Bacterial polypetide isolated from the Sargasso Sea
VPAYVVNQVCGSGLRSITSGFQSIQSGDSKIVVAGGQESMSLAPHAIYLRDGKKLGDTELIDTMIKDGLWDAFHGYHMGITAENVAEKFQVTRDQQDEFALMSQEKALKAQRQNKFINEIVNFKIKSKKAETNFDNDEHPREGLNLDALSRLKPVFKKDGTVTAGNASGINDGAAAVTLISSEEAKKRNIEKLVTIKSWASCGVDPALMGTGPIPSTKKALDLAGWKINDIDLFEINEAFAAQSIAVIKTLSIPEEKVNVNGGAIALGHPIGASGTRILVTLIHE

SEQ ID NO: 114866 - protein, 192 aa, Unknown
  Bacterial polypetide isolated from the Sargasso Sea
INKKKFDNEIINDDTDEHPRTGITINDLSKLKSAFKEKGTVTPGNSSGINDGAAAVVLTTRELAEKHNLEILGKIISWATCGVDPSIMGLGPIPSSNKALEIAKWNVKDLDLVEINEAFAAQSIAVIKELKIPKEKVNVNGGAIALGHPIGASGARIVVTLLNELKKISGKKGLATLCIGGGMGISMCIEKD

SEQ ID NO: 114867 - protein, 267 aa, Unknown
  Bacterial polypetide isolated from the Sargasso Sea
ENMSRAPHVLTDSRTGAQLGNSQLVDSLVHDGLWDAFNDYHMGVTAENLAREYGISRELQDAYALHSQHKARMAIDAGRFKDEIVPVVTQRNGQSLVVDTDEQPRTDASAEGLARLDPTFDRLGSVTAGNASSINDGAAAVMMMSEAKAQELNLPVLARIRAFASVGVDPALMGIAPVYATRRCLERVGWQLADVDLIEANEAFAAQALSVGKMLEWDERRVNVNGGAIALGHPIGASGCRILVSLVHEMVKRRAHKGLATLCIGGG

SEQ ID NO: 114868 - protein, 257 aa, Unknown
  Bacterial polypetide isolated from the Sargasso Sea
LGDTEIIDTMIKDGLWDAFNGYHMGVTAENVATKFQVTRDDQDKFALRSQEKAIHAQKENKFKEEIVNFKIKSKKNEVNFNKDEHPREINLEGLTRLKPVFKKDGTVTAGNASGINDGAAAVAIMSADEAERRGLQKLVSIKSWASCGVEPALMGTGPIPASKKALDLAGWKIEDVDLFEINEAFAAQSIAVLKTLGIPGEKVNVNGGAIALGHPIGASGTRILVTLIHEMIKRDVKRGLATLCIGGGMGIAMAIER

SEQ ID NO: 114869 - protein, 333 aa, Unknown
  Bacterial polypetide isolated from the Sargasso Sea
REILRKSKFDKDDIDEVIMGQVLTAGGGQNPARQAAINAGIDISKPAHIVNQVCGSGLRAVISGYQSIKLGEVKNVISGGQENMSLAPHSIFYRDNKKISEKHLIDTMINDGLIDAFNNYHMGVTAENVAKEFDISRVEQDDFALNSQKKTETAINTNRFKEELIKINQSGINLEKDEHPRKDLNKSDLGRLKAVFLKDGTVTPGNSSGINDGAAALLLTTFEEAKKRSIQPLVKIISWASVGVDPTLMGLGPIEAVREAVKKAKWNLNDVDLFEINEAFAAQSIAVIRALNIDENKVNVNGGAIALGHPIGASGARILVTLIHEMIKQKKNK

SEQ ID NO: 114870 - protein, 104 aa, Unknown
  Bacterial polypetide isolated from the Sargasso Sea
GSGPIPSSNKALKLANWRINDLDLVETNEAFAAQSLAVIKELKIPEEIVNVNGGAIALGHPIGASGCRIVVTLLHEMKRRNSKKGLATLCIGGGMGIAMCIERD

SEQ ID NO: 114871 - protein, 260 aa, Unknown
  Bacterial polypetide isolated from the Sargasso Sea
KLGDTELVDSMIKDGLWDAFNGYHMGITAENVAQQFQVTRKDQDKFAFESQSKALKAQKENKFDNEIISYEIKSKKGNAIFKRDEHPRSTTSLETLGRLKSAFQKDGTVTAGNASGINDGAAAVVLMSKDEAEKRGIKYLAEIKSWASCGVDPSVMGTGPIPSSKKALQIAGWKSKDLDLVEANEAFAAQSCAVVKELSLPMEKVNVNGGAIALGHPIGASGTRIFVTLIHEMLKRDSKKGLATLCIGGGMGVAMCVERK

SEQ ID NO: 114872 - protein, 266 aa, Unknown
  Bacterial polypetide isolated from the Sargasso Sea
LFKLNDTNIVIAGGQESMTNSPHYLNYRMEKNLSEEKLKDSMLIDGLIDAYDDYHMGVTAENVAEKYQITRNDQDNFAFNSQKKAIKAISENKFKEEIVPIKLKDEKIFDKDEYPRSDTNIEKLSNLKTVFKENGTVTAGNASGLNDGAAAVTLMNYKTSKDKGLKPIAKIVSWAQSGVDPKLMGTGPIPASKLALKKAGWNINDLDLVESNEAFAAQSIAVIKELGLKESIVNVNGGAIALGHPIGASGARILVTLVHEMQKRKY

SEQ ID NO: 114873 - protein, 260 aa, Unknown
  Bacterial polypetide isolated from the Sargasso Sea
KKLGDDKLIDTMIKDGLWDAFHGYHMGVTAENVAEKFQITREAQDKFALKSQEKALMAQKENKFREEIINLKIKSNKSEVNFNKDEHPREGISIETLSKLKPVFKKDGTVTAGNASGINDGAATVTLMSSKEAEKRNIKKLVSIKSWASCGVDPALMGTGPIPSTKKALDLAGWNIKDVDLFEINEAFAAQSLAVIKTLSIPEEKVNVNGGAIALGHPIGASGTRILVTLIHEMIKRDVKKGLATLCIGGGMGIAMSIER

SEQ ID NO: 114874 - protein, 165 aa, Unknown
  Bacterial polypetide isolated from the Sargasso Sea
ALSRLKPVFKKDGTVTAGNASGINDGAAAVIMMSSEESEKRQIEKLVTIKSWASCGVDPALMGTGPIPSSKKALELAGWNIKDVDLFEINEAFAAQSLAVLKTLSIPEEKVNVNGGAIALGHPIGASGTRILVTLIHEMIKRDVKKGLATLCIGGGMGIAMCLER

SEQ ID NO: 114875 - protein, 236 aa, Unknown
  Bacterial polypetide isolated from the Sargasso Sea
MGITAENVAQKFQVTRKDQDKFAFDSQTKALKAQKENKFDDEIVPYTIQLKKGTAVFKNDEHPRDGISMEALQRLKTAFQKEGTVTAGNASGINDGAAAVVLMSKKEAEKKGIKPLAEIKSWASCGVDPSVMGTGPIPSSKKALEIAGWQSKDLDLIEANEAFAAQSCAVVKELALPMEKVNVNGGAIALGHPIGASGTRIFVTLIHEMLKRDSKKGLATLCIGGGMGVAMCIERK

SEQ ID NO: 114876 - protein, 165 aa, Unknown
  Bacterial polypetide isolated from the Sargasso Sea
MSNLKTVFKENGTVTAGNASGLNDGAAAVTLMNYKTSKDKGLKPFAKIVSWAQSGVDPKLMGTGPIPASKLALNKAGWNINDLDLVESNEAFAAQSIAVIKELGLKEDIVNVNGGAIALGHPIGASGARILVTLVHEMQKRKYKKGLATLCIGGGMGISMCVESI

SEQ ID NO: 114877 - protein, 317 aa, Unknown
  Bacterial polypetide isolated from the Sargasso Sea
VLTGGAGQNPARQAAIRAGIPKEKTGYIINQVCGSGLRAIVAGYQSILLNDVKIVIAGGQESMTNSNEEMMLKDGLIDAYNNYHMGITAENVAEKWNISRKEQDAFAVSSQLKAQEAIKNKKFSEEIINGKLLHDEHPRKEVTLEILSKLNSAFKKNGTVTAGNSSGINDGAAAVLLMTREESDKRGLKPIAKIVSWATCGVDPALMGSGPIPSSKKALEKAKWKINELDLVESNEAFAAQSIAVVKELKIPIEKVNVNGGAIALGHPIGASGARIVVTLIHEMVRRNAKKGLATLCIGGGMGIAMCIERELILKRI

SEQ ID NO: 114878 - protein, 273 aa, Unknown
  Bacterial polypetide isolated from the Sargasso Sea
NKISYIVNQVCGSGLRAIVLAYQSLLLDSSKVIIAGGQESMSRCNKELMMKDGLIDAFNNYHMGVTAENVAEKWNITRDEQDNFALNSQSKVQDAIKKKKFEDEIIKNESYKSFKDEHPRANIIFQDLTKLKPVFKKDGTVTPGNSSGVNDGAAGVLIMKRNESEKRDLEPLGKIVSWASCGVDPALMGSGPIPASKKALEIANWKINDLDLVESNEAFAAQSLAVIKELKIPENIVNVNGGAIALGHPIGASGCRIVVTLLHEMKRRSSKKG

SEQ ID NO: 114879 - protein, 325 aa, Unknown
  Bacterial polypetide isolated from the Sargasso Sea
KDIVITAASRTAVGSLGRSLKNISGVDLGSVVILESLKRSKIKGEEIDEVIMGQVLTASTGQNPARQAAMKSGIPKEKPAYVVNQVCGSGLRSIASGFQSIKAGDSKIVIAGGQECMSLAPHAVHLRDGKKLGDTEMTDTMIKDGLWDAFHGYHMGVTAENVSTKFQVTREDQDKFALKSHEKALKAQKENKFKEEIVNFKIKSKKNEIDFNKDEHPREEISFEALTRLKPVFKKDGTVTAGNASGINDGAAAITLMSAEEAEKRKLQRLVSIKSWASCGVEPSLMGTGPIPASKKALDLAGWSINDVDLFEINEAFAAQSIASL

SEQ ID NO: 114880 - protein, 254 aa, Unknown
  Bacterial polypetide isolated from the Sargasso Sea
LVDTMIVDGLWDVYTQYHMGITAENVPKQYGITRDMQDALALASQQKAAAAQDAGKFVGEIVGVSLAQKKGDPILFNTDEYLNRKTNAEALAGLRPAFDKAGSVTAGNASGLNDGAAAVVVMSAKKAAALGLKPLARIAAFGTSGLDPATMGMGPVPASRKALQRAGWNAADVDLFELNEAFAAQACAVNKELAIDPAKVNVNGGAIAIGHPIGASGCRILVTLLHEMQRRDAKKGLAALCIGGGMGVSLAVER

SEQ ID NO: 114881 - protein, 296 aa, Unknown
  Bacterial polypetide isolated from the Sargasso Sea
GQVLTGATGQNPARQAAIHCGLPIEKTAYVINQVCGSGLRSVAAGYQAIISNDSNIIIAGGQESMSQAPHAIHFKNGKKLEENNLIDTIIKDGLWDAFNGYHMGVTAENVASKWKISRKDQDNFALTSQNKAEKAQKEGKFKDEIVSVVLKDKNTKNSFEIDEHPRSGMNIQKLEKLNPSFKKDGTVTPGNASGINDGAAALVLMSEKEAKSRNLKPLAEIVSWATCGVDPSLMGSGPIPASTKALKKAGWKIKDLDLVESNEAFAAQSLAVIKDLKIPEEIVNVNGGAIALGHPI

SEQ ID NO: 114882 - protein, 258 aa, Unknown
  Bacterial polypetide isolated from the Sargasso Sea
LGDAELIDTMIKDGLWDAFNGYHMGITAENVAEKFQVTRDEQDKFALNSQEKALEAQKEGKFKDEIINFKIKSKKAELNFEKDEHPRKGINLDALSRLKPVFKKDGTVTAGNASGINDGAAAVTLMTSDEAEKRNIEKLVSIKSWASCGVDPALMGTGPIPSTKKALDLAGWSIKDVDLFEINEAFAAQSLAVIKTLSIPNEKVNVNGGAIALGHPIGASGTRILVTLIHEMIKRDVKKGLATLCIGGGMGIAMCVER

SEQ ID NO: 114883 - protein, 301 aa, Unknown
  Bacterial polypetide isolated from the Sargasso Sea
IDEVVMGQVLTGGAGQNPARQAAIGAGIPNSKTAYVINQVCGSGLRSIVAGYQSILSGDTKIVIAGGQESMTNSTEKMMLKDGLVDAYNKYHMGITAENVAEKWNISRKDQDNFALSSQLKAQQAIKNNKFKDEIIDDFILQDEHPRKEVTIEGLSKLSPAFKKNGTVTAGNSSGINDGASAVLLMEREEAERRNLNPLAKIVSWATCGVDPELMGSGPIPASKKALDKSGWNIHDLDLVESNEAFAAQSLAVIKELKIPKEIVNVNGGAIALGHPIGASGSRITVTLIHEMIKRDSKKGL

SEQ ID NO: 114884 - protein, 310 aa, Unknown
  Bacterial polypetide isolated from the Sargasso Sea
AGIGQAPARQAAIGAGMPDSVECLTINKMCGSGLKAVMLGSQAIQVNDANIIIAGGFESMSQSPYLVPKARAGYRLGHGNLIDSVIFDGLWDVYNDIHMGNCAEICARDRGYSIIDQNDFAKESYQRAINAQEIGAFNNEIVSIEVKNKNNTITFDNDEEPKKVNFEKMDTLKPVFEKDGTITAANASTINDGAACLLMMSENKASELGFKPLARIISQASAAQDPKWFTTAPIEAIKKVLTKVDLTVDDIDLWEINEAFAPVVMAVVDDYNLDYGKININGGAIALGHPIGASGARILTTLIHSLNQKE

SEQ ID NO: 114885 - protein, 291 aa, Unknown
  Bacterial polypetide isolated from the Sargasso Sea
SGYQSIKLGDVKNVISGGQENMSLAPHSIFYRDNKKISEKHLIDTMINDGLIDAFNKYHMGVTAENVAKKLNISRVEQDDFALNSQKKTETAINTNRFKEELIKINQSGINLEEDEHPRKDINKSDLGRLKAVFLKDGTVTPGNSSGINDGAAALLLTTFAEAKKRSIQPLVKIISWASVGVDPTLMGLGPIEAVREAVKKAKWNLNDIDLFEINEAFAAQSIAVIRELNIDENKVNVNGGAIALGHPIGASGARILVTLIHEMIKQKKDKGCATLCIGGGMGIAICVERI

SEQ ID NO: 114886 - protein, 268 aa, Unknown
  Bacterial polypetide isolated from the Sargasso Sea
GDSKIAVAGGQENMSLAPHTIHLRNGKKLGDAEMIDTMIKDGLWDAFHDYHMGVTAENVAEKFQITREEQDKFALKSQEKALKAQKQNKFKEEIINFKVKSKKAQIDFNKDEHPREGINLHTLKKLKPVFKKDGTVTAGNASGINDGAAAVTLMSDDEARKRGLNKLVSIKSWASCGVDPALMGTGPIPASKKALDLAGWSVKDVDLFEINEAFAAQSLAVLKTLSIPHEKVNVNGGAIALGHPIGASGTRILVTLIQEMIKRDVKKV

SEQ ID NO: 114887 - protein, 133 aa, Unknown
  Bacterial polypetide isolated from the Sargasso Sea
MTDFEAEKREISKLVSIKSWASCGVDPALMGTGPIPSSKKALEIAGWSVKDVDLFEINEAFAAQSLAVIKTLSIPDEKVNVNGGAIALGHPIGASGTRIVVTLIHEMIKRDVKRGLATLCIGGGMGIAMCVER

SEQ ID NO: 114888 - protein, 180 aa, Unknown
  Bacterial polypetide isolated from the Sargasso Sea
DFNKDEHPRDGINLDTLSRLKPVFKKEGSVTAGNASGINDGAAAVTLMSNEEAERRNLNKLVSIKSWASCGVDPSLMGTGPIPSTKKALDIAGWTIKDVDLFEINEAFAAQSIAVIKTLSIPDEKVNVNGGAIALGHPIGASGTRILVTLIHEMIKRDVKKGLATLCIGGGMGIAMCVER

SEQ ID NO: 114889 - protein, 257 aa, Unknown
  Bacterial polypetide isolated from the Sargasso Sea
MSRATHAIFYREDKKFSEKKLVDTMISDGLLDKFNDYHMGVTAENVADKYKISRDEQDNFSLNSQKKTEKAYKENKFKDELIKLQIQEGDKKFIFEKDEHPRENLNIHDLKKLKSVFKENGTVTPGNSSGINDGAAALVLMSREEAEKKSLEPLVKINSWATCGVEPSLMGLGPIPSIQKALSKANWSMDEVDLFEINEAFAAQSIAVIKELKIPEEKVNVNGGAIALGHPIGASGSRILVTLIHEMIKQDKRKGCA

SEQ ID NO: 114890 - protein, 178 aa, Unknown
  Bacterial polypetide isolated from the Sargasso Sea
MDEHPRNGITINDLSKLNSVFKEKGTVTPGNSSGINDGAAAVVLTTRELAEKHNLEIMGKIKSWATCGVDPSMMGLGPIPSSNKAIEKAKWNIKDLDLIEINEAFAAQSIAVIKELKIPKEKVNVNGGAIALGHPIGASGARIVVTLLNELKKVNGKKGLATLCIGGGMGISMCIEKD

SEQ ID NO: 114891 - protein, 286 aa, Unknown
  Bacterial polypetide isolated from the Sargasso Sea
ENKIVIAGGQENMSRATHAIYYREDKKFSENKLIDTMIKDGLLDSFNDYHMGVTAENVAEKYKISRDEQDNFSLNSQKKTEKAYSENRFKDELIKLQIEDGDKKFIFEKDEHPRENLSIDDLKKLKTVFKENGTVTPGNSSGINDGAAALVLMSREQAEKKSLEPLVKIVSWATCGVEPSLMGLGPIPSIQEALSKANWKIDEVDLFEINEAFAAQSIAVIEELKIPEQKVNVNGGAIALGHPIGASGARILVTLVHEMVKQDKKKGCAALCIGGGMGIAMCIERS

SEQ ID NO: 114892 - protein, 295 aa, Unknown
  Bacterial polypetide isolated from the Sargasso Sea
PGDQINEVILGQVLTAGCGQNPARQSAINAGLPASVPAITINKVCGSGLKAVHMAVQAIQCGDAEMILAGGQESMSQAPHVLPNSRNGQRMGNWSMIDTMITDGLWDAFNDYHMGITAENIVEKYGITRDEQDAFAAASQQKAVAAQKAGYFDGQIVPVTIPQRKGDPLVVDKDECPRDGVTGDSLGKLRPAFKKDGSVTAGNASSLNDGAAVVMVCSADKAKELGLTPLATIKAHANAGVDPAIMGTGPIPASQRCLERAGWTVDDLDLIEANEAFAAQAISVNRDLGWDTAKV

SEQ ID NO: 114893 - protein, 282 aa, Unknown
  Bacterial polypetide isolated from the Sargasso Sea
KVVIAGGQESMSNSPHYQNLRKGEKLDNEKIQDSMIIDGLLDVYNQYHMGVTAENVAEKYQITRAQQDEFAAKSQSKAAEAIKTNKFKDEIVPIKIKDEKIFDTDEYPKIGTTMEKLSTLKTVFKKDGTVTAGNASGLNDGAAALTIMNGKTAKEKNLKPLAKIVSWAQCGVDPSVMGTGPIPATKLALKKAGWKEDQLDLVEANEAFAAQAISVNKELGFNSDIVNVNGGAIALGHPIGASGARVLVTLLHEMKKRKSNKGLATLCIGGGMGIAMCVESLS

SEQ ID NO: 114894 - protein, 195 aa, Unknown
  Bacterial polypetide isolated from the Sargasso Sea
ITPILIPQRKGDPVAFAVDEQPRAGTTAESLAKLKPAFKKDGSVTAGNASSLNDGAAAVLLMSADKAKALGLPVLARIASYANAGVDPAIMGIGPVSATRRCLDKAGWQLADLDLIEANEAFAAQSLAVGKELEWDAQKVNVNGGAIAIGHPIGASGCRVLVTLLHEMIKRDAKKGLATLCIGGGQGVALALERN

SEQ ID NO: 114895 - protein, 87 aa, Unknown
  Bacterial polypetide isolated from the Sargasso Sea
NISSLDLVESNEAFAAQSLAVIKELKIPIEKVNVNGGAIALGHPIGASGARIVVTLIHEMIKRDAKKGLATLCIGGGMGIAMCIERD

SEQ ID NO: 114896 - protein, 81 aa, Unknown
  Bacterial polypetide isolated from the Sargasso Sea
LFEINEAFAAQTIAVIKELNIDEGKVNVNGGAIALGHPIGASGTRILVTLIHEMLRQNKSKGCATLCIGGGMGIAICVEKI

SEQ ID NO: 114897 - protein, 246 aa, Unknown
  Bacterial polypetide isolated from the Sargasso Sea
DGLWDAFHGYHMGVTAENVATKFQVTRDDQDKFALNSQEKALKAQKENKFKEEIISFKIKSKKNEINFNKDEHPREEINLEALKRLKPVFKKDGTVTAGNASGINDGAAAVTLMSEKEAEKRKLKKLVSIKSWTSCGVDPALMGTGPIPASKRALDLAGWSIKDVDLFEINEAFAAQSIAVLRTLSIPEEKINVNGGAIALGHPIGASGTRILVTLIHEMIKRDVNKGLATLCIGGGMGIAMCIER

SEQ ID NO: 114898 - protein, 307 aa, Unknown
  Bacterial polypetide isolated from the Sargasso Sea
SLNSNEIDELIFGQVLTSGNGQNPARQAAINGGIPSDKTACLINQVCGSGLRAIVLGYQSIVTLASKIVIAGGQESMSNSNEKIMLKDGLIDAFNNYHMGVTAENVAQKWNISREQQDDFSFLSQKKTKEAIISRRFKKEIILNSKDEHPRPDISIEKLSNLKPSFKENGTVTAGNSSGINDGAAAVLLMSRELAEKKGLEPLAKIVSWATAGVEPSLMGSGPIPASKIALKKAGWTIRDLDLIEINEAFASQILAVIKELKLPVENVNVNGGAIALGHPIGASGARIIVTLLHEMKRRNVKKGLAT

SEQ ID NO: 114899 - protein, 302 aa, Unknown
  Bacterial polypetide isolated from the Sargasso Sea
MGCVLPAGLGQAPARQAMLKAGLPLSAGATTINKVCGSGLKSVMLATDLLHAGSADVVVAGGMESMSNAPYILPKARAGMRMGHAEVKDHMMLDGLENAYDGKAMGCFAQKTADEHDFSRAQMDDYAVLSLTRAQQAISSGAFVEEITPVTFQTRKGEVTFATDEQPGNAKVDKIPTLKPAFAKDGTITAANSSSISDGAAALVLMRAEDAKAQNKTVLAHVVGHATHSQEPELFTVAPVGAVTKLLAKLGWTTSDVDLWEINEAFAMVTMLAIKELKLDVNKVNVNGGACALGHPIGASGA

SEQ ID NO: 114900 - protein, 206 aa, Unknown
  Bacterial polypetide isolated from the Sargasso Sea
NKAIQQNKFKDEIVKIHIEENDKKFIFEKDEHPRENLKIEDLKNLKTVFKKDGTVTAGNSSGLNDGAAALILMKRENADIKELKPLAKIVSWANCGVDPALMGLGPIPATKLALSKCGWDINQVDLFEINEAFAAQSIAVIKDLKIPIEKVNVNGGAIALGHPIGASGSRIVVTLIHEMIKQDKKKGVATLCVGGGMGIAICIEKD

SEQ ID NO: 114901 - protein, 278 aa, Unknown
  Bacterial polypetide isolated from the Sargasso Sea
YVVNQVCGSGLRSIASGFHSILSNNANIVLAGGQESMSQSPHVVHLRNGKKLGDTELIDSMIKDGLWDAFNGYHMGITAENVAQQFQVTRKDQDKFAFDSQTKALKAQKENKFDDEIVPFTIQLKKGSTIFKKDEHPRDGISMEALQRLRTAFQKDGTVTAGNASGINDGAAAVVLMSKMEAEKRGIKPLAEIKSWASCGVDPSVMGTGPIPSSKKALEIAGWQSKDLDLIEANEAFAAQSCAVVKELSLPIEKVNVNGGAIALGHPIGASGTRILSH

SEQ ID NO: 114902 - protein, 324 aa, Unknown
  Bacterial polypetide isolated from the Sargasso Sea
AVEKSKLKKSDVDEVIFGQVLTAGIGQNPARQAAIKSGIPKEIPAHIVNQVCGSGLRSIVAGFQSIISNSSKIIIAGGQESMSLAHHSTYLREGKKLGDIELVDTMIKDGLWDAFNGYHMGITAENVAEKFQVTRDEQDKFALKSQEKALKAQKEKKFKDEIINFKIKSKKAEINFDKDEHPREGINLDALSRLKPVFKKDGTVTAGNSSGINDGAAAVTLMTDEEAKKRNLKKLVKIKSWASCGVDPAFMGTGPIPSAKKALDLAGWSVKDVDLFEVNEAFAAQSIAVVKTLSIPDEKVNVNGGAIALGHPIGASGTRILVTL

SEQ ID NO: 114903 - protein, 370 aa, Unknown
  Bacterial polypetide isolated from the Sargasso Sea
MTKNSKDIVFTSALRTAIGRYKGMFSKFQAHDLGEKVIKNILNKSKIEPQLVDEVIFGQVLTGDTGQNPARQAAIKAGIPKDKTSYLINQVCGSGLRAIVSGYQSILLGDSKVIIAGGQESMTNCKKKAMLKDGLIDAFNNYHMGITAENVAEKWDITRKEQDLFSVSSQTKALEAIKNKKFNDEIIDDNSLTDEYPRSGVTLESLSKLKSVFKKNGTVTAGNSSGINDGAAAVMLMSREESEKRGLKPLAKIISWATCGVEPALMGSGPIPASKKALEKAKWNIDDLDLVESNEAFAAQSIAVIKELKIPIEKVNVNGGAIALGHPIGASGSRIVVTLIHEMIRRNAKKSLATLCIGGGMGIAMCIERD

SEQ ID NO: 114904 - protein, 390 aa, Unknown
  Bacterial polypetide isolated from the Sargasso Sea
MNEVFITSAVRTAVGSFNGSLANMPAHDLGKIVIKEAIGRSNVEASEVEEVILGQVLTAATGQNPARQAAINAGLNKETPAWLVNQVCGSGLRSVALAYQAIMNNDANIIVAGGQESMSQSPHCSHLRNGTKMGDNQMVDSMIKDGLWDAFNGYHMGTTAENVAQQWQITRDQQDEFAVESQKRASKAKSEGIFKDEIVGVEIKTRKETVVFDSDEYIKDNVQLEKLATLRPAFSKEGTVTAANASGINDGAAAMTVMSGEEVKKKNIEPIARIVSWASAGVDPSIMGTGPIPASRKALEKAGWSVADLDLIESNEAFAAQSCAVNKEMGWDTSKVNVNGGAIAIGHPIGASGARILVTLLNQMKRQDAKKGLATLCIGGGMGVALCVER

SEQ ID NO: 114905 - protein, 349 aa, Unknown
  Bacterial polypetide isolated from the Sargasso Sea
NRAKINHEDIDEVIMGQVLTAGAGQNPARQASINAGIPVSKPAHMINQVCGSGLRAVISGFQSIKIGDSINVISGGQENMSLAPHSIFYRDEKKISHDKLLDTMMKDGLIDAFNNYHMGITAENIAKKFDISREEQDEFALNSQKKTFAAITNNKFDDELIKINQNGIILNKDEHPRVDLKLPDLKKLRTIFQEKGTVTPGNSSGINDGAAALLLTTLNEAKKRSIEPLAKIVSWASIGVEPALMGLGPIEAVREAIKKARWDLDEIDLFEINEAFAAQSIAVIRELGIDQNKVNINGGAIALGHPIGASGARILVTLIHEMKKQNKKKGCATLCIGGGMGIALCVEKI

SEQ ID NO: 114906 - protein, 395 aa, Unknown
  Bacterial polypetide isolated from the Sargasso Sea
MSKNSSDVVITSALRTPIGRYKGSLKNISASKLGSIAIKEVIYKSKLDLEEIDEVIMGHVLTSGLGQNPARQASIGAGVPVSKPAHIVNQVCGSGLRSVVSGYQSISLEENKIVIAGGQENMSRATHAIYYREDKKFSENKLVDTMIKDGLLDSFNDYHMGVTAENVAEKYKISRDEQDNFSLNSQKKTEKAYSQNRFKDELIKLQIEDGDKKLIFEKDEHPRENLSIDDLKKLKTVFKENGTVTPGNSSGINDGAAALVLMSREQAEKKSLEPLVKIVSWATCGVEPSLMGLGPIPSIQEALSKANWKIDEVDLFEINEAFAAQSIAVIEELKIPEQKVNVNGGAIALGHPIGASGARILVTLVHEMIKQDKKKGCAALCIGGGMGIAMCIERS

SEQ ID NO: 114907 - protein, 325 aa, Unknown
  Bacterial polypetide isolated from the Sargasso Sea
KTKLKVDEIDEVILGQVLTGSCGQNPARQAAINSGIPKEKTAIIINQVCGSGLRSIVNGYQSLLTNSANFIIAGGQESMTNSIHDQMMKDGLTDAFYNYHMGVTAENVAAKYNISRQEQDEFALASQQKANIAISKKKFNNEIINDDIDEHPRTGITIDDLSKLNSVFKKKGTVTPGNSSGINDGAAAVVLTTRELAEKNNLEISGKIISWATCGVDPSMMGLGPIPSSKKALEIAKWNVKDLDLIEINEAFAAQSIAVIKELKIPKEKVNVNGGAIALGHPIGASGARIVVTLLNELKKMNGKKGLATLCIGGGMGISMCIEKD

SEQ ID NO: 114908 - protein, 391 aa, Unknown
  Bacterial polypetide isolated from the Sargasso Sea
MSKSVVITSATRTAVGSLGKALKNIPGEELGSVVIKEVIKRSNIKSSDIDETIMGQVLTGGTGQNPARQAAMKSGIPKEKPAYIVNQVCGSGLRSIASGFQSIKSGDSKIVIAGGQESMSLAPHAIHLRDGKKIGDTELVDTMIKDGLWDAFHGYHMGVTAENVATKFQVTRQEQDKFALKSQEKALKAIKENKFKDEITNFKIKSKKAEIDFNKDEHPRDGINLEGLARLRPVFQKDGTVTAGNASGINDGAAAVTLMSEEEAKKRDLKKLVTIKSWASCGVEPALMGTGPIPATKKALDLAGWKTDDVDLFEVNEAFAAQSIAVLKTLGIPDEKVNVNGGAIAIGHPIGASGTRILVTLIHEMIKRDVKRGLATLCIGGGMGIAMSIER

SEQ ID NO: 114909 - protein, 391 aa, Unknown
  Bacterial polypetide isolated from the Sargasso Sea
MNNKPDDVVICSAVRTPIGTYKGSLKDLKGDQLGTIVINEVLKRSKISNNQIDEVIMGQVLTAAGGQNPARQAAVNAGIPVSKPAYLVNQVCGSGLRAIISGYQQIKLGDANNVICGGQENMSMTPYSYFYSEKKEISKDQLINTMIHDGLTDAFKNYHMGVTAENVAKKFNISRKQQDEFALKSQKKTEIAIENNKFDDEIVQINHKGIILKKDEHPRKDLKLSDLEKLKTAFKDGGTVTPGNSSGINDGAAALLLTTFKEAQQNSLKPLAKIISWASVGLEPSLMGLGPIEAIRQASKKVNWNLNEIDLFEINEAFAAQAIAVISELGIDENKVNVNGGAIALGHPIGASGARILVTLIHEMKKQNKERGCAALCIGGGMGIALCVEKI

SEQ ID NO: 114910 - protein, 370 aa, Unknown
  Bacterial polypetide isolated from the Sargasso Sea
MVKNLKDVVIVSAARTAIGKLRGIWSNYQAHELGANVILSILKKSKIQTDAIDEVIMGQVLTGDTGQNPARQAAIKAGLPNDKTAYIINQVCGSGLRAVVAGYQSIISNDAKIVIAGGQESMTNSKEEFMLKDGLIDAYNNYHMGITAENVAEKFGISRKEQDKFAVASQLKAQEAIKQKKFKEEIIEGDNLLDEHPRANVTEESLSKLNTAFKENGTVTAGNSSGVNDGAAAVLLMNRAEAEKNNIKPLAKIVSWATCGVEPALMGTGPIPATNKALKKAGWSINDLDLIESNEAFAAQSIAVIKELKIPIEKVNVNGGAIALGHPIGASGARILVTLVHEMIRRDLKKGLTTLCIGGGMGISMCVERD

SEQ ID NO: 114911 - protein, 391 aa, Unknown
  Bacterial polypetide isolated from the Sargasso Sea
MSDKSKEVVIVGAVRTPIGTYKGSLKNIKSDQLGSIVIKEVLKKSKFNKDEIDEVIMGQVLTAGGGQNPARQAAINAGIPISKPVYIVNQVCGSGLRAVISGYQSIKLGDAKNVISGGQENMSIAPHSIFYRDKKKISEDKLVDTMINDGLIDAFNNYHMGVTAENVAKKFNISRQEQDEFALKSQKKTQTAIIDNKFDEELIKINQDGNILNKDEHARSGLKLSDLEKLKTVFKDNGTVTPGNSSGINDGAAALLLTTLEEAEKKSIKPLAKIVSWASVGVDPSLMGLGPIDAVRKAVKKAKWNLEEVDLFEINEAFAAQSIAVIRELGIDHDKVNVNGGAIALGHPIGASGARILVTLIYEMKRQNKNKGCATLCIGGGMGIALCVERV

SEQ ID NO: 114912 - protein, 391 aa, Unknown
  Bacterial polypetide isolated from the Sargasso Sea
MNSDKDIVITSAFRTAIGSFQGSLKDHKATELGTAVVKKCMEHSNLNGSEVDTVILGQVLQTGCGQNPARQAAINSGIDKDKTATTINQVCGSGLAAVTLGFNSLKLNDTNIVIAGGHESMTNSPHYLNYRMEKNLSEEKLKDSMLIDGLIDAYDDYHMGVTAENVAEKYQITRNDQDNFALNSQKKAIKAISENRFKEEIIPIKLKDQKIFDKDEYPRSDTNLEKLSNLKTVFKKNGTVTAGNASGLNDGAAAVTLMNYKTSKDKGLKPIAKIVSWAQSGVDPKLMGTGPIPASKLALKKAGWNINDLDLVESNEAFAAQSVAVIKELGLKNDIVNVNGGAIALGHPIGASGARILVTLIHEMQKRKCKKGLATLCIGGGMGISMCIENI

SEQ ID NO: 114913 - protein, 370 aa, Unknown
  Bacterial polypetide isolated from the Sargasso Sea
MAKNLKDIVIVSALRTPIGKLKGIWSKHGAPELGAKVILEVLNQSKVPSSDIDEIIMGQVLTGNTGQNPARQAAMMAGIPIEKTAYIINQVCGSGLRAVVAGYQSILSGDCEAVIAGGQESMTNSKEELMLKDGLIDAYKKYHMGITAENVAEKFQISRKDQDKFAVSSQLKAQEAIKNNKFKEEMINGDKLLDEHPRSNVTEEGLSKLKTAFKENGTVTAGNSSGVNDGAAAILLMNRKKAESYNLKPLAKIVSWATSGVDPALMGTGPIPATNKALKKIGWSIKDLDLIESNEAFAAQSIAVIKELKIPTEKVNVNGGAIALGHPIGASGSRILVTLTHEMIKRDLKKGLATLCIGGGMGISVCIERD

SEQ ID NO: 114914 - protein, 393 aa, Unknown
  Bacterial polypetide isolated from the Sargasso Sea
MTDVVIVSAARTAVGKFGGSLAKIAAPELGATVIRAVLERAGVKPEQVSEVIMGQVLTAGSGQNPARQALIKAGLPNAVPGMTINKVCGSGLKAVMLAANAIVAGDAEIVIAGGQENMSASPHVLPGSRDGFRMGDAKLVDTMIVDGLWDVYNQYHMGITAENVAKEYGITREEQDAFAALSQNKAEAAQKAGRFDDEIVPVAIPQRKGEPLQFATDEFVRHGVTAESLAGLKPAFSKDGSVTAANASGLNDGAAAVLVMSAQKAAALGLTPLARIKAYANAGVDPSVMGVGPVPASRRALERAGWTPGDLDLMEINEAFAAQALAVHKQMGWDTSKVNVNGGAIAIGHPIGASGCRILVTLLHEMAKRDAKRGLASLCIGGGMGVALAVERA

SEQ ID NO: 114915 - protein, 395 aa, Unknown
  Bacterial polypetide isolated from the Sargasso Sea
MSKIPKDVVITSALRTPIGKYKGSLKNISADKLGALVIKEAIFKSSLKGEDVDEVIMGHVLTAGLGQNPARQASIHAGVPVSKPAHIVNQVCGSGLRSIISAYQSIKLEQNEIVVAGGQENMSRATHAIFLRDDKKFIEDNLIDTMIKDGLTDSFNDYHMGVTAENIAEKYHITRREQDIFSISSQKKAKKAYEEKKFNDELIKLQIQSNNEKFIFEHDEYLRNNITLDDLEKLNTVFKENGTVTPGNSSGLNDGAAALVLMTREKAELKSLEILASIVSWSSSGVEPSLMGLGPIPSIKEALIKAQWQMEDIDLFEINEAFAAQTLAVIRELKIPEEKVNVNGGAIALGHPIGASGSRIVATLIHELKRQGKKKGCAALCIGGGMGIAMCVERN

SEQ ID NO: 114916 - protein, 394 aa, Unknown
  Bacterial polypetide isolated from the Sargasso Sea
MSKEKTVVITSAVRTAIGSLGGTLKNVPAYKLGSTVISNAIKKSNLKASDINEVIMGQVLTGGAGQNPARQSAMDSGIPKETPSYVVNQVCGSGLRSIASGFQSIMSNDSTIVVAGGQESMSQAPHVVHLRNGKKLGDTELVDSMIKDGLWDAFNGYHMGNTAENVAQKFQITRKDQDKFSFESQIKALKAQKENRFNDEIIPFEIKSKKGSSIFKKDEHPREGISLNVLEKLKTVFQKDGTVTAGNASGINDGAAAVVLMSKSEAEKRGIKPLAEIKSWASCGVDPSVMGTGPIPSSNKALDIAGWKAKDLDLIEANEAFAAQSCAVIKELGLPMEKVNVNGGAIALGHPIGASGTRVFVTLVHEMAKRNSKKGLATLCIGGGMGIAMCIERK

SEQ ID NO: 114917 - protein, 392 aa, Unknown
  Bacterial polypetide isolated from the Sargasso Sea
MRVAIIAAQRSAIGSFGGAFAQLTAVELGSQLLRKMLEKIPGLVSEIDEVIIGQVLTAGCGQNPARQTALRAGLSQQVPATTVNKVCGSGLKAVQLGMQAIANGDAELVVAGGQEVMSQAAHVLPQSRKGIKMGNWQLVDSMLSDGLTDALGGYHMGITAENIAQQWQISREQQDQYALVSQQKAARAQQQGAFSAEIIPLEVPLSKGKSQLIETDEQIRPDSSLEKLSTLRPVFKTEGTVTAGNASSINDGAAFVILASEQKAKQLGLPILGYVVATASAGVAPELMGSGPIAACNKVLAKANWQMADVDLIEANEAFAAQALCVSQDLQLEPAKVNIHGGAIALGHPIGASGCRILVTLLHAMHQQQADKGLATLCIGGGMGIAMLVSRT

SEQ ID NO: 114918 - protein, 395 aa, Unknown
  Bacterial polypetide isolated from the Sargasso Sea
MSKIPKDVVITSALRTPIGKYKGSLKNISADKLGALVIKEAIFKSSLKGEDVDEVIMGHVLTAGLGQNPARQASIHAGVPVSKPAHIVNQVCGSGLRSIISAYQSIKLEQNEIVVAGGQESMSRATHAIFLRDDKKFIEDNLIDTMIKDGLTDSFNNYHMGVTAENIAEKYHITRREQDTFSISSQKKAKKAYEEKKFNDELIKLQIQSNNEKFIFEYDEYLRNNITLDDLEKLNTVFKENGTVTPGNSSGLNDGAAALVLMTREKAELKSLEILASIVSWSSTGVEPSLMGLGPIPSIKEALIKAQWQIEDIDLFEINEAFAAQTLAVIRELKIPEEKVNVNGGAIALGHPIGASGSRIVATLIHELKRQGKKKGCAALCIGGGMGIAMCVERN

SEQ ID NO: 114919 - protein, 359 aa, Unknown
  Bacterial polypetide isolated from the Sargasso Sea
AVISESLKISNLKKDEVDEVIMGQVLTGGAGQNPARQALIHSGIPKEKPAYIVNQVCGSGIRSIASGFQSILANDSKIVIAGGQENMSLAPHSIHLRDGKKLGDTELTDTMIKDGLWDAFHGYHMGITAENVAEKFQVTREEQDKFALQSQEKAIKAIKDNKFKDEIINFKIKSKKAEIDFVKDEHPREGINLDALKRLKPVFKKDGTVTAGNASGINDGAAAVTLMSSTEAEKRNLKKLVEIKSWASCGVDPALMGTGPIPSTKKALDLAGWSVKDIDLFEINEAFAAQSLAVLKTLSIPSEKVNVNGGAIALGHPIGASGTRILVTLIHEMIKRDAKKGLATLCIGGGMGIAMCVER

SEQ ID NO: 114920 - protein, 390 aa, Unknown
  Bacterial polypetide isolated from the Sargasso Sea
MNEVFITSAVRTAVGSFNGSLANMPAHDLGKIVIKEAIARSNVEASEVEEVILGQVLTAATGQNPARQAAINAGLNKETPAWLVNQVCGSGLRSVALAYQAIMNNDANIIVAGGQESMSQSPHCSHLRNGTKMGDNQMVDSMIKDGLWDAFNGYHMGTTAENVAQQWQITRDQQDEFAVESQKRASKAKSDGIFKDEIVGVEIKSRKETVVFDNDEYIKDNVQLEKIATLRPAFSKEGTVTAANASGINDGAAAMTVMSGDEVKKKNIEPIARIVSWASAGVDPSIMGTGPIPASRKALEKAGWNVGDLDLIESNEAFAAQSCAVNKEMGWDTSKVNVNGGAIAIGHPIGASGARILVTLLNQMKRQDAKKGLATLCIGGGMGVALCVER

SEQ ID NO: 114921 - protein, 390 aa, Unknown
  Bacterial polypetide isolated from the Sargasso Sea
MSEVFITSAVRTAVGSFNGSLSGMPAHDLGTIVIKETLNRSGIEGGDVDEVILGQVLTAATGQNPARQASINAGLNKETPAWLVNQVCGSGLRSVALAYQSIMNGDANIIIAGGQESMSQSPHCMHLRNGTKMGDDKMIDSMIKDGLWDAFNGYHMGTTAENVAQQWQITRDQQDEFAFNSQQKASKAKADGVFKDEIVPVEVPSRKETVVFDSDEYIKDNVQLEKISSLRPAFAKEGTVTAANASGINDGAAALAVMSSDEMKKRNLEPMARIVSWSSAGVDPSVMGTGPIPASRKALDKAGWDVSDLDLIESNEAFAAQSCAVNKEMGWDVSKVNVNGGAIAIGHPIGASGARILVTLLNQMKRQDAKKGLATLCIGGGMGVALCVER

SEQ ID NO: 114922 - protein, 393 aa, Unknown
  Bacterial polypetide isolated from the Sargasso Sea
MTDVVIVSAARTAVGKFGGSLAKIAAPELGATVIRAVLERAGVKPEQVSEVIMGQVLTAGSGQNPARQSLIKAGLPTAVPGMTINKVCGSGLKAVMLAANAIVAGDAEIVIAGGQENMSASPHVLPGSRDGFRMGDAKLVDTMIVDGLWDVYNQYHMGITAENVAKEYGITREEQDAFAALSQNKAEAAQKAGRFDDEIVPVAIPQRKGEPLQFATDEFVRHGVTAESLAGLKPAFSKDGSVTAANASGLNDGAAAVLVMSAQKAAALGLTPLARIKAYANAGVDPSVMGMGPVPASRRALERAGWTPGDLDLMEINEAFAAQALAVHKQMGWDTSKVNVNGGAIAIGHPIGASGCRILVTLLHEMAKRDAKRGLASLCIGGGMGVALAVERP

SEQ ID NO: 114923 - protein, 357 aa, Unknown
  Bacterial polypetide isolated from the Sargasso Sea
MSEKKSVVITSAVRTAIGSLGGTLKNIPAYKLGSSVISSAIKKSNLKPSEIDEVIMGHVLTGGAGQNPARQAAIESKLPKEIPSYVVNQVCGSGLRSIASGYHSILSDNSNIVIAGGQESMSQAPHVVHLRNGKKLGDTELVDSMIKDGLWDAFNGYHMGITAENVAQQFQVTRKDQDKFAFDSQSKALKAQKENKFDDEIVPYEIELKKGNTTFNKDEHPRATTSLDTLSRLRGAFKKDGTVTAGNASGINDGAAAVILMSKEEAEKRGLKPLAEIKSWASCGVDPSIMGTGPIPSSKKALEIAGWSSKDLDLIEANEAFAAQSCAVVKELSLPMEKVNVNGGSIALGHPIGLQAR

SEQ ID NO: 114924 - protein, 104 aa, Unknown
  Bacterial polypetide isolated from the Sargasso Sea
GLGPIPAIQEALSKANWTMDEVDLFEINEAFAAQSIAVIKELKIPEQKVNVNGGAIALGHPIGASGSRILVTLIHEMIKQDKKKACAALCIGGGMGIAMCIERS

SEQ ID NO: 114925 - protein, 347 aa, Unknown
  Bacterial polypetide isolated from the Sargasso Sea
SKFGKDEIDEIIMGQVLTAGSGQNPARQAAINAGIPISKPAHIVNQVCGSGLRAVISGYQSIKLGESLNVISGGQENMSIAPHTIFFRNQKKISEDKLLDSMINDGLTDAFKNYHMGVTAENVAKKFDISREEQDKFALNSQKKTLSAINDNKFDDELIKINQDGNILDKDEHPRVNLKLSDLEKLKTIFKENGTVTPGNSSGINDGAAALLLTTLDEAKKKSIEPLAKIVSWASVGVDPALMGLGPIEAVREAIKKAKWNLDEIDLFEINEAFAAQSIAVISELGIDKNKVNVNGGAIALGHPIGASGARILVTLIHEMKKKKKNKGCATLCIGGGMGIALCVEKI

SEQ ID NO: 114926 - protein, 392 aa, Unknown
  Bacterial polypetide isolated from the Sargasso Sea
MSKENGVVITSAVRTAIGDLGGSLKNVSAHKLGSTAISSAIAKSNIKASDINEIIMGQVLTGGAGQNPARQAAMDAGIPKETPSYVVNQVCGSGLRSIASGYHSILSGNSNIVLAGGQESMSQSPHVVHLRNGKKLGDTSLVDSMIKDGLWDAFNGYHMGITAENVAQKFQVTRKDQDKFAFDSQTKALKAQKENKFDDEIVPYTIQLKKGTAVFKKDEHPRDGISMEALQRLKTAFQKEGTVTAGNASGINDGAAAVVLMSKKEAEKKGIKPLAEIKSWASCGVDPSVMGTGPIPSSKKALEIAGWQSKDLDLIEANEAFAAQSCAVVKELALPMEKVNVNGGAIALGHPIGASGTRIFVTLIHEMLKRDSKKGLATLCIGGGMGVAMCIE

SEQ ID NO: 114927 - protein, 395 aa, Unknown
  Bacterial polypetide isolated from the Sargasso Sea
MNKKHNVVIVSARRTPIGSFQGGLSVVSAPKLGSLVISEILNDTMLDPLLIDEVIMGNVLSAGLGQAPARQATIGAGLPDSIECLTINKMCASGLKAVMLAAQAIQVNDANIIIAGGFENMSQAPYILPKARAGYRLGNGRLIDSMINDGLWDVYNDIHMGNCAEICARERNYSINDQNDFAKESYHRAIDAQKSGAFTNEIISVNVENRSNTIIFKEDEEPKNVNFDKMDKLSPAFEEDGSITAANASKINDGAACLLLMSENKASELGLNPLARILYQSSAAHDPKWFTTAPIKAIKKILIKANMEVNDIDLWEINEAFAPVVMSVMDDYNLDHGKINVNGGAIALGHPIGASGARILTTLIHALNHKDLSVGLATLCIGGGEASALIIERVN

SEQ ID NO: 114928 - protein, 392 aa, Unknown
  Bacterial polypetide isolated from the Sargasso Sea
MKDVVIVGALRTPIGCFQGTLSRHSAVELGSLVVKALVERTGIDPQSVDEVILGQVLTAGTGQNPARQSAIRGGLPNTVSAITINDVCGSGLKALHLATQAIQCGEADVVIAGGQENMSRAPHVLTDSRTGAQLGNSQLIDSLVHDGLWDAFNDYHMGVTAENLAREYGISRELQDAWALSSQQKARRAIDSGRFRDEIVPVTTELNGAPRTVDTDEQPRVDASAEGLASLLPTFDRLGSVTAGNASSINDGAAAVMMMSESKAQELGLPILARIRAFASVGVDPALMGIAPVHATRRCLERAGWRLDEVDLIEANEAFAAQAISVGRVLEWDERRVNVNGGAIALGHPIGASGCRILVSLVHEMIKRDARKGLATLCIGGGQGVALAVERA

SEQ ID NO: 114929 - protein, 279 aa, Unknown
  Bacterial polypetide isolated from the Sargasso Sea
GGQESMSRATHAIFYREDKKFSEKKLVDTMIHDGLLDSFNDYHMGVTAENVAEKYKISRDEQDNFSLNSQKKTEKAYSENKFKDELIKLQIEDGDKKFVFEKDEHPRNNLSIDDLKKLKTVFKENGTVTPGNSSGINDGAAALVLMSREQAEKKSLESLVKIVSWATCGVEPSLMGLGPIPSIQEALSKAKWKVDEVDLFEINEAFAAQSIAVIKELKLPEQKVNVNGGAIALGHPIGASGSRILVTLIHEMIKQDKRKGCAALCIGGGMGIAMCIERS

SEQ ID NO: 114930 - protein, 395 aa, Unknown
  Bacterial polypetide isolated from the Sargasso Sea
MSKNSNDVVITSALRTPIGRYNGSLKNLSASKLGSIAIKEVIYKSQLDVEEIDEVIMGHVLTSGLGQNPARQASIGAGVPVSKPAHIINQVCGSGLRSVVSGYQSIRLGENQVVVAGGQENMSRANHAIYYREDKKYSEKKLVDTMIKDGLLDSFNDYHMGVTAENVADKYKISRDEQDIFSLNSQKKTEKAYSENKFKNELIKLQIESGDEKFIFEKDEHPRQNLSLDDLKKLKPVFKENGTVTPGNSSGINDGAAALVLMSRKQAEKKSLEPLVKIVSWATCGVEPSLMGLGPIPSIQEALSKASWKIDEVELFEINEAFAAQSIAVIKELKIPEKKVNVNGGAIALGHPIGASGSRILVTLIHEMIMQDKKKGCAALCIGGGMGIAMCIERN

SEQ ID NO: 114931 - protein, 357 aa, Unknown
  Bacterial polypetide isolated from the Sargasso Sea
MSNESVVIVAAKRTPMGGFNGNLSSLAATKLGEVAIKAACEEMDVSVIDEVIMGCVLPAGLGQSPARQASLGAGLPLSAGVTTINKVCGSGLKAVMMAHDLIKAGSATAVVAGGMESMSNAPYMLPKARTGYRMGHGQVLDHMMLDGLENAYDGKAMGCFAQDTADEENISRGEMDEFALSSLSKAHEAINSGTFVDEIVPVTVSSRKGDTVVDTDEGPGSARPEKIPTLRPAFKKDGTVTAANSSSISDGAAALVVMSESKANELGLAPLARVVAHATNSIEPENFTVAPVGAMEKVLDKAGWTKEEVDLFEINEAFAMVTMLAVKKLGLDESKVNVKGGACALGHPIGASGARIL

SEQ ID NO: 114932 - protein, 391 aa, Unknown
  Bacterial polypetide isolated from the Sargasso Sea
MNRDKDIVITSAFRTAIGSFQGSLKDHKATELGTAVVKKCMEHSNLNGSEVDTVILGQVLQTGCGQNPARQAAINSGIHKDKTATTINQVCGSGLAAITLGFNSLKLNDTNIVIAGGQESMTNSPHYLNYRIEKNLSEEKLKDSMLIDGLIDAYDDYHMGVTAENVAEKYQITRNDQDNFALNSQKKAIKAISENRFKEEIIPIKLKDQKIFDKDEYPRSDTNLEKLSNLKTVFKENGTVTAGNASGLNDGAAAVTLMNYKTSKDKGLKPIAKIVSWSQSGVDPKLMGTGPIPASKLALKKAGWNIKDLDLVESNEAFAAQSIAVIKELGLKEDIVNVNGGAIALGHPIGASGARILVTLVHEMQKRKYKKGLATLCIGGGMGISMCVESI

SEQ ID NO: 114933 - protein, 391 aa, Unknown
  Bacterial polypetide isolated from the Sargasso Sea
MSDNSKDVVIVEAVRTPIGTYNGSLKDIRAHQLGSIVINEVLKRSNVNPDEVDEIIMGQVLTAGMGQNPARQAAINAGIPVSKPAYIVNQVCGSGLRAIISGFQSIKLGDSKIVISGGQENMSITPQIALKENEKKNSENKFLDVMMNDGLLDAFKNYHMGVTAENVAKKFNISREEQDEFALNSQKKTLAAIKNNNFEKEIIEVNLNGNTLKLDEHPRNDLILKDLQKLKTVFQENGTVTAGNSSGINDGAAALMLLSLEESEKKSLEALVRIVSWASVGVDPSLMGLGPIRAIKEAVKKAKWKLEDVDLFEINEAFASQTIAVIRELNIDKNKVNINGGAIALGHPIGASGARILISLIYQMKKLNKKKGCASLCIGGGMGIALCVERN

SEQ ID NO: 114934 - protein, 396 aa, Unknown
  Bacterial polypetide isolated from the Sargasso Sea
MSKNSNDVVITSALRTPIGRYKGSLKNLSASKLGSIVIKEVIYKSKLDIEEEIDEVIMGHVLTSGLGQNPARQASIGAGVPVSKPAHIVNQVCGSGLRSVVSGYQSIKLGENQIVIAGGQENMSRATHAIYYREDKKFSENKLVDTMIKDGLLDSFNDYHMGVTAENVADKYKISRDEQDNFSLNSQKKTEKAYSENKFQDELIKLQIEDGDKKFIFEKDEHPRENLSIDDLKKLKTVFKENGTVTPGNSSGINDGAAALVLMSREQAEKKSLEPLVKIVSWATCGVEPSLMGLGPIPSIQEALSKANWKIDEVDLFEINEAFAAQSIAVIEELKIPEQKVNVNGGAIALGHPIGASGARILVTLVHEMIKQDKKKGCAALCIGGGMGIAMCIERS

SEQ ID NO: 114935 - protein, 358 aa, Unknown
  Bacterial polypetide isolated from the Sargasso Sea
VIKKCMKHSNLNGSEVDTIILGQVLQAGCGQNPARQAAISAGIDENKTATTINQVCGSGLAAITLGFNSLKLKDANIVIAGGQESMTNAPHYLNYRNENNFSEDKLKDTMLIDGLIDAYNNYHMGVTAENIAEKYQITRNDQDNFAFNSQKKAIKAMRENKFKEEIVPIKLKDQNIFDKDEYPRSDTNLEKLSNLKTVFKKDGTVTAGNSSGLNDGAAAVTLMDYKTSQYKNLQPIAKIISWAQCGVDPKLMGTGPIPASKLALKKAGWNINDLDLVESNEAFAAQSVAVIKELGLNENIVNVNGGAIALGHPIGASGARILVTLLHEMKRRKLHKGLATLCIGGGMGIAMCIENIFQ

SEQ ID NO: 114936 - protein, 369 aa, Unknown
  Bacterial polypetide isolated from the Sargasso Sea
KSVSAHELGAGVISDVIKNSKLKNEEVDEVIMGQVLTGGAGQNPARQAAIKCGLPKEKPAYLVNQVCGSGLRSIASGFQSIRSKDSKIVIAGGQESMSTSPHAVFIRNGKKLGNSELVDTMIKDGLWDAFNGYHMGITAENVATKFQITRDEQDKFAFNSQTKALKAQEKNKFNDEITAFKIKSKESEIKFVKDEHPRESTNLESLKRLKSAFQKDGTVTAGNSSGINDGAAAVVLMDEAEANKRGLKKLVKIKSWASCGVDPALMGTGPIPSSKKALDLAGWSIKDLDLVEANEAFAAQSLAVLKTLSIPEEKVNVNGGAIALGHPIGASGTRVLVTLIHEMIKRDVKKGLATLCIGGGMGIAMCVER

SEQ ID NO: 114937 - protein, 368 aa, Unknown
  Bacterial polypetide isolated from the Sargasso Sea
MSKNSKDIVFVAAQRSAIGRYKGIYKDLQAHNLGSLVIKSLIEKTNLKVDEIDEVILGQVLTGSCGQNPARQAAINSGIPKEKTAIIINQVCGSGLRSIVNGYQSLLTNSANFIIAGGQESMTNSIQDQMMKDGLTDAFYNYHMGVTAENVAAKYNISRQEQDEFALVSQQKANIAINKKKFDDEIINDDIDEHPRNGITINDLSKLNSVFKEKGTVTPGNSSGINDGAAAVVLTKRELAEKHNLEILGKIASWATCGVDPSIMGLGPIPSSNKALEIAKWNIKDLDLIEINEAFAAQSIAVIKELKLPKEKVNVNGGAIALGHPIGASGARIVVTLLNELKKINGKKSLATLCIGGGMGISICIEKD

SEQ ID NO: 114938 - protein, 222 aa, Unknown
  Bacterial polypetide isolated from the Sargasso Sea
KFNISRVEQDDFALNSQKKTETALNTNRFKEELIKINQSGINLEKDEHPRKDLTKSDLGRLKAVFLKDGTVTPGNSSGINDGAAALLLTTFEEAKKRSIQPLVKITSWASVGVDPTLMGLGPIEAVREAVKKAKWNLNDIDLFEINEAFAAQSIAVIRELDIDENKVNVNGGAIALGHPIGASGARILVTLIHEMIKQKKNKGCATLCIGGGMGIAICVERI

SEQ ID NO: 114939 - protein, 321 aa, Unknown
  Bacterial polypetide isolated from the Sargasso Sea
RQAAINAGIPISKPAYIVNQVCGSGLRAVISGYQSIKLGDVKNVITGGQENMSLAPHSIFYRDKKKITEDKLVDTMIYDGLIDAFNNYHMGVTAENIAQKFSISREEQDNFAFNSQKKTQVAINNNKFEEEIIDINLDKNTLKKDEHPRFNLKLSDLKKLRTVFKENGTVTPGNSSGINDGAAALILTTLEEAKKKSIEPLAKIVSWASIGVEPSLMGLGPIGAVKQAIKNANWKLEDIDLFEINEAFAAQSIAVIRELNIDEDKVNVNGGAIALGHPIGASGARILVTLIHEMKKQDKKKGCATLCIGGGMGIAICIERN

SEQ ID NO: 114940 - protein, 305 aa, Unknown
  Bacterial polypetide isolated from the Sargasso Sea
GLARDPTAREMFFRGGDHRAPKREGETCANPLLASTLRLVAREGPGVLARGPLAESLAADVGEAGGILRVSDLAAAEASVRFFMPLTSRAFGYEIHGMPPPSSGGAAVGQILQFLSQFPELSLGPPLASAGALGWHRLAEACKHAFALRMNLGDPGFHWPGENLTGAIRDMLDPGFNRALIESRYDDDRTQPDARAYGARWNQLDDSGTTHVSVVDGRGDAVALTSTINTAFGSKFYSKSTGILLNNEMDDFSSPGEANNYGLAPSEANYIEPHKRPLSSMSPTIVTRRGARSSANRDAEEEEAG

SEQ ID NO: 114941 - protein, 161 aa, Unknown
  Bacterial polypetide isolated from the Sargasso Sea
MSKIIDLNSLIEFYKKAYFPMADSKYSEEIKFYKPKLRFIIPISNFHYPKKLFSEFKKTKYSFKIDQNFAKVIELCKEIKRKDQDTWINEIILNTYIELHKIGKCHSVECYEDDNLIGGLYGLHIGSCFFGESMFSLKTNTSKFCLLYLLAILKKNNFSIL

SEQ ID NO: 114942 - protein, 124 aa, Unknown
  Bacterial polypetide isolated from the Sargasso Sea
NTYIKLYELGKCHSIECYENDELIGGLYGLHIGSCFFGESMFSLKTNTSKYCLLYLLAILKKNNFSLLDSQFYNHHLLQFGALEIESSLYENKLINSLEKESFFKNIDNFQEVLSLIQSNSQRS

SEQ ID NO: 114943 - protein, 204 aa, Unknown
  Bacterial polypetide isolated from the Sargasso Sea
MSKIIDLNSLIEFYKKAYFPMADSKYSKEIKFYKPKLRFIIPISNFHYPKKLFSEFKKTKYSFKIDQNFAKVIELCKEIKRKDQDTWINEIILNTYIELHKRDKCHSVECYEDDNLIGGLYGLHIGSCFFGESMFSLKTNTSKFCLLYLLAILKKNNFSVLDSQFFNPHLVQFGAYEIENEIYENKLKESLEIESFFKEVNNFQ

SEQ ID NO: 114944 - protein, 152 aa, Unknown
  Bacterial polypetide isolated from the Sargasso Sea
MSKIINLNSLIEFYKKAYFPMADNKYSEEIKFYKPNLRFIIPISNFHYPKKLFSEFKKTKYIFRIDQKFSKVIELCKEVKRKDQDTWINEIILDTYIELHKIGKCHSVECYEDDNLIGGLYGLHIGSCFFGESMFSLKTNTSKFCLLYLLAI

SEQ ID NO: 114945 - protein, 121 aa, Unknown
  Bacterial polypetide isolated from the Sargasso Sea
MYELGNDYKFPSPKLATNEGIVAIGGDLNPLRILEAYKNGIFPWFNDDENLIWWSPDPRMVLFPEKIKLSKSFRSFLKKKEYRVSFNENFESVIESCSNIKRVGQKRYLDYKWTKKIFYQT

SEQ ID NO: 114946 - protein, 200 aa, Unknown
  Bacterial polypetide isolated from the Sargasso Sea
MLLGYTLGIFPMANSADDDSVMWVSPKRRGIIPLENLHISKSLRRKLRSKKYHSTFNKDFFKVVSHCRNRKETWINNILVDKYIELHKNKFAHSVEIWLAEELVGGLFGVSIGACFFGESMFSLKNDGSKLALVSIINRLKSSGYKLFDTQFFTPHLGSMGGIEISKTKYEKILKANITKNVKFQHDDYDKEFLFAPKKN

SEQ ID NO: 114947 - protein, 128 aa, Unknown
  Bacterial polypetide isolated from the Sargasso Sea
KLFWIHIFELHKIGKCHSVECYEDDNLIGGLYGLHIGSCFFGESMFSFKTNTSKFCLLYLLAILKKNNFSILDSQFFNPHLVQFGAYEIETEVYENKLKESLEIESIFKEINNFQEVLSLLQSTNQRS

SEQ ID NO: 114948 - protein, 225 aa, Unknown
  Bacterial polypetide isolated from the Sargasso Sea
MKYNETINFEPISTNNIILAYKNGIFPMAENEDSPDIFWVEPKKRGIIDIKGISINRKLKKLIKQNIYDVRINTNFTKVIEGCAKKSPKRKTTWINGSIIDAYIKLHQKGYAHSIECYSNNILIGGLYGVSIGSIFFGESMFSNKDGASKIALLHLLERLKVGKYIVLDTQFITNHLKFFGAKEISQKKFLQILKIALESKGSFFEIDKNNTVENKKYPILENFT

SEQ ID NO: 114949 - protein, 217 aa, Unknown
  Bacterial polypetide isolated from the Sargasso Sea
MSKIIDLNSLIEFYKKAYFPMADSKYSEEIKFYKPKLRFIIPISNFHYPKKLFSEFKKTKYNFKIDQNFAKVIEFCKEIKRKDQDTWINEIILDTYIELHKIGKCHSVECYEEDNLIGGLYGLHIGSCFFGESMFSLKTNTSKFCLLYLLAILKKNNFSILDSQFFNPHLVQFGAYEIENEIYENKLKESLEIESIFKEINNFQEVLSLLQSTNQRS

SEQ ID NO: 114950 - protein, 139 aa, Unknown
  Bacterial polypetide isolated from the Sargasso Sea
MIVRLNNDVVAFPNGRISSEKPEGLLAVGGKLTPEWLLTAYRQGIFPWFNDDEAEALWWCPAQRAVINPGEMRIPRSLRRTIKNHNYEIKADQRFKEVIWQCANTRGQANGTWITEQMIRAYCLLHELGFAHSIEVYEE

SEQ ID NO: 114951 - protein, 224 aa, Unknown
  Bacterial polypetide isolated from the Sargasso Sea
FPNPEYALVSPDGLLAVGGDLSLARLCNAYTNGIFPWFSDNEPIMWWSPSERGIVELNEFHVSKSLRKHLKKYPVTVTVNNAFVEVIEACRDQRIDTDGTWITTDMLSAYINAHHAGVAHSLEVWRNGELAGGLYGIMQNGVFCGESMFHHQTNCSKLAMWALVNWLKYHDAHFIDCQLENPYLMSLGAKVIPRTDFLAKLNTALTYKVNPTMWEPQELIAIYE

SEQ ID NO: 114952 - protein, 148 aa, Unknown
  Bacterial polypetide isolated from the Sargasso Sea
MSKIIDLNSLIKFYKKAYFPMADSKHSEEIKFYKPKLRFIIPISNFHYPKKLYSEFKKTKYTFKIDKNFSKVIELCKEIKRKDKDTWINEIILDTYIELHKIGKCHSVECYEDDNLIGGLYGLHIGSCFFGESMFSLKTNTSKVLFTL

SEQ ID NO: 114953 - protein, 178 aa, Unknown
  Bacterial polypetide isolated from the Sargasso Sea
MSKIIDLNSLIEFYKKAYFPMADSKYSEEIKFYKPKLRFIIPISNFHYPKKLFSEFKKTKYSFKINQNFAKVIELCKEIKRKDQDTWINEIILDTYIELHKIGKCHSVECYEDDNIIGGLYGLHIGSCFFGESMFSLKTNTSKFCLLYLLAILKKNNFSILDSQFFNPHLVQFGAYEI

SEQ ID NO: 114954 - protein, 116 aa, Unknown
  Bacterial polypetide isolated from the Sargasso Sea
IGKCHSVECYEEDNLIGGLYGLHIGSCFFGESMFSLKTNTSKFCLLYLLAILKKNNFSILDSQFFNPHLVQFGAYEIETKIYENKLKESLEIESIFKQINNFQEVLSLLQSTNQRS

SEQ ID NO: 114955 - protein, 240 aa, Unknown
  Bacterial polypetide isolated from the Sargasso Sea
MKDDVTETENRFYCVREQIFTTSFPPTNRALNEPDGLLAIGGQVDVNNLLEAYRKGIFPWYSMKNPVMWWSPKLRPVLRPNAIKISKSLKKTIKKNRFDLSYDKCFKRIMEHCATNGERAGNSWITAKMIEAYVDLHRLGHAHSVECWRNGELCGGLYGVSIGRVFYGESMFSSQPDASKVALVDLCSKLNSWGYLVIDCQIPSPHLSRLGAELVERTQFEKIISQNIDRPPSANAWKGS

SEQ ID NO: 114956 - protein, 180 aa, Unknown
  Bacterial polypetide isolated from the Sargasso Sea
WSPDPRLVLIPEDLKVSRSLRKTFRKEIFTYRINSAFDRVIDACAETRLSRGDGTWITEDMKKAYGRLQRKGYAMSFESWADGELAGGLYGVRIGKCFFGESMFSKRNDASKCALVSLVRYAEKNGIRLIDCQMRTDHLIRMGAHEIPRQVYLQQLKRLVPRYTQKRDRYEYNSRPALAS

SEQ ID NO: 114957 - protein, 173 aa, Unknown
  Bacterial polypetide isolated from the Sargasso Sea
ADFHVPRRLRRTVRNGNFDVTCNTDFAKVVAMCAETTPDRTDTWINPSIECAVNELHRMGFAHCVECRQNGELVGGIYGISLGAAFFGESMFSRARDASKVALVYLVARLKFSGYRLLDTQFITDHLAQFGAIEIPARDYLYELEDALKYQAAFPDVVKGDRWTECLRQTLFN

SEQ ID NO: 114958 - protein, 96 aa, Unknown
  Bacterial polypetide isolated from the Sargasso Sea
MVPWLGPDDPFPSVERALGAASGAPGLLAASGDLLPSRLIDAYRRGIFPWYSDGQPVLWWSPDPRMILRPAEFKVSPSLRKTLKRVLREDTWEIRV

SEQ ID NO: 114959 - protein, 143 aa, Unknown
  Bacterial polypetide isolated from the Sargasso Sea
EVIKMCAERPETWINHDILTNYCLLHQSGHAHCLEVWSDKKLIGGIYGVSIGAVFFGESMFSKKNNASKIALAYLVDRLKATGFKLFDTQFLTPHLASLGAVEIPKTKYKVLLFQAVERTANFNAKDYSPDVSAIAQRRAQTS

SEQ ID NO: 114960 - protein, 199 aa, Unknown
  Bacterial polypetide isolated from the Sargasso Sea
FPMADSKYSEEIKFYKPKLRFIIPISNFRYPKKLFSEFKKTKYSFKIDQNFSKVIELCKEIKRKDQDTWINEIILDTYIELHKIGKCHSVECYEDDNLIGGLYGLHIGSCFFGESMFSLKTNTSKFCLLYLLAILKKNNFSILDSQFFNPHLVQFGAYEIETEIYENKLKESLEIENCFKEVNNFQEVLSLLQSTNQRS

SEQ ID NO: 114961 - protein, 61 aa, Unknown
  Bacterial polypetide isolated from the Sargasso Sea
MIVRLNYDVVAFPDGRFSSNDPDGLLAVGGKLTPEWLLTAYRQGIFPWFNNDETEALWWCP

SEQ ID NO: 114962 - protein, 211 aa, Unknown
  Bacterial polypetide isolated from the Sargasso Sea
MPEITPDLLLKAYSIGVFPMAEDHDDPEIFWVDPRMRGILPLDRFHVPRRLRRTVRSSIYKVTVNADFNAVIEGCAKTVNDRPQTWINTKIIDLYTSLHYMGYAHSLECWRNGELAGGLYGVILGGVFFGESMFSRQRDASKVALVHLIYRMHAGNFAFVDTQFITKHLSQFGAIEIPRQEYIDMLKKGLKLPSNFKAPISKQIIESVLQN

SEQ ID NO: 114963 - protein, 223 aa, Unknown
  Bacterial polypetide isolated from the Sargasso Sea
MENKNKKLNTELVLNAYRAGLFPMAENSNTSEIFWVDPEVRGIIPLDKFHISRSLKKLLRKKPYSIKFNYNFEQVIQACAEQSEQRNETWINQTIIAAYSELFKQKCAHTVECWVDGALAGGLYGLTIGGAFFGESMFSKRPNASKIALVYLVDRLFERDFVLLDTQFLTQHLKNFGAIEVKREKYIKLLNSAVSLDRSFHGRGTFDEDSGLSRILQSNTQTS

SEQ ID NO: 114964 - protein, 87 aa, Unknown
  Bacterial polypetide isolated from the Sargasso Sea
QRKLTGGLYGIAMGKIFFGESMFSSESDASKIALVYLARKLEDMEFKLIDCQVNSPHIQTLGAKLIAREKFTTILDKHCNYDKTLFT

SEQ ID NO: 114965 - protein, 125 aa, Unknown
  Bacterial polypetide isolated from the Sargasso Sea
LNSYINLYHNKICHSIECYDENNLIGGLYGVHIGGCFFGESMFSKVSNTSKFCLLYLIAILKKNLFSILDSQFYNKHLLQFGAFEMDNKDYLNRLKIGLEQKRNFIFINDFQEVLSLTQPINHKS

SEQ ID NO: 114966 - protein, 217 aa, Unknown
  Bacterial polypetide isolated from the Sargasso Sea
MSKIIDLNSLIEFYKKAYFPMADSKYSEEIKFYKPKLRFIIPISNFQYPKKLFNEFKKTKYSFKIDQDFAKVIELCKEIKRKDQDTWINEIILDTYIELHKIGKCHSVECYEDDNLIGGLYGLHIGSCFFGESMFSLKTNTSKFCLLYLLAILKKNNFSILDSQFFNPHLVQFGAYEMETEIYENKLKESLEIESFFKEVNNFQEVLSLLQSTNQRS

SEQ ID NO: 114967 - protein, 217 aa, Unknown
  Bacterial polypetide isolated from the Sargasso Sea
MSKIIDLDSLIEFYKKAYFPMADSKYSEEIKFYKPRLRFIIPISNFHYPKKLFSEFKKTKYSFKIDQNFAKVIELCKEIKRKDQDTWINEIILDTYIELHKIGKCHSVECYEDDNLIGGLYGLHIGSCFFGESMFSLKTNTSKFCLLYLLAILKKNNFSILDSQFFNPHLVQFGAYEIETEIYENKLKESLEIESYFKEVNNFQEVLSLLQSTNQRS

SEQ ID NO: 114968 - protein, 178 aa, Unknown
  Bacterial polypetide isolated from the Sargasso Sea
MNKIIPHQNLIKFYKKGLFPMAEKLSSEVVNLYQPKKRFLIPINNFHVPKKLFKLFKKNNYIYRVNNNFEKVISQCQIVNRKDNGTWINDIILNTYINLYRYNFCHSVECYDENKLVGGLYGVHIGSCFFGESMFSNVSNASKFCLLYLIAILKKNLFSILDSQFYNKHLIQFGAYEI

SEQ ID NO: 114969 - protein, 175 aa, Unknown
  Bacterial polypetide isolated from the Sargasso Sea
MSKLIAPHNLINFYKKGLFPMAESSTSENINILQPNRRFLIPINTFHVPKKLLKLFKRNNYIFKMDNDFKNVISQCKLINRKDNDTWINNTILNSYINLYHYKICHSIECYENKQLVGGLYGVHIGGCFFGESMFSKVSNASKFCLLYLIAILKKNLFSILDSQFYNNHLVQFGA

SEQ ID NO: 114970 - protein, 111 aa, Unknown
  Bacterial polypetide isolated from the Sargasso Sea
AYNELHLEGYAHSVESWLNGELVGGLYGISLGQCFFGESMFSTVSDSSKAALVALAEFSMQVGIKIIDCQMTTKHLLSLGAREINRQSFLRKLNQCFEKPDIKGSWNGRGN

SEQ ID NO: 114971 - protein, 220 aa, Unknown
  Bacterial polypetide isolated from the Sargasso Sea
MDEINPETLLRAYAYGVFPMGEARGSDTLYWVDPELRGILPLDTFHVPRRLARTIKAEPFTIKVDSAFRSVMEACAADMPGRGGTWINAAILKAYSELHEQGHTHSVECWQGSQLVGGLYGVSLGRAFFGESMFSHVRDASKVALVHLAARLIQGGYVLLDTQFVTSHLSQFGAIEIPRDDYKSRLADALTGEPGDFYSIEAGGRDVSAADILQSINQTS

SEQ ID NO: 114972 - protein, 173 aa, Unknown
  Bacterial polypetide isolated from the Sargasso Sea
MTDPDFSASGPFGGFGPEDLLACYARGVFPMAEARDDPRVFIIEPEQRGVIPLDAFHIPSRLRRTVRGEPFEVRVDTAFEAVLDGCAAAQGPDREDTWINGPIRRLYAALFTMGFVHSIECWREERLVGGLYGVSLGGAFFGESMFSRERDASKVALVHLVARLRQGGWTLWT

SEQ ID NO: 114973 - protein, 182 aa, Unknown
  Bacterial polypetide isolated from the Sargasso Sea
KKRFIIPIENFHVPKKLLKLFKNNPYTFKINYDFKNVISKCQLAVRKNNGTWINNIILNTYINLHYQKIAHSIECYDQNQLVGGLYGVHIGGCFFGESMFSDLTNASKFCLLYLIAILKKNLFSILDSQFYNEHLIQFGAFEISNKNYLEKLKVSLNYNRHFTYIEDFQEVLSLLQPNNHKS

SEQ ID NO: 114974 - protein, 208 aa, Unknown
  Bacterial polypetide isolated from the Sargasso Sea
RVNALLSAYRSGLFPMGKARESTEIFWMNPDLRGIIPLSRVAPVRSLRRALRNAPYTITVDINFRQVIAMCAEVTPDRPETWISPEIIKWYTDLHVEGYAHSVECWKNNRLVGGLYGVSIGAAFFGESMFSRETNASKVALAHLVHRLTKGGYMLLDVQFVTEHLSRLGAIEITRVQYHEYLADALRETGEFHSISSTGGKDSICTSG

SEQ ID NO: 114975 - protein, 201 aa, Unknown
  Bacterial polypetide isolated from the Sargasso Sea
MFPMAETCLSKEIYWIEPKKRGIFYFNKIRIPKKFKRFLKKNNFKIAIDNNFEQVINNCAKLNSTRKDTWINSTIKKIYIDMHNNGLAHSVECYLNKELVGGLYGIKIGKIFFGESMFSFVSNASKVTLIHLLERLKIGGFKILDTQFINEHLKQFGALEVSNKEFKSIIEKNINKKANFYFYSQKGFLPNHLYPLKKNII

SEQ ID NO: 114976 - protein, 211 aa, Unknown
  Bacterial polypetide isolated from the Sargasso Sea
MPDLTPDMLLRAYSIGVFPMAEDRDDPELVWVDPRMRGIIPMSKFHVPRRLRRTVRNDTFEVTFDRDFAGIIEGCAEATEGRPRTWINSRIVDLYTSLHFKGHGHSVECWQDGDLVGGLYGISLKGVFFGESMFSRATDASKVALVHLAAKLSAGGYAFIDTQFITKHLSRFGAIEVPRNEYRGLLAAALKIDSEFGVDYDSGDLEAILQQ

SEQ ID NO: 114977 - protein, 216 aa, Unknown
  Bacterial polypetide isolated from the Sargasso Sea
MPVYQLIPDITLFPPTEEAEADGLLAVGGDLTKERLLSAYRQGIFPWYEIGQPILWWCPDPRLVLFPDELKISRSLRKVLRKKEFEIRFDSTFENVIKACADVRTKQGKGTWIIPEMQLAYTELHQEGYAHSVESWLNGELVGGLYGISLGQCFFGESMFSTVNDSSKAALVALAEFSKQVGIKIIDCQMKTQHLLNLGAREIDRQSFLRKIKSIP

SEQ ID NO: 114978 - protein, 178 aa, Unknown
  Bacterial polypetide isolated from the Sargasso Sea
MINNLKHNYIKIDYKNILDAYSHGIFPMAESIDSLDVFWVKPKKRGVIDPYRINIRKKLKRFINKKPFNIKVDNDFIGVIEGCAEITNVRENTWINPSIRDVFIELHYKGYAHSIECYSNNNLVGGLYGVAIGGIFFGESMFSRMQNASKVALLHLIDRLKVGNFLLLDTQFITDHLK

SEQ ID NO: 114979 - protein, 175 aa, Unknown
  Bacterial polypetide isolated from the Sargasso Sea
RGIIPIRRFHVPKRLRRTVRNGVFKVTFNEDFTGVIEGCAKETIGRPRTWINDRIVDLYTSLHFKGHGHSVECRRDGELVGGLYGISLRGVFFGESMFSRETDASKIALVHLATRLSVGGFAFIDTQFITKHLSRFGAIEVPRNKYRGMLAAALKIDADFDVAFGDEDLEATLRQ

SEQ ID NO: 114980 - protein, 212 aa, Unknown
  Bacterial polypetide isolated from the Sargasso Sea
MAQSYVYAPETIIKAYSLGLFPMAESRNSADIRFYDPDIRGLIPLDNSLGDGLHVPRRLQRRVRQHPYDITFDQDFAAVITACAARSSKRPNTWINADIRKLYIALHKMGFAHSVEVWHEGDLVGGLYGVRLRAAFFGESMFSRQTDASKIALVHLMARLYCGGFQLLDAQFSNEHLKQFGVIDVPRNEFQRRLGDALAAESDLHLAAPSLP

SEQ ID NO: 114981 - protein, 194 aa, Unknown
  Bacterial polypetide isolated from the Sargasso Sea
MPVYQLIPDVTLFPPVEEADADGLLAVGGDLTKKRLLAAYRQGIFPWYEVGQPILWWCPDPRMVLFPEDLRISRSLGKVLRKDEFEIRFDSSFENVIKACAEVRTGQGKGTWIIPEIQQAYTELHQEGYAHSVESWLNGELVGGLYGISLGQCFFGESMFSTVNDSSKVALVALAEFSKQVGIKIIDCQMSTQH

SEQ ID NO: 114982 - protein, 249 aa, Unknown
  Bacterial polypetide isolated from the Sargasso Sea
MTHSLPWLQPEQEFPPIDQTWGERDPIPGLLAAGNTLDAARLRTAYSQGIFPWFSEGQPVLWWSPNPRMALHPEEFRLHRSLRKRLQKFRDDPGCEIRIDSAFATVMQHCAQTPRDGQNGTWIVQSIIDAYTELHQQGAAHSVETWIDGQLVGGLYCVALGRAVFGESMFALQTDASKIALSALVALCRAHQVPQIDCQQATAHLSFMGAREITRAQFARTVQAQSQLPDMQWQFRPIYWEQLLSHTEA

SEQ ID NO: 114983 - protein, 254 aa, Unknown
  Bacterial polypetide isolated from the Sargasso Sea
MVPWLGPDDPFPPIERALGPATGAPGLLAASADLLPSRLIDAYLRGIFPWYSDGQPVLWWSPDPRMILVPAEFKVSPSLRKTLKRVLREPEWEVRVDHDFPGVMRACAQAPRRGQRGTWITAEIIDAYTSLYRSGNAHSIETWHDGRRVGGLYGVSFGRMFFGESMYADATDASKIALATLVAHLREQGLEMIDCQQNTSHLASLGGREIARKAFVAHVRSAVAEPPIPWQFDKRVLAALTSRAGTAAPSGIER

SEQ ID NO: 114984 - protein, 217 aa, Unknown
  Bacterial polypetide isolated from the Sargasso Sea
MNKIIPHQNLIKYYKKGFFPMAEKLSSEVVNLYQPKKRFLIPINNFHVPKKLFKLFKKNNYIFRVNNNFEKVISQCQIVNRKDNGTWINDIILNTYINLYHYKFCHSVECYDENKLVGGLYGVHIGSCFFGESMFSNVSNSSKFCLLYLIAILKKNLFSILDSQFYNKHLIQFGAYEINNKNYLEKLKNGVSHERSFIFIEDFQEVLSLLHPNSHKS

SEQ ID NO: 114985 - protein, 214 aa, Unknown
  Bacterial polypetide isolated from the Sargasso Sea
MLSPDILLRAYAVGLFPMAEHHDESALYWIDPEKRGILPIERFRIPRRLRKTVRQNRFRIQCDTAFEDVIRLCAKPTKERKDTWINQEIIQLYINLFEIGRAHSVEAWLNGKLVGGLYGVALGGAFFGESMFSRADDASKVALVHLVARLKLGGFTLLDTQFVTNHLNQFGAAEIHRSGYRHLLSSALDKSAFFKQEIDHREILDFIQSTTHIS

SEQ ID NO: 114986 - protein, 209 aa, Unknown
  Bacterial polypetide isolated from the Sargasso Sea
MAIGGDLRPERLLTAYYHGIFPWFNADDPILWWSPDPRAIFIPGQVTISTSLRKYLKKQPWRFTINHAFTDVMAGCAQPRRKQAGTWITHEIQMAYRELHHNGHAHSVEVWHGERLIGGLYGIAIGQVFCGESMFHRETNASKAAMAVLQQHLIKMNFKLIDAQVMNPHLESLGAKPVKRADFIQLLTQFRDKSVNPAAWIPSEVTLEL

SEQ ID NO: 114987 - protein, 217 aa, Unknown
  Bacterial polypetide isolated from the Sargasso Sea
MSKIIPSEELVNFYKKGFFPMAESATSKLVNLYQPKKRFLIPINNFHIPKKLFKLFKKNIYNFRINTAFENVIFQCQRANRNKDGTWINEIILHTYINLYKNNFCHSVECYKEGKLVGGLYGVHIGSCFFGESMFSSLPNTSKFCLIYLIAILKKNLFSILDSQFYNHHLIQFGAFEISNKDYLSILKKNLDKQRKFTFIDDFQEVLSLLQSNNHKS

SEQ ID NO: 114988 - protein, 145 aa, Unknown
  Bacterial polypetide isolated from the Sargasso Sea
MAKSYVYAPETIIKAYALGLFPMAESHNSAEIHFYDPDMRGLIPIDNSLANGLHIPRRLKRRVRQNPYDITIDQDFAAVIAACAARSSTRTDTWINADIRQLYIALHKMGFAHSVEVWHEGDLVGGLYGVRLRAAFFGESMFSRQ

SEQ ID NO: 114989 - protein, 195 aa, Unknown
  Bacterial polypetide isolated from the Sargasso Sea
MVRQELKRKALVVNTTNNYIDTQEMLRAYRSGIFPMAIGKESNSISWIRPIKRGIIPIGYLHISRSTKKFIRKTEVKSSINTCFKDILKNCANREDTWINKPIYESYIRLYELGYAHSVEIWEGSALAGGLFGISIGSCFFGESMFSLRPNGSKLALIFTMASLIYSGYKLFDVQFLTDHLKTMGAKEINNEEYQ

SEQ ID NO: 114990 - protein, 227 aa, Unknown
  Bacterial polypetide isolated from the Sargasso Sea
MNTISLLPKGKPVFPEYEFALKEPDGLIAAGGLLDVEWLKEAYTRGIFPWFNSDDEEILWWCPSERAILYPGEMHVSRSLRKVLKRDLFHIAYDHNFKGVLENCSRRNDRYEGTWITESMKNAYNEMHIAGLAHSVEVTLEGELVGGVYGVSLGSMFFGESMFSRVDNASKVALYYLQKKLYEWSFTLIDCQIMNPHLQSLGAVTITRAEFIDLLKSNNKKRTRAGS

SEQ ID NO: 114991 - protein, 232 aa, Unknown
  Bacterial polypetide isolated from the Sargasso Sea
SFLNHEFEAFPSPELALTDPNGLLAIGGDLRPERLLTAYYHGIFPWFNADDPILWWSPDPRAIFIPGQVNISTSLRKYLKKQPWRFTINHAFTDVMAGCAQPRRKQAGTWITHEIQMAYRELHHNSHAHSVEVWHGERLIGGLYGIAIGQVFCGESMFHRETNASKAAMAVLQQHLIKMHFKLIDAQVMNPHLESLGAKPVKRADFIQLLTQFRDKPVNPAAWIPSEVTLEL

SEQ ID NO: 114992 - protein, 242 aa, Unknown
  Bacterial polypetide isolated from the Sargasso Sea
MSIHYLNPNVIAFPDVDDALANPNGLLAAGGNLSKSWLIAAYRQGIFPWYEDGQPILWWSPDPRMSLIPDNFRMSRSLRKLVKKRIYRVSFDQDFIGVINGCRNNVRKSHGTWITNEMVNAYTELYDSGIAHSVEVWSSRKLVGGLYGVSLGKIFFGESMFSAVDNASKIALLYLTVHLKDWAYKLIDCQVDSDHLESLGASKISRSEFLDIINKYTTKEENEENWYVEERLIQEKINDHGQ

SEQ ID NO: 114993 - protein, 237 aa, Unknown
  Bacterial polypetide isolated from the Sargasso Sea
MIALHYIEEGAPFPPVDTALDEPNGLLAFGGDLSPARLFSAYSQGIFPWFSDDEPLLWWSPDPRAIIELDNFAASKSLKKLARKQKYTVTLNYAFDRVIEACSSTPRKNPNTGELNSETWITDDMIGAYRQLNGLGLAHSVEVWDGETLVGGLYGVGIGKVYCGESMFHRESNTSKLAMMALVEHMKSHDMAFIDCQLPTDHLTSLGANVLSRENFIEKLENNNHTLTEDGRLSEDY

SEQ ID NO: 114994 - protein, 231 aa, Unknown
  Bacterial polypetide isolated from the Sargasso Sea
MEPEELWFPPADEALDDPDGLLAVGGDLSRSRLLLAYRNGIFPWFSDDQPILWWSPNPRCVLFPDEVHVSRSLRRTLNQHRFEVTADRCFSRIIRLCATTRAEGTWITDDMIQAYTDLHRHGTAHSIEVWNRNGELAGGMYGLALGRCFFGESMFSLETNASKVLMVHLARQLAQWGYRLMDCQVESDHLLSMGARTIPRDEFLSILGKYVDQKPEKEDWAFNWRWPGPEE

SEQ ID NO: 114995 - protein, 202 aa, Unknown
  Bacterial polypetide isolated from the Sargasso Sea
MDFQKLSEKVYWPATGNWQDFFPASNLSLEEPNGLLAIGGNLSPETLVAAYSRGIFPWFSVGQPIMWWSPNPRTILYPESLYVSKRLARYIRKKIFTVTFDTACARVIEGCRQLRKGQDGTWITKQMYQAYSDLHSLGYVHSVECWDGKLLVGGLYGVALGRVFFAESMFHRANNASQIALAKLCEALIQWNYFILDCQFLT

SEQ ID NO: 114996 - protein, 226 aa, Unknown
  Bacterial polypetide isolated from the Sargasso Sea
MLTWLQRDSLQFPPLAKAMREPNGLLAAGGDLSADRLISAYRHGCFPWFQDGQPILWWSPDPRNVLLPDELHVSRSLAKLLRQQRYRVTFDQDFAAVIQACAEPRAYADGTWITRGMQQAYLQLHQRGIAHSVEVWSGDELVGGLYGLAIGQLFFGESMFSRADNASKVGFATLVGKLRDWGFVLIDCQMPTQHLHSFGARAIPRASFAEYLKCHLDLPTGADWLA

SEQ ID NO: 114997 - protein, 233 aa, Unknown
  Bacterial polypetide isolated from the Sargasso Sea
MSFLNHEFEAFPSPELALTDPNGLLAIGGDLRPERLLTAYYHGIFPWFNAEDPILWWSPDPRAIFIPGQVNISTSLRKYLKKQPWRYTINHAFTDVMAGCAQPRRKQTGTWITHEIQMAYRELHHNGHAHSIEVWHGERLIGGLYGLAIGQVFCGESMFHRETNASKAAMAVLQQHLIKMNFKLIDAQVMNPHLESLGAKPVKRANFIQLLTQFRDNTVNPAAWIPSEVTLEL

SEQ ID NO: 114998 - protein, 233 aa, Unknown
  Bacterial polypetide isolated from the Sargasso Sea
MSFLNHEFEAFPSPELALTDPNGLLAIGGDLRPERLLTAYYHGIFPWFNADDPILWWSPDPRAIFIPGQVNISTSLRKYLKKQPWRFTINHAFTDVMAGCAQPRRKQAGTWITHEIQMAYRELHHNSHAHSVEVWHGERLIGGLYGIAIGQVFCGESMFHRETNASKAAMAVLQQHLIKMHFKLIDAQVMNPHLESLGAKPVKRADFIQLLTQFRDKPVNPAAWIPSEVTLEL

SEQ ID NO: 114999 - protein, 227 aa, Unknown
  Bacterial polypetide isolated from the Sargasso Sea
MPIFPSVSHAREDGLLAVGGDLSEIRLVEAYRNGIFPWYEEGQPILWWSPDPRLVLYPENLKISRSLRKTLRKEIFTSRIDSAFDRLIDACAETRLSRGDGTWITEDMKKAYGRLQRKGYAMSFESWADGELAGGLYGVKIGKCFFGESMFSKRNDASKCALVSLVRYAEKNGIRLIDCQMRTEHLIRMGAHEIPRKVYLQQLKRLVPRYTQKRDRYEYNSRPALAS

SEQ ID NO: 115000 - protein, 233 aa, Unknown
  Bacterial polypetide isolated from the Sargasso Sea
GLLAVGGDLEPKTLLCAYAQGIFPWFESDQEILWWSPNPRLTLRSNAIHVSRSLKKAIRQCGWRLQYDTAFAGVVSHCAHADRNQPEAGTWITPDMHAAYCALHDLGVAHSVEVYEGDTLIGGLYGILLGNMFFGESMFSLQSNASKMAFVALAKLCRDHSIEVIDCQVHNEHLVSLGAQTMPRQDFENHLRDAIKTPMTDVFANPLCLASNEPLPLEQRLGSPLAVTVAELL

SEQ ID NO: 115001 - protein, 245 aa, Unknown
  Bacterial polypetide isolated from the Sargasso Sea
MAFIYEPRYLMSRYLTQLDDELCWFPDPEHALEEPNGLLAIGGDLSPARLLAAYHKGIFPWNEPHQPLLWWSPDPRGVIRPEQLHIGRTLRKFIRSTSFDISIDRAFNEVIAACAAPRRSASGTWISTPMIDAYRQLHRLGHAHSIEIWQEGQLQAGLYGLSLGQVFCGESMFSRIDNGAKLAMVALCRHFARHDGALIDCQMQNDFLATLGIEEWPRRQFLTTLAQLSQQPLAANCWQTGSIHL

SEQ ID NO: 115002 - protein, 263 aa, Unknown
  Bacterial polypetide isolated from the Sargasso Sea
MTEDIKKGLLGIVVDETEVSKVMPEINSLTYRGYAAQDLCAKCKFEEVAYLILNGELPDNKQLKSFEKIERKERKLSKSLLDSIKNFPKKSHPMDVARTAVSIMGLEDKETKDNSPKANMRKVMRIFAKTPTALAAFYRLRKGKKIISPKSNLSFSENFFYMCFGEVPNKEIVKAFDVSLILYAEHSFNVSTFTARTITSSLSDIHGAITGAIASLKGPLHGGANEEVMHMMNKIKKPENALKWINNALDKKSVVMGFGHRSL

SEQ ID NO: 115003 - protein, 289 aa, Unknown
  Bacterial polypetide isolated from the Sargasso Sea
MTKKLEGAGLRGQVAGETSLSTVGQIEGLAYRGHKIELLAEKSSFEEVAYLLLYDKLPNQAELDDYKKLLKSQRDLPDSLKQVLQKIPSSAHPMDVMRTGTSMLGNLEPEGEFSNQLNSINRMIATMPSIVTYWYKYSHEGLDIDLVNDEDSMAGHFLHILHGKTPSDLHRKVMDVSLILYAEHEFNASTFTARVCASTMSDIHSCVVAAIGSLRGPLHGGANEKAMELIENWTSKEEAKAKIIEMLGNKEKIMGFGHAVYSIRDPRNAVIKEYAKELSELAENDTLYK

SEQ ID NO: 115004 - protein, 260 aa, Unknown
  Bacterial polypetide isolated from the Sargasso Sea
SPKANMEKAMRIFAQTPTAVAAYSRARKGKKFIQPNKKLSYSENFFNMMFGKVLNKEIVKAFDVSMILYAEHSFNVSTFTARTITSSLCDIHGAITGDIASLKGPLHGGANEGVMYMFKQIRKPEKAEKWINNALDKKKVVMGFGHRVYRSGDSRVPTMKKYFLRVAELKKNTAYPKMYNILEKIMLQRKNIHPNVDYPCGPTYHLMGIDTDFFTPIFVMARITGWSAHIIEQHAANKLIRPLSKYKGSEHREVLSLNIR

SEQ ID NO: 115005 - protein, 291 aa, Unknown
  Bacterial polypetide isolated from the Sargasso Sea
MSDKIYIFDTTLRDGAQTQGVDFSLDDKEKISLALDNLGVDYIEGGWPGANPTDTEFFNKKHSFKNSILTAFGMTKKSDHSAENDPMISALINSKANSICLFGKSWDFHVDVALGISKEQNLKNISESAKHIIKSRKEFMFDAEHFFDGYKSNKEYALSCIKSAYDQGARWIILCDTNGGTLPHEISKIVADVEKHIPGKNLGIHAHNDTENAVANSLVAIQAGVRQVQGTINGLGERCGNANLMSLIPSLYLKHEFSNNYEININEKNIKHLTQCSRLIDEILNRKPNKH

SEQ ID NO: 115006 - protein, 232 aa, Unknown
  Bacterial polypetide isolated from the Sargasso Sea
MSEEIKKGLLGIVVDETEVSKVMPEINSLTYRGYAAQDLCEYCRFEEVAYLILNKDLPNSIELKKFEREERDNRELSKNLYEIVKNMPKKSHPMDVARTAVSAMGLEDKETQDSSPEANMRKALRIFAKTPTALAAFYRIRKGKKVIKPKRDLTFAENFFYMCFGKVPQKEIVKAFDVSLILYAEHSFNVSPFTARTITSSLSDIHGAITGAIASLKGPLHGGANEEVMHMM

SEQ ID NO: 115007 - protein, 258 aa, Unknown
  Bacterial polypetide isolated from the Sargasso Sea
MNKEKIFIFDTTLRDGAQTEGVNFSLDDKNKIAKALSSLGVDYLEGGWPGANTLDTTFFNKPPKLENTILTAFGMTKKTGRSAENDPGLSALLNTNAPAICLVGKSWDFHVDVALGITKEENLENIKESAKLFVKNKKEFMFDAEHFFDGFKKNPEYALSCIKTAFDEGARWIVLCDTNGGTLPNEIGEIVSKVSKQIPGKNLGIHAHNDTENAVANSLTAILAGARQVQGTINGLGERCGNANLISLIPSLVLKKSF

SEQ ID NO: 115008 - protein, 265 aa, Unknown
  Bacterial polypetide isolated from the Sargasso Sea
MIKEKLYIFDTTLRDGAQTQGVDFSIDDKLKIAQALDNLGVDYIEGGWPGANPTDTEFFQKKINCKNSTITAFGMTKKTGRSADNDPGLSALINSNTKAVCVVGKSWDFHVDVALGISNEENLENISESTKLFVKEKKEFMFDAEHFFDGYKANPKYTLSCLKAAYDNGARWIVLCDTNGGTLPHEVTKIVNEVVKAIPGKNIGIHAHNDTGNAVSNTLAAVLAGVRQVQGTINGLGERCGNANLMSLIPTFYLKKDFSDKFEIN

SEQ ID NO: 115009 - protein, 257 aa, Unknown
  Bacterial polypetide isolated from the Sargasso Sea
MSDDIKKGLLGIVVDETEVSKVMPEINSLTYRGYAAQDLCAKCKFEEVAYLILNGELPNKKQLKNFEKQERKERKLSKTLLEDIKKFPKKAHPMDVARTAVSIMGLEDKDTKDNSPKANMRKVMRIFAKTPVALAAFYRSRKGKKIISPKNNLSFSENFFHMCFGKVPNKDIVKAFDVSLILYAEHSFNVSTFTARTITSSLSDIHGAITGAIASLKGPLHGGANEEVMHMMNKIKKPENALKWINKALDNKDVVMG

SEQ ID NO: 115010 - protein, 273 aa, Unknown
  Bacterial polypetide isolated from the Sargasso Sea
MLNYLSSPFRWFFKLEAASGLVLLLSAIIALIVSNSYLSSLYFETLDKYIFVGLNNIGLKLSVLHWINDVLMAIFFFFVTLEIKREFLQGELSNLKQALLPIIAAVGGMLVPALMYVFINFGNIETLNGWAIPSATDIAFSLGVLSLLGSRVPISLKVFLTALAIIDDLGAIVIIAVFYSGDLSIFNLGMMFLSFLGLLILNKFGIKKFLPYLIIGFFLWHFTHESGIHATIAGVLLACTIPHRRKEKDFSLLIKIEHSISPYVAFGIMPLFA

SEQ ID NO: 115011 - protein, 289 aa, Unknown
  Bacterial polypetide isolated from the Sargasso Sea
MSKEKIFIFDTTLRDGAQTEGVNFSIDDKNKIAKALSSLGVDYLEGGWPGANTLDTTFFSKPPKLENTILTAFGMTKKTGRSAENDPGLSALLNTNAPAICLVGKSWDFHVDVALGITKEENLGNIKESAKLFIKKKREFMFDAEHFFDGYKKNPEYALSCIKTAFDEGARWIVLCDTNGGTLPNEVGEIVSEVSKHIPGKNLGIHAHNDTENAVANSLTAVLAGVRQVQGTINGLGERCGNANLISLIPSLVLKKSFSDNFEIKINKDKIKTLTECSRLLDEILNKKS

SEQ ID NO: 115012 - protein, 190 aa, Unknown
  Bacterial polypetide isolated from the Sargasso Sea
NRLSIKKFFPYLILGIFLWFFTHESGIHATIAGVLLASLIPHRKKEHDFSLLIKLEHAISPYVAYFIMPLFAFANAGVSLEGLTFSSLLLPVPLGILLGLFVGKQVGVFLFSYVSIKSGLASLPNNSNWLSFYAVGILTGIGFTMSLFVGNLAFAQNMEYIDGVKIGVLSGSLLSTVFGYFLLLISTKNK

SEQ ID NO: 115013 - protein, 231 aa, Unknown
  Bacterial polypetide isolated from the Sargasso Sea
MSEEVKKGLLGIVVDETEVSKVMPEINSLTYRGYAVQDLCEFCRFEEAAYLILKGDLPNSIELRQFEKIERGHRDLSKNLYEIIKHMPKKSHPMDVARTAVSVMGLEDKETTDNSQEANTRKALRILAKTPTALAAFYRIRKGKKIIKPKKELTFAENFFYMCFGKVPQKEIVKAFDVSLILYAEHSFNVSTFTARTITSSLSDIHGAITGAIASFKGPLHGGANEEVMHM

SEQ ID NO: 115014 - protein, 307 aa, Unknown
  Bacterial polypetide isolated from the Sargasso Sea
LRTKTGHITLDPGFVNTGTCESAITYLNGEKGILHYRGYPIDELAENSTFIEVAYLLIHGELPNQKQHKAYVDRISKQAMIHEDMKLFFEGFAKTAHPMVILSSMVSSLSAYYTEASGKASIENIEINSARLIAKISTIAAFSYKKSVGQPFVYPKEDLSYCENFLNMMFSVPAESYEIDPDVLKSFELMLILHADHEQNCSASTVRVVGSSMANVYASVASGILALWGPLHGGANQQAVQMLQQIHEDGSNISKYIEFAKNKNNKFRLMGFGHRVYKNFDPRAKIMKKVCHKLLKKLEVKDPLLQI

SEQ ID NO: 115015 - protein, 306 aa, Unknown
  Bacterial polypetide isolated from the Sargasso Sea
MYRGLREVYIDRTTSSFINGKEGKLYYRGYSIDDLAQNCGFEEISYLVMMGELPTSSQLESFSKELKSNMELPNEILDLIRLVKDAHPMDVLRTAISALSGFDSEVDDNSSEATLRKGTKLTAQAPTIVAAHARIRQDLDPINPDPNLGIAANFLYMLFGTVPDPEDAKLIDKDFVLHAEHGLNASAFGARVAASTQADLHCAVTTGIAVLKGPSHGGAAESVMTMSLEIGDESNAEKYIKDTLAGGGRIMGFGHRVYKAVDPRSLHLQDDLKALGERKGEPKWYSILQKVLEVMQPYSRKGIAKM

SEQ ID NO: 115016 - protein, 50 aa, Unknown
  Bacterial polypetide isolated from the Sargasso Sea
MPDKNRVYIFDTTMRDGEQSPGASMSLEEKIQIARVFDELGIDIIEAGFP

SEQ ID NO: 115017 - protein, 241 aa, Unknown
  Bacterial polypetide isolated from the Sargasso Sea
MSDEVKKGLLGIVVDETTISQVMPDINSLTYRGYAVQDLCEKCSFEEVAYLVLNGDLPKKKDLKVFKKQLEENRNISINLREIVKHMPKKAHPMDVARTIVSVLGLEDKETSKNTPSANMRKTIRIFAKTPTAIAAFFRARKGKKIISPKKKLSFSENFFYMCFGKVPSKDIVKAFDVSLILYAEHSFNVSTFTARTITSSLSDIHGAITGAIASLKGPLHGGANEEVMHMMNKIKKPANA

SEQ ID NO: 115018 - protein, 293 aa, Unknown
  Bacterial polypetide isolated from the Sargasso Sea
LTTLRASTKAITLDNGFMNTGSCQSAITFLNGEKGILRYRGYPIEQLADNSNFLEVSYLLNYGELPSNDQLNKFTNSVKEKAVLPDGVKNIIDQFPKDAHPMGVMAGAMAALSGFYPESLGECNDEMKDHLFSQLLGQAKAMASHFFRRSVGKDPVDPDSSVDYSSDFLQMMFSGDGFKVDEDVARAIDVLLILHADHEQNCSASTVRVVGSSQANVFASISAGISALWGPLHGGANQAVLEMLEAIQNDGGDHKRYLEKAKDKNDPFRLMGFGHRVYKNFDPRATIIKKACD

SEQ ID NO: 115019 - protein, 305 aa, Unknown
  Bacterial polypetide isolated from the Sargasso Sea
HAGALSWADFDFHPHNDYGLGVANAMYAVKAGIRCIHCTMNCLGERAGNASLAEIAVVLKDQLGSELSIDETHLSPVSEMVENFSGKRLARNSPIVGEDVFTQTSGIHADGDRKGGLYHNPIYPERFGRNRSYALGKMSGKASLVKNLELLGIQLVEENLQKVLRRIVELGDSKKTITLADLPFIITDVLETHEEQRIELLNCSISSGLNLKSVASIRMMFDKKEHNESGSGNGGYDAFMSAIKKILKKHHLQCPQLLDYQIRIPRGGQTDALTESIITWDMNGKRVQTVGIDPDQVMAAVNATL

SEQ ID NO: 115020 - protein, 313 aa, Unknown
  Bacterial polypetide isolated from the Sargasso Sea
EKSSFEEVAYLLLYDKLPNQSELDDYKKLLKSQRDLPDSLKQVLQKIPSSAHPMDVMRTGTSMLGNLEPEGDFSNQLNSINRMIATMPSIVTYWYKYSHEGLDIDLVNDEDSMAGHFLHILHGKTPSDLHRKVMDVSLILYAEHEFNASTFTARVCASTMSDIHSCVVAAIGSLRGPLHGGANEKAMELIENWTSKEEAKAKIIEMLGNKEKIMGFGHAVYSIRDPRNAVIKEYAKELSELAENDTLYKVAEEVEKVMADEKKMFANADFFHAPAYFYMGIPTKLFTPIFVMSRVSGWTAHCMEQRANNRIIR

SEQ ID NO: 115021 - protein, 231 aa, Unknown
  Bacterial polypetide isolated from the Sargasso Sea
MSDDIKKGLLGIVVDETEVSKVMPEINSLTYRGYAAQDLCEYCRFEEVAYLILNKDLPNSIELKHFEKEERNNRELTKNLYEIIKHMPKRSHPMDVARTAVSVMGLEDKETTDSSPEANMRKALRIFAKTPTALAAFYRIRKGKKIIKPKKNLTFAENFFYMCFGKVPQKEIVKAFDVSLILYAEHSFNVSTFTARTITSSLSDIHGAITGAIASLKGPLHGGANEEVMHM

SEQ ID NO: 115022 - protein, 310 aa, Unknown
  Bacterial polypetide isolated from the Sargasso Sea
EAASGLILLISAIIALIISNSSYSNIYFETLNQYLFIGINNFGLKLSVLHWINDALMAIFFFFVTLEIKREFIQGELSTIKQAILPIVGAIGGMLIPALIYIYINFNTPGTLNGWAIPSATDIAFSIGILSLLGSRVPLSLKVFLTALAIIDDLGAIIIIAFFYTGDLSIQYLGLIIITFIILIILNRFGVKNFFPYLIVGIFLWFFTHESGIHATIAGVLLACSIPHRKKEHDFSLLVKIEHSISSYVAFGIMPLFAFANAGVSLSGLTFLSLLQPVPLGILLGLFIGKQLGVFVFSYISIKLGLHKCQ

SEQ ID NO: 115023 - protein, 269 aa, Unknown
  Bacterial polypetide isolated from the Sargasso Sea
MSDKSSFLEVSYLVVNGKLPSESELSSFKSQIKEGSAIPEGIKSIIKSFPKDAHPMGITSAAMVALSGFYPEFLDQDLTDDQKKKIVPMLMGQLKTISAAVYRHGQGKDLVDSDSSLDYTSDFLYMMTGEKPNPEVAKALDVLLILHADHEQNCSASTVRVVGSSKANLFASLSAGIDALWGPLHGGANQAVLEMLEAIQNDGGGYEKFISKAKDKEDPFRLMGFGHRVYKNFDPRAKVIKKYCDEVLEKLNTQDPLLAIAKGLETTAL

SEQ ID NO: 115024 - protein, 320 aa, Unknown
  Bacterial polypetide isolated from the Sargasso Sea
IAKHSQNLGVDYLEGGAGLCANTLDTAFFNKPPKLGKTVLTAFGMTKKSGRSAQNDPGLSAILNSNTPAVCLVGKSWDFHVNKALGISNKENLENIKESAKLFITKKKEFLFDAEHFFDGYKSNPEYALSCIKSAYDEGARWIVLCDTNGGTLPHEVGDIISKVIKIIPGKNLGIHAHNDTENAVANSLTAVLSGVRQVQGTINGLGERCGNANLMSVIPSLVLKESFSKNFEINISKDKMKTLTECSRLLDEILNRKSNRHSAYVGASAFAHKGGLHVSAVTKDPKTYEHINPNLVGNFRNIVVSDQSGKSNIMSRLEK

SEQ ID NO: 115025 - protein, 239 aa, Unknown
  Bacterial polypetide isolated from the Sargasso Sea
MSDEIKKGLMGVTVDETAVSKVMPEINSLTYRGYAAQDLCEKCKFEEVAFLILNGELPNKKQLKDFEKQERKERKLSKTLLDDIKKFPSKAHPMDAARTAVSIMGLEDKETKDNSPKANMRKVMRIFAKTPVSLAAFYRSRKGKKIIPPKNNLSFSENFFYMCFGKVPNKDIVKAFDVSLILYAEHSFNVSTFTARTITSSLSDIHGAITGAIASLKGPLHGGANEEVMHMMNKIKKPE

SEQ ID NO: 115026 - protein, 284 aa, Unknown
  Bacterial polypetide isolated from the Sargasso Sea
PPKLEKTVLTAFGMTKKSGRSAQNDPGLSAILNSNTPAVCLVGKSWDFHVNKALGISNKENLENIKESAKLFITKKKEFLFDAEHFFDGYKSNPEYALSCIKSAYDEGARWIVLCDTNGGTLPHEVGDIISKVIKIIPGKNLGIHAHNDTENAVANSLTAVLSGVRQVQGTINGLGERCGNANLMSVIPSLVLKESFSKNFEINISKDKMKTLTECSRLLDEILNRKSNRHSAYVGASAFAHKGGLHVSAVTKDPKTYEHINPNLVGNFRNIVVSDQSGKSNIM

SEQ ID NO: 115027 - protein, 303 aa, Unknown
  Bacterial polypetide isolated from the Sargasso Sea
SFKQLRVDRIEIASARVSEGEMDGVMRTTSWAADKGFLEQIEVLGFVDHNRSVDWILEAGGRVMNLLTKGSENHCTNQLRKTLDEHLKDIRKTLKYAHQNKVRVNVYLEDWSNGYRDMPDYVYDLVAGLKDEGVARIMLPDTLGVMSPDQVYQSMMDMQERFPWAAFDFHPHNDYGLGVANAMYAVKAGIRCIHCTMNCLGERAGNASLAEIAVVLKDQLRAELSIDETHLSPVSEMVENFSGKRLARNSPIVGEDVFTQTSGIHADGDRKGGLYHNPIYPERFGRNRSYALGKMSGKALLVK

SEQ ID NO: 115028 - protein, 286 aa, Unknown
  Bacterial polypetide isolated from the Sargasso Sea
MNKEKIYIFDTTLRDGAQTEGVDFSVEDKNKIAKILSNIGVDYIEGGWPGANPIDNEFFDKSPNLGNSKFTAFGMTKKNGVSADNDPNLSPLMNADCKTVCVVGKTWDFHVKTALGIKNEDNLKNIKETAKHFVKNNKEFLFDAEHFFDGYKNNPNYALDCLKQAYDEGARWVVLCDTNGGTLPNEVGEIINSVTKVIPGKNLGIHAHNDTENAVSNSLTAVLAGARQIQGTINGLGERCGNANLMSIIPTLFLKKTFSDKFDLNINKKKLSSLTECSRFLGRSFK

SEQ ID NO: 115029 - protein, 246 aa, Unknown
  Bacterial polypetide isolated from the Sargasso Sea
KDIRKTLKYAHQNKVRVNVYLEDWSNGYRDLPDYVYYMVAGLKDEGVARIMLPDTLGVMSPDQVYQSMMDMQERFPWAAFDFHPHNDYGLGVANAMYAVKAGIRCIHCTMNCLGERAGNASLAEIAVVLKDQLGAELSIDETHLSPISEMVENFSGKRLARNSPIVGEDVFTQTSGIHADGDRKGGLYHNPIYPERFGRNRSYALGKMSGKASLVKNLELLGIQLVEENLQKVLRRIVELGDSKKT

SEQ ID NO: 115030 - protein, 312 aa, Unknown
  Bacterial polypetide isolated from the Sargasso Sea
ESANSIDKGMAAVVAAETNLSDVRGEIGELIYCGYNINDLAEKATFEEVVHLLHRGHLPDSDELSALKAEFCTSRNLPGGVIDVLKALPKDTSPMHALRTGVSALGCFDSEAETQDDLEAVRKKSIQIIAQVPVIVAAFHRLRQGKEILESDNSLGEAANFIWLITGNKPSEDMERTMDICYILHADHGFNASTFSGRVTIATLSDVYSAVTSAIGTLKGPLHGGANEGVIKMLQEIGDLEKVDAYVDDCLANKRRIMGIGHRVYRVLDPRAPHLKRMAQKLTKELGEPKWIQMSERIAELMLEKKNLNANV

SEQ ID NO: 115031 - protein, 281 aa, Unknown
  Bacterial polypetide isolated from the Sargasso Sea
GMLVPALIYIYINFDNPQTLNGWAIPSATDIAFSLGVLSLLGSRVPLSLKVFLTALAIIDDLGAIIIIAFFYSGDLSIKYLLLMLIIFISLMVLNKFNIKKFLPYLILGFFLWLFTHESGIHATISGVLLASVIPHRKNKKDFSLLIKIEHAISPYVAFGIMPLFALANAGVSLNGLTLNSLMLPVPLGIVLGLFVGKQIGVFLFSIISIKLKIAQMPTGSNWISLYGVGILTGIGFTMSLFVGNLAFVENTEYIGGVKIGVLTGSLLSTLFGYFLLLIQQ

SEQ ID NO: 115032 - protein, 300 aa, Unknown
  Bacterial polypetide isolated from the Sargasso Sea
AGIVLVSMTVIALIVSNSVLSDTYFSILKTYIPLGFGEFKLKLSVFHWINDALMAIFFLVVGLEIKREFVEGELSRPKQAALPILGAVGGMLVPALVYVAFNYETPETLRGWAIPSATDIAFSIGILSLLGSRVPLSLKVFLVALAIIDDMGAVIIIAIFYSTKLNIFYLTLVLFSFLILMGLNKFKVKNFFPFAIVGAFMWFFTHESGIHATIAGVLLAVTIPHEKEIHGHTHSMLKKVEHSLAPYVLFIIMPVFALANAGVNLEGVSFIDLLSPVPLGICLGLFIGKQVGVFVFSIAA

SEQ ID NO: 115033 - protein, 47 aa, Unknown
  Bacterial polypetide isolated from the Sargasso Sea
MSNKDKVFIFDTTMRDGEQSPGASMSVEEKIQISRVFDEMGIDIIEA

SEQ ID NO: 115034 - protein, 234 aa, Unknown
  Bacterial polypetide isolated from the Sargasso Sea
MSEEIKKGLLGIVVDETEVSKVMPEINSLTYRGYAAQDLCAKCKFEEVAYLILNGELPSKKQLKKFEKEERKERKLSKTLLDDIKKFPKKAHPMDVARTAVSIMGLEDKETKDNSPKANMRKVMRIFAKMPVALAAFYRARKGKKIIVPKKNLSFSENFFHMCFGKVPNKDIVKAFDVSLILYAEHSFNVSTFTARTITSSLSDIHGAITGAIASLKGPLHGGANEEVMHMMNK

SEQ ID NO: 115035 - protein, 260 aa, Unknown
  Bacterial polypetide isolated from the Sargasso Sea
MSKEKLYIFDTTLRDGAQTQGVDFSIDDKLKIAHALDNLGVDYIEGGWPGANPTDTEFFQKKINCKNSTITAFGMTKKTGRSADNDPGLSALINSNTKAVCIVGKSWDFHVDVALGISNEENLENISESTKLFVKEKKEFMFDAEHFFDGYKANPKYTLSCLKAAYDNGARWIVLCDTNGGTLPHEVTKIVNEVVKVIPGKNIGIHAHNDTGNAVSNTLAAVLAGARQVQGTINGLGERCGNANLMSLIPTFYLKKEFFQ

SEQ ID NO: 115036 - protein, 246 aa, Unknown
  Bacterial polypetide isolated from the Sargasso Sea
GKIPTIITYFYRRSQGLPDVAPHASLGHAANYLYMLHGTEPSEAHARALETYLALSVDHGMNASTFTARVVTSTEENLVGALTAAVSALDGPLHGGAPSKVDDMLDAIGSIDNAEPWLREQMEAGKRLMGFGHRVYKTLDPRAAALKTVTSQFASDETPLFTLALHVEEVAIRLLAEYKPGRQLYPNLEFWTASVLRTIALPRSLYTPTFCLSRVAGWSAHIIEQSSNNRLIRPSAIYTGPTADFS

SEQ ID NO: 115037 - protein, 47 aa, Unknown
  Bacterial polypetide isolated from the Sargasso Sea
MEDKNRIIIFDTTMRDGEQSPGASMSLEEKMQISRVFDELGIDIIEA

SEQ ID NO: 115038 - protein, 285 aa, Unknown
  Bacterial polypetide isolated from the Sargasso Sea
IKMSKEKIYIFDTTLRDGAQTQGVDFSLNEKEKIAKSLDNLGIDYIEGGWPGANPTDTEFFNKDQNLKNANLTAFGMTKKSEHSAKNDPMLSSLINSKSSSVCLFGKSWDFHVDVALGISNDQNLENIRESAKHIVNSGKEFMFDAEHFFDGYKSNPEYAISCLKAAYDNGARWIVLCDTNGGTLPHEVSKIVEEVTKHIPGKNLGIHAHNDTENAVANSLVAVQAGVRQVQGTINGLGERCGNANLMSLIPTFYLKKDFSDKYEINIRPENIKNLTQCSRLLDE

SEQ ID NO: 115039 - protein, 57 aa, Unknown
  Bacterial polypetide isolated from the Sargasso Sea
MTDKNRVYIFDTTMRDGEQSPGASMSLEEKIQIARVFDELGIDIIEAGFPIASPGDF

SEQ ID NO: 115040 - protein, 247 aa, Unknown
  Bacterial polypetide isolated from the Sargasso Sea
MSDEIKKGLLGIVVDETTISQVMPDINSLTYRGYAVQDLCEKCIFEEVAYLVLNGDLPNKKELKKFKKELEEQRKITVNLREIVRHMPKKAHPMDVARTIVSVLGLEDKETSNNSPKANMKKAIKIFAKTPTAIAAFFRARKGEKIIPPKKDLTFSENFFYMCFGKVPNKDIVKAFDVSLILYAEHSFNVSTFTARTITSSLSDIHGAITGAIASLKGPLHGGANEEVMHMMNKIKKPENALKWINK

SEQ ID NO: 115041 - protein, 253 aa, Unknown
  Bacterial polypetide isolated from the Sargasso Sea
MSEDIKKGLLGIVVDETEVSKVMPEINSLTYRGYAAQDLCEYCRFEEVAYLILNKDLPNTIQLRQFEKEEKNNRELTKNLYEIIKHMPKRSHPMDVARTAVSVMGLEDKETTDSSPDANMRKALRIFAKTPTALAAFYRIRKGKKIIKPKKSLTFAENFFYMCFGKVPQKEIVKAFDVSLILYAEHSFNVSTFTARTITSSLSDIHGAITGAIASLKGPLHGGANEEVMHMMNKIKKTENALKWINNALKTKK

SEQ ID NO: 115042 - protein, 47 aa, Unknown
  Bacterial polypetide isolated from the Sargasso Sea
MTDKNRVYIFDTTMRDGEQSPGASMSLEEKIQIARVFDELGIDIIEA

SEQ ID NO: 115043 - protein, 235 aa, Unknown
  Bacterial polypetide isolated from the Sargasso Sea
MSDEIKKGLLGIVVDETEVSKVMPEINSLTYRGYAAQDLCSKCKFEEVAYLILNGELPNKKQLKNFETQERKERKLSNTLLADIKKIPKKAHPMDVARTAVSIMGLEDKETRDNSPKANLRKAMRIFAKTPVALAAFYRARKGKKIIPPKKKYSMSENFFHMCFGKVPNKEIVKAFDVSLILYAEHSFNVSTFTARTITSSLSDIHGAITGAIASLKGPLHGGANEEVMHMMKKI

SEQ ID NO: 115044 - protein, 248 aa, Unknown
  Bacterial polypetide isolated from the Sargasso Sea
LCPQIVTYWYKFSHEGLDIDLVNDEDSMAGHFLHILHDKEPSDLHKKVMDVSLILYAEHEFNASTFTARVCASTMSDIHSCVVAAIGSLRGPLHGGANEKAMELIENWTSKEEAKSNIIEMLNKKEKIMGFGHAVYSIKDPRNAVIKEYAKQLSEISDNDSLYQVAEEVEKVMADEKNMFANADFFHAPAYFYMGIPTKLFTPIFVMSRVSGWTAHCMEQRGNNRIIRPSAEYTGVVSSDWVDISDRS

SEQ ID NO: 115045 - protein, 239 aa, Unknown
  Bacterial polypetide isolated from the Sargasso Sea
MSDEVKKGLLGIVVDETTVSQVMPDINSLTYRGYAVQDLCKKCTFEEVAYLVLNGELPNQRQLKKFIKEERVNRSLSKQILNDIKKMPKKAHPMDVVRTAVSLMALEDKETRDNSPKSNMRKAIRIFAKTPTALAAFFRSRKGKKILTPKKNLSFSENFFHMCFGKVPSEEIVKAFDVSLILYAEHNFNVSTFTARTITSSLSDIHGAITGAIASLKGPLHGGANEEVMHMMNKIKKPE

SEQ ID NO: 115046 - protein, 292 aa, Unknown
  Bacterial polypetide isolated from the Sargasso Sea
MSKEKIYIFDTTLRDGAQTEGVDFSVEDKNKIAKILSNIGVDYIEGGWPGANPIDNEFFDKSPNLGNSKFTAFGMTKKNGVSADNDPNLSPLMNADCKTVCVVGKTWDFHVKTALGIKNEDNLKNIKETAKHFVKNKKEFLFDAEHFFDGYKNNPNYALDCLKQAYDEGARWVVLCDTNGGTLPNEVGEIINNVTKVIPGKNLGIHAHNDTENAVSNSLTAVLAGARQIQGTINGLGERCGNANLMSIIPTLFLKKTFSDKFNLNISKEKLSSLTECSRFLDEVLNKKPNKS

SEQ ID NO: 115047 - protein, 59 aa, Unknown
  Bacterial polypetide isolated from the Sargasso Sea
MEDKNRIIIFDTTMRDGEQSPGASMSLEEKIQISRVFDELGIDIIEAGFPLPLQVILRR

SEQ ID NO: 115048 - protein, 49 aa, Unknown
  Bacterial polypetide isolated from the Sargasso Sea
MTDKNRVYIFDTTMRDGEQSPGASMSLEEKIQIARVFDELGIDIIEAGF

SEQ ID NO: 115049 - protein, 255 aa, Unknown
  Bacterial polypetide isolated from the Sargasso Sea
DIKKGLLGIVVDETEVSKVMPEINSLTYRGYAAQDLCEFCKFEEVAYLILNKDLPNSIELRKFEKEERNNRDLSKDLYSFIKKMPKKSHPMDVARTAVSIMGLEDKETTDSSPEANMRKAVRILAKTPTALAAFYRIRKGKSIIKPKKNLNMSENFFHMCFGKVPQKEIVKAFDVSLILYAEHSFNVSTFTARTITSSLSDIHGAITGAIASLKGPLHGGANEEVMHMMNKIKDPKNALKWINNALAKKPGCDGI

SEQ ID NO: 115050 - protein, 268 aa, Unknown
  Bacterial polypetide isolated from the Sargasso Sea
MTKKLEGAGLRGQSAGQTSLSTVEQEGSLRYLGYSIEDLAKNASFEEVAYLLLLGQLPNSNQLHDFENELFELRAIPTSLVSVLESIPSSAHPMEVIRTIVSYMGVIEPEKSFEDQLHIAKRLLGVTTSAIVYWYKFSHENKKIDQETGEKSLAAHFLKLLRQEEIPELHQKTLDVSLTLYAEHEFNASTFTGRVCASTLSDLHSCLTAAVGSLRGPLHGGANEEAMVMLQEVQSVESVKNYVDQKLQNKEKIMGFGHAVYSVKDPRS

SEQ ID NO: 115051 - protein, 274 aa, Unknown
  Bacterial polypetide isolated from the Sargasso Sea
MSKEKIYIFDTTLRDGAQTQGVDFSIDDKLKVAKALDGLGVDYIEGGWPGANPTDTEFFQKKIKLNNSVLTAFGMTKKSGRSADNDPGLSSVLNSNTSAVCLVGKSWDFHVDVALGISNEENLENISESAKLFVKEKKEFMFDAEHFFDGFKNNKEYALSCIKSAYDNGARWIVLCDTNGGTLPNEISEIVSEVTKTVPGKNLGIHAHNDTGNAVGNSLAAVLSGARQIQGTINGLGERCGNANLMSIIPTLHLKQTYSKNYEINIKKENINKL

SEQ ID NO: 115052 - protein, 230 aa, Unknown
  Bacterial polypetide isolated from the Sargasso Sea
MAIFFFFVTLEIKREFLQGELSSLKQAMLPIVGAVGGMLVPALIYIYINFETSVTLNGWAIPSATDIAFSIGILSLLGSRVPLSLKVFLTALAIIDDLGAIVIIAFFYTGDLSIKYLLLIFITFIFLLILNRFSVKKFTPYLILGLLLWFFTHESGIHATIAGVLLASVIPHRKKEHDFSLLIKIEHAISPYVAYFIMPLFAFANAGVSLEGLSLASLMMPVPLGILLGL

SEQ ID NO: 115053 - protein, 287 aa, Unknown
  Bacterial polypetide isolated from the Sargasso Sea
MLISAILALIISNSSLSYLYFQTLEKYIFFGFNNFGLKLSVLHWINDVLMAIFFFFVTLEIKREFIQGELSNIKQAILPIIAAVGGMLVPALIYVYINFGNTETLNGWAIPSATDIAFSLGILSLLGSRVPISLKVFLTALAIIDDLGAIVIIAFFYSGDLSILYLTMMLLSFIALLILNKFGFKTFFPYLIIGIILWHFTHESGIHATIAGVLLACTIPHRQKEKDFSLLVKIEHAISPYVAFGIMPLFAFANAGVSLEGISFSSLLLPVPLGILLGLFIGKQLGV

SEQ ID NO: 115054 - protein, 237 aa, Unknown
  Bacterial polypetide isolated from the Sargasso Sea
MINYISKPFKWFFKLEAASGILLLISAILALIVSNSDLSSLYFETLNKYLFVGINNFGLKLSVLHWINDALMAIFFFFVTLEIKREFLQGELSSLKQAMLPIIGAVGGMVVPALIYIIINFKTSVTLNGWAIPSATDIAFSIGILSLLGSRVPISLKVFLTALAIIDDLGAILIIAFFYSGDLSIKYLLLMILTFILLLVLNRLSVRKFIPYLVLGIFLWFFTHESGIHATIAGVLL

SEQ ID NO: 115055 - protein, 298 aa, Unknown
  Bacterial polypetide isolated from the Sargasso Sea
VNVYLEDWSNGYRDFPEYVYDMVAGLKDEGVARIMLPDTLGVMSPDQVYLSMMDMQERFPWAAFDFHPHNDYGLGVANAMYAVKAGIRCIHCTMNCLGERAGNASLAEIAVVLKDQLGAELSIDETHLSPVSEMVENFSGKRLARNSPIVGEDVFTQTSGIHADGDRKGGLYHNPIYPERFGRNRSYALGKMSGKASLVKNLELLGIQLVEENLQKVLRRIVELGDSKKTITLADLPFIITDVLETHEEQRIELLNCSISSGLNLKSVASIRMMFDRKEHNESGSGNGGYDAFMSAVK

SEQ ID NO: 115056 - protein, 291 aa, Unknown
  Bacterial polypetide isolated from the Sargasso Sea
DWILEAGGRVMNLLTKGSENHCTNQLRKTIDEHLKDIRKTLKYAHQNKVKVNVYLEDWSNGYRDLPAYVYDMVAGLKDEGVERIMLPDTLGVMSPDQVYQSMMDMQERFPWAAFDFHPHNDYGLGVANAMYAVKAGIRCIHCTMNCLGERAGNASLAEIAVVLKDQLGAELSIDETHLSPVSEMVENFSGKRLARNSPIVGEDVFTQTSGIHADGDRKGGLYHNPIYPERFGRNRSYALGKMSGKASLVKNLELLGIQLVEENLQKVLRRIVKLGDSKKTITLADLPFIIT

SEQ ID NO: 115057 - protein, 248 aa, Unknown
  Bacterial polypetide isolated from the Sargasso Sea
MSDDIKKGLLGIVVDETEVSKVMPEINSLTYRGYAAQDLCEYCRFEEVAYLILNKDLPNTIQLRKFEKEEKNNRELSKDLYSVIKKMPKKSHPMDVARTAVSIMGLEDKETTDSSPEANMRKAIRILAKTPTALAAFYRIRKGKKIIKPKKNLNIAENFFYMCFGKVPQKEIVKAFDVSLILYAEHSFNVSTFTARTITSSLSDIHGAITGAIASLKGPLHGGANEEVMHMMNKIKDPGNALKWINDA

SEQ ID NO: 115058 - protein, 291 aa, Unknown
  Bacterial polypetide isolated from the Sargasso Sea
MSDKIYIFDTTLRDGAQTQGVDFSLDDKEKISVALDNLGVDYIEGGWPGANPTDTEFFNKKHSFNHSILTAFGMTKKSDHSAENDPMISSLINSKANSICLFGKSWDFHVDVALGISKEQNLKNISESAKHIINSGKEFMFDAEHFFDGYKSNKEYALSCIKSAYDQGARWIVLCDTNGGTLPHEISKIVTDIVKHIPGKNLGIHAHNDTENAVANSLVAIQAGVRQVQGTINGLGERCGNANLMSLIPSLYLKQEFSNNYEINIKEENIKHLTQCSRLLDEILNRKPNKH

SEQ ID NO: 115059 - protein, 229 aa, Unknown
  Bacterial polypetide isolated from the Sargasso Sea
MTEDIKKGLLGIVVDETEVSKVMPEINSLTYRGYAAQDLCAKCKFEEVAYLILNGELPSEKQLKNFEKVERKERNLSKTLLESIKNFPKKSHPMDVARTAVSIMGLEDKETKDNSPEANLRKVMRIFAKTPVALAAFYRIRKGKKIIKPKSNLSFSENFFYMCFGKVPEKEIVKAFDVSLILYAEHSFNVSTFTARTITSSLSDIHGAITGAIASLKGPLHGGANEEVM

SEQ ID NO: 115060 - protein, 198 aa, Unknown
  Bacterial polypetide isolated from the Sargasso Sea
VSLILYAEHEFNASTFAAIVCAATLSDFYSCVTGAIGTLRGPLHGGANEKAMELISRFQDEESAAKSIYSMLENKELIMGFGHAVYTKQDPRNDIIKKWSKKLSVGRPNEKLYDISCRIERIMKEEKGLFANADFFHASAYNFMDIPTKLFTPIFVCSRVSGWAAHIIEQRSDNKLIRPGAKYVGSEPLDFVPINDRD

SEQ ID NO: 115061 - protein, 301 aa, Unknown
  Bacterial polypetide isolated from the Sargasso Sea
NEKAIDISNLRAKTGHITLDPGFVNTGPCESAITYLNGEKGILHYRGYPIEELAEHSTFIEVGYLLIHGELPNRQQLDDYLDRISKHAMIHEDMKLFFEGFSKTAHPMVILSSMVSSLSAYYTEASGKASIENIEINSARIIAKISTIAAFSYKKSVGQPFVYPKDSLSYCANFLNMMFSVPAESYEIDPDILKSLELVLILHADHEQNCSASTVRVVGSSMANVYASVASGILALWGPLHGGANQQAVQMLQQIYEDGSNISKYIELAKNKKNKFRLMGFGHRVYKNFDPRAKIIKKVVT

SEQ ID NO: 115062 - protein, 233 aa, Unknown
  Bacterial polypetide isolated from the Sargasso Sea
MSDEIKKGLLGIVVDETEVSKVMPEINSLTYRGYAAQDLCAKCKFEEVAYLILNGELPTKKQLKKFEKEERKERKLSKTLLDDIKKFPKKAHPMDVARTAVSIMGLEDKETKDNSPKANMRKVMRIFAKMPVALAAFYRARKGKKIIPPKKNLSFSENFFHMCFGKVPNKDIVKAFDVSLILYAEHSFNVSTFTARTITSSLSDIHGAITGAIASLKGPLHGGANEEVMHMMN

SEQ ID NO: 115063 - protein, 228 aa, Unknown
  Bacterial polypetide isolated from the Sargasso Sea
MSDDIKKGLLGIVVDETEVSKVMPEINSLTYRGYAAQDLCEYCRFEEVAYLILNKDLPNSIELKHFEKEERNNRELTKNLYEIIRHMPKKSHPMDVARTAVSVMGLEDKETTDSSPEANMRKALRIFAKTPTALAAFYRIRKGKKIIKPKKNLTFAENFFYMCFGKVPQKEIVKAFDVSLILYAEHSFNVSTFTARTITSSLSDIHGAITGAIASLKGPLHGGANEEV

SEQ ID NO: 115064 - protein, 248 aa, Unknown
  Bacterial polypetide isolated from the Sargasso Sea
LTPLKEVLQKIPATAHPMDVMRTGTSMLGNLEPEGDFSNQLDSINRMIATMPSIVTYWYKFSHEGLDIDLVNDEDSMAGHFLHILHGKKPSELHKKVMDVSLILYAEHEFNASTFTARVCASTMSDIHSCVVAAIGSLRGPLHGGANEKAMELIENWTSKEEAKSNIIEMLNNKEKIMGFGHAVYSVRDPRNAVIKEYAKQLSELADTDTLYQVAEEVEKVMADEKKMFANADFFHAPAYFYMGIPTK

SEQ ID NO: 115065 - protein, 243 aa, Unknown
  Bacterial polypetide isolated from the Sargasso Sea
MSDDVKKGLLGIVVDETTVSQVMPDINSLTYRGYAVQDLCEKCNFEEVAYLVLNGELPNKKQLKSFVKEERLDRKLSKEILSDIRKMPKKAHPMDVVRTAVSLMALEDKETKDNSPKANMRKAIRIFSKTPIALAAFFRARKGKKIIAPKKNLSFSENFFYMCFGKIPSKEIVKAFDVSLILYAEHSFNVSTFTARTITSSLSDIHGAITGAIASLKGPLHGGANEEVMHMMNKIKKPENAFK

SEQ ID NO: 115066 - protein, 235 aa, Unknown
  Bacterial polypetide isolated from the Sargasso Sea
MDADIKKGLMGVTVDETSVSKVMPEINSLTYRGYAAQDLCANCKFEEVAYLILNGELPTKKQLKDFEKKEKKERKLSKTLLQDIKNFPKKAHPMDVARTAVSIMGLEDIETKDNSPKANMRKVMRIFAKTPVALAAFYRSRKGKKIIPPKQNLSFSENFFHMCFGKVPNKDIVKAFDVSLILYAEHSFNVSTFTARTITSSLSDIHGAITGAIASLKGPLHGGANEEVMHMMNKI

SEQ ID NO: 115067 - protein, 357 aa, Unknown
  Bacterial polypetide isolated from the Sargasso Sea
MTDKIYIFDTTLRDGAQTQGVDFSLDDKEKISVALDNLGVDYIEGGWPGANPTDTEFFNKQHPFNHSILTAFGMTKKSDHSAENDPMISSLINSKANSICLFGKSWDFHVDIALGISKNQNLKNISESAKHIINSGKEFMFDAEHFFDGYKSNKEYALSCIKSAYDQGARWIILCDTNGGTLPHEISKIVSDVSKHIPGKNLGIHAHNDTENAVANSLVAIQAGVRQVQGTINGLGERCGNANLMSLIPSLYLKPEFSNNYEININDKNIKHLTQCSRLLDEILNRKPNKHLPYVGAAAFSHKGGMHVSAVQKDPKTYEHIDPKEVGNVRNIVVSDQAGQSNILSRLETIGIDIKKN

SEQ ID NO: 115068 - protein, 398 aa, Unknown
  Bacterial polypetide isolated from the Sargasso Sea
MSKEKIFIFDTTLRDGAQTQGVDFSIDDKLKIANALDDLGVDYIEGGWPGANPTDTEFFQKIKKLKNSTLTAFGMTKKSGRSAENDPGLSSLLDTNSSAICLVGKSWDFHVDVALGISKNENLENISESAKHFVNHKKEFMFDAEHFFDGYKNNKDYAISCIKAAYENGARWIVLCDTNGGTLPNEVFEIVSEITKFIPGKNLGIHAHNDTENAVSNSLSAVLAGARQIQGTINGLGERCGNANLMSIIPSLHLKKIFKDKFITNIEEKNIRNLTQCSRLLDEILNRKPNQHLPYVGASAFSHKGGLHVSAVQKDPKTYEHIEPSLVGNARNIVVSDQSGKSNIISRLNSIGIDFKESDPKIKKLLNEVKGREFIGYSYDGADASFELLARRIMGLYL

SEQ ID NO: 115069 - protein, 422 aa, Unknown
  Bacterial polypetide isolated from the Sargasso Sea
MSKEKLYIFDTTLRDGAQTQGVDFSIDDKLKITEALDVLGVDYIEGGWPGANPTDTEFFQKKINCKNSTLTAFGMTKKTGRSADNDPGLSALLNSNTKAICIVGKSWDFHVDVALGISNEENLENISESTKLFVKEKKEFMFDAEHFFDGYKTNPKYTISCLKAAYDNGARWIVLCDTNGGTLPHEVTKIVNEVTKVIPGKNLGIHAHNDTGNAVSNTLAAVLAGVRQVQGTINGLGERCGNANLMSLIPTFYLKKDFSSRFEINIKKNNIKNLTQCSRLLDEILNRKPNKHLPYVGAAAFSHKGGLHVSAVQKNPKTYEHINPEEVGNVRNIVVSDQAGKSNILSRLKTIGVDVKENDPKIKKLLDEVKDREFIGYSYDGADASFELLARRIMSKIPRYILIKEYDVTVKKNSTGNIISSA

SEQ ID NO: 115070 - protein, 350 aa, Unknown
  Bacterial polypetide isolated from the Sargasso Sea
MDTTLRDGEQTQGVSSSANEKVNIARALLQSLKVDRIEVASACVSDGEQQAVAKICDWASEEGLVDRIEILGFVDYKRSVDWIKKAGGSVINLLAKGSEKHCREQLGRDLTSHIDDISRTVEYARARQLRVNMYLEDWSSGYSDSRDYVYGLVSGTQDLGISHYLLPDTLGLFSPREVFDSLKEMKEQFPKEEFDFHPHNDYGLATANVIAAIEAGIDNIHCTVNCLGERAGNASLAEVAVVTRDKLGIDLSIDETQITLVSRMVENFSGKWIAANTPVVGADVFTQTAGIHADGDMKGNLYVSRLTPERFDRKRSYALGKMSGKASLVNNLEELGISLSEEDQAKVLQR

SEQ ID NO: 115071 - protein, 404 aa, Unknown
  Bacterial polypetide isolated from the Sargasso Sea
MSDKIYIFDTTLRDGAQTQGVDFSLDDKEKISVALDNLGVDYIEGGWPGANPTDTEFFNKQHSFNHSILTAFGMTKKSDHSAENDPMISSLINSKANSICLFGKSWDFHVDVALGISKDQNLKNISESAKHIINSGKEFMFDAEHFFDGYKSNKEYALSCIKSAYDQGARWIILCDTNGGTLPHEISKIVLDVSKHIPGKNLGIHAHNDTENAVANSLVAIQAGVRQVQGTINGLGERCGNANLMSLIPSLYLKPEFSKNFEINIKDKNIKHLTQCSRLLDEILNRKPNKHLPYVGAAAFSHKGGMHVSAVQKDPKTYEHIDPKEVGNVRNIVVSDQAGQSNILSRLGTIGIDIKKNDPKIKELLEEVKGREFIGYSYDGADASFEILARRIVGEIPRYLIIKA

SEQ ID NO: 115072 - protein, 532 aa, Unknown
  Bacterial polypetide isolated from the Sargasso Sea
MSDKIYIFDTTLRDGAQTQGVDFSLDDKEKISLALDNLGVDYIEGGWPGANPTDTEFFNKKHNFENSILTAFGMTKKTDHSAENDPMISSLINSKANSICLFGKSWDFHVDVALGISKEQNLKNISESAKHIINSGKEFMFDAEHFFDGYKSNKEYALNCIKSAYDQGARWIVLCDTNGGTLPHEISEIVTDVAKHIPGENLGIHAHNDTENAVANSLVAIQAGVRQVQGTINGLGERCGNANLMSLIPSLYLKNEFSNNYEININEENIKHLTQCSRLLDEILNRKPNKHLPYVGAAAFSHKGGMHVSAVQKDPKTYEHIDPKEVGNTRNIVVSDQAGQSNILSRLETIGIDIKKNDPKIKQLLEEVKGREFIGYSYDGADASFELLARRIVGEIPRYLIIKAYDVSVKKNSSGEIVSSAKAELEVDGETIVCEGEGNGPVNALDNAIRDNIKKISKYSDYLKDLRLVDYKVRILNTGTEAVTRVSIESTDSQGKNWFYIGVSPNIIDASFKALIDSLDYKLFKDNAPASA

SEQ ID NO: 115073 - protein, 364 aa, Unknown
  Bacterial polypetide isolated from the Sargasso Sea
MSDKIYIFDTTLRDGAQTQGVDFSLDDKEKISTALDNLGVDYIEGGWPGANPTDTEFFNKKHSFNHSILTAFGMTKKSDHSAENDPMISSLINSKANSICLFGKSWDFHVDVALGISKEQNLKNISESAKHIINSGKEFMFDAEHFFDGYKSNKEYALSCIKSAYDQGARWIVLCDTNGGTLPHEISKIVTDVSNHIPGKNLGIHAHNDTENAVANSLVAIQAGVRQVQGTINGLGERCGNANLMSLIPSLYLKDEFSKNFEINIKDENIKHLTQCSRLLDEILNRKPNKHLPYVGAAAFSHKGGMHVSAVQKDPKTYEHIDPKEVGNVRNIVVSDQAGQSNILSRLETIGINIKKNDPKIKEL

SEQ ID NO: 115074 - protein, 390 aa, Unknown
  Bacterial polypetide isolated from the Sargasso Sea
MKEYHPGLEGYHPGLEGVIATESSISDINGEKGILSYRGYSIEDLAKKTSFEETSYLLLTGDLPSKSELDSFTQKVNASRELPNDFIKLLKNIPKSTKTMDVLQCTVSSLASFYDIEFDAESLKKGKYSGEYFIDVSAKILGSIGSIVAAWNRIKNGKDYINADAKLNYADNFLHMLNDKDESSPIVKRIIDASLVLHAEHTINASTFTAMVTASTLAHPVQVIASAIGSLSGPLHGGANEKVVSMLDDIGSKEHAKEWLDKRLNSKQVVWGMGHREYSTKDPRAKILTAMVEDFFKERGGEVSSKFETAMELEKACEERLSKKGVYANVDFYSGILYQEIGIPVDLFTPIFAVSRTSGWLAHWIEQVSNNKIFRPTQNYIGQEPRELKK

SEQ ID NO: 115075 - protein, 255 aa, Unknown
  Bacterial polypetide isolated from the Sargasso Sea
MSKDQLYIFDTTLRDGAQTQGVDFSIDDKEKISSALDELGVDYIEGGWPGANPTDTEFFNKDHNFKSANLTAFGMTKKSEHSAENDPMLSSLINSKSSSICLFGKSWDFQVDVALGISNEENLTNISESAKHIIKSGKEFMFDAEHFFDGYKANADYALACLKSAYDNGARWIVLCDTNGGTLPHEVEKIILDVAKHIPGKNLGIHAHNDTENAVANSLTAVQAGVRQVQGTINGLGERCGNANLTSLIPYFFFK

SEQ ID NO: 115076 - protein, 373 aa, Unknown
  Bacterial polypetide isolated from the Sargasso Sea
MTKKLEGAGLRGQVAGETSLSTVGQIEGLAYRGHKIELLAEKATFEEVAYLLLYDKLPNQAELDDYKALLKNNRDLPDSLKKVLQKIPASAHPMDVMRTGTSMLGNLEPEGDFTNQLDSINRMIATMPSIVTYWYKFSHEGQDIDLVNDEDSMAGHFLHILHGKTPSDLHKKVMDVSLILYAEHEFNASTFTARVCASTMSDIHSCVVAAIGSLRGPLHGGANEKAMELIENWTSKEEAKSNIIEMLNNKEKIMGFGHAVYSIRDPRNAVIKEYAKQLSELADTDTLYRVAEEVEKVMADEKKMFANADFFHAPAYFYMGIPTKLFTPIFVMSRVSGWAAHCMEQRANNRIIRPSADYIGVESSDWVEIADRS

SEQ ID NO: 115077 - protein, 249 aa, Unknown
  Bacterial polypetide isolated from the Sargasso Sea
MDTTLRDGEQTQGISFTPAEKTNVAKALLNKLRVDRIEIASARVSEGEMDGVMRTTSWAEDKGFLEQIEVLGFVDHNRSVDWILEAGGRVMNLLTKGSENHCTNQLRKTLDEHLKDIRKTLKYAHQNKVKVNVYLEDWSNGYRDLPDYVYDMVAGLKDEGVARIMLPDTLGVMSPDQVYQSMMDMQERFPWAAFDFHPHNDYGLGVANAMYAVKAGIRCIHCTMNCLGERAGNASLGEIAVVLKDQLSA

SEQ ID NO: 115078 - protein, 379 aa, Unknown
  Bacterial polypetide isolated from the Sargasso Sea
MSKDQLYIFDTTLRDGAQTQGVDFSIDDKEKISSALDELGVDYIEGGWPGANPTDTEFFNKDHNFKSANLTAFGMTKKSEHSAENDPMLSSLINSKSSSICLFGKSWDFQVDVALGISNQENLTNISDSAKHIVKSGKEFMFDAEHFFDGYKSNSEYALACLKSAYDNGARWIVLCDTNGGTLPHEIEKIVLEVAKHIPGKNLGIHAHNDTENAVANSLTAVQAGVRQVQGTINGLGERCGNANLTSLIPTLFLKKDFYENYKLNIKRENLKNLTQCSRLLDELLNRKPNKHLPYVGASAFSHKGGMHVSAVQKDPKTYEHINPEQVGNSRNIVVSDQSGQSNIMSRLNSIGIKIEKNDPKIKKLLEEVKDREFIGYSY

SEQ ID NO: 115079 - protein, 371 aa, Unknown
  Bacterial polypetide isolated from the Sargasso Sea
MKKLEGAGLRGQTAGQTSLSTVEQEGSLRYLGYKIEDLAKHASFEEVAYLLLLGHLPNKEQLSDFENELMSLRAMPDSLISVLESIPAEAHPMEVIRTIISYMGVTEPEISFDDQLSISKRLLGVTSTAIVYWYKHSHENIKVEQNTGEKSVAGHFLKLLRQEDIEDLHKETLDVSLTLYAEHEFNASTFTGRVCASTLSDIHSCLTAAVGSLRGPLHGGANEEAMKMLEEINSTDEVRDYIDRKLENKEKIMGFGHAVYSVKDPRSDIIKAYSEELSKSHPKKILHDVAAIMEEDLKEKKNLFPNTDFFMAPAYHYIKIPTKLFTPLFAIARIVGWSAHVFEQRENNRIIRPSAEYIGPPDREWEDIESR

SEQ ID NO: 115080 - protein, 302 aa, Unknown
  Bacterial polypetide isolated from the Sargasso Sea
MSDKIYIFDTTLRDGAQTQGVDFSLDDKEKISVALDNLGVDYIEGGWPGANPTDTEFFNKKHTFKNSILTAFGMTKKSDHSAENDPMISSLINSKANSICLFGKSWDFHVDVALGISKEQNLKNISESAKHIINSGKEFMFDAEHFFDGYKSNKEYALNCIKSAYDQGARWIVLCDTNGGTLPHEVSKIVTDVAKHIPGKNLGIHAHNDTENAVANSLVAIQAGVRQVQGTINGLGERCGNANLMSLIPSLYLKHEFSNNFEINISEENIKHLTQCSRLLDEILNRKPNKHLPYVGAAAFSH

SEQ ID NO: 115081 - protein, 203 aa, Unknown
  Bacterial polypetide isolated from the Sargasso Sea
HQKTLDVSLTLYAEHEFNASTFTGRVCASTLSDLHSCLTAAVGSLRGPLHGGANEEAMVMLQEVQSVESVKNYVDQKLENKEKIMGFGHAVYSVRDPRSDIIKDFSQKLSQDHADKLLHDIAEEMETYMWELKKLFPNTDFFHAPAYHYIGIPTKLFTPLFAIARIVGWSAHAFEQRGNNRIIRPSADYIGPEDREWIDIKSR

SEQ ID NO: 115082 - protein, 179 aa, Unknown
  Bacterial polypetide isolated from the Sargasso Sea
VCASTMSDIHSCVVAAIGSLRGPLHGGANEKAMELIENWNSREEAKSNIIEMLSNKEKIMGFGHAVYSIKDPRNAVIKEYAKQLSELADTDTLYQVAEEVEKVMADEKKMFANADFFHAPAYFYMGIPTKLFTPIFVMSRVSGWAAHCMEQRANNRIIRPSAEYVGVESSDWVDISDRS

SEQ ID NO: 115083 - protein, 226 aa, Unknown
  Bacterial polypetide isolated from the Sargasso Sea
NDEESMAGHFLYILHGKTPSDLHRKVMDVSLILYAEHEFNASTFTARVCASTMSDIHSCVVAAIGSLRGPLHGGANEKAMELIENWTSKEEAKSKIIEMLSNKEKIMGFGHAVYSIRDPRNAVIKEHAKELSELAENDTLYQVAEEVEKVMADEKKMFANADFFHAPAYFYMGIPTKLFTPIFVMSRVSGWTAHCMEQRANNRIIRPSADYVGVESSEWIDISDRS

SEQ ID NO: 115084 - protein, 294 aa, Unknown
  Bacterial polypetide isolated from the Sargasso Sea
MLKYLSSPFRWFFKLEAASGLILLISAILALIISNSSISYVYFETLEKYIFLGVNNFGLKLSVLHWINDVLMAIFFFFVTLEIKREFIQGELSNIKQAILPIIAAVGGMLVPALIYVYINFGNSETLTGWAIPSATDIAFSLGVLSLLGSRVPISLKVFLTALAIIDDLGAIVIIAFFYSGDLSIFYLIMMLLSFIALLALNKFNIKKFLPYLIVGILLWDFTHESGIHATIAGVLLACTIPHRKKEKDFSLLVKIEHAISPYVAFGIMPLFAFANAGVSLEGISFSSLLMPVP

SEQ ID NO: 115085 - protein, 533 aa, Unknown
  Bacterial polypetide isolated from the Sargasso Sea
MSKEKLYIFDTTLRDGAQTQGVDFSIDDKLKIAKSLDDLGVDYIEGGWPGANPTDTEFFQKKVKCKNSVLTAFGMTKKTGRSADNDPGLSALLNSNSKAVCIVGKSWDFHVDVALGISNEENLENISESTKLFVKEKKEFMFDAEHFFDGFKANPKYTMSCLKAAYDNGARWIVLCDTNGGTLPHEVTKIVNEVIKIIPGKNLGIHAHNDTGNAVSNSLAAVLAGVRQVQGTINGLGERCGNANLMSLIPTFYLKKDFSDKFEINIKEKNIKNLTQCSRLLDEILNRKPNKHLPYVGAAAFSHKGGLHVSAVQKDPKTYEHINPEEVGNVRNIVVSDQAGKSNILSRLKTIGIEIKEDDPKVKKLLSEVKDREFIGYSYDGADASFELLARRIMSEIPRYILIKEYDVSVKKNSSGNIISSAKAHLEVDGEKIVCEGEGNGPVNALDNAIRNNVDRLAKYSKYLKDLKLVDYKVRILNTGTEAITRVSIESTDSKGKNWFTIGVSTNIIDASFKALIDSLDYKLFKDNAPASN

SEQ ID NO: 115086 - protein, 328 aa, Unknown
  Bacterial polypetide isolated from the Sargasso Sea
MKKLEGAGLRGQTAGQTSLSTVEQEGSLRYLGYKIEDLAKHASFEEVAHLLLLGHLPNKEQLSDFENELMSLRTMPDSLVSVLESIPAEAHPMEVIRTIISYMGVTEPEKSFDDQLSISKRLLGVTSTAIVYWYKHSHENIKVEQNTGEKSVAGHFLKLLRQEDIEDLHKETLDVSLTLYAEHEFNASTFTGRVCASTLSDIHSCLTAAVGSLRGPLHGGANEEAMKMLEEINSTDEVIDYIDRKLENKEKIMGFGHAVYSVKDPRSDIIKSYSKELSKSHPKKILHDVAAIMEEDLKERRIFFLILTFLWLLHIIILRFHKTIYASI

SEQ ID NO: 115087 - protein, 373 aa, Unknown
  Bacterial polypetide isolated from the Sargasso Sea
MTKKLEGAGLRGQVAGETSLSTVGQIEGLAYRGHKIELLAEKATFEEVAYLLLYDKLPNQEELINYKVLLRSHRDLPDSLKEVLQKIPATAHPMDVMRTGTSMLGNLEPEGDFSNQLDSINRMIATMPSIVTYWYKFSHEGQDIDLVNDEDSMAGHFLHILHGKKPSDLHKKVMDVSLILYAEHEFNASTFTARVCASTMSDIHSCVVAAIGSLRGPLHGGANEKAMELIENWTSKEEAKSNIIEMLNNKEKIMGFGHAVYSVRDPRNAVIKEYAKQLSELADTDTLYQVAEEVEKVMADEKKMFANADFFHAPAYFYMGIPTKLFTPIFVMSRVSGWAAHCMEQRANNRIIRPSAEYIGVESSDWVEIADRS

SEQ ID NO: 115088 - protein, 337 aa, Unknown
  Bacterial polypetide isolated from the Sargasso Sea
IEDLAKHASFEEVAHLLLLGHLPNKEQLSDFENELMSLRTMPDSLVSVLESIPAEAHPMEVIRTIISYMGVTEPEKSFDDQLSISKRLLGVTSTAIVYWYKHSHENIKVEQNTGEKSVAGHFLKLLRQEDIEDLHKETLDVSLTLYAEHEFNASTFTGRVCASTLSDIHSCLTAAVGSLRGPLHGGANEEAMKMLEEINSTDEVRDYIDRKLENKEKIMGFGHAVYSVKDPRSDIIKAYSKELSKSHPKKILHDVAAIMEEDLKEKKNLFPNTDFFMAPAYHYIKIPTKLFTPLFAIARIVGWSAHVYEQRENNRIIRPSAEYIGPSDREWEDIESR

SEQ ID NO: 115089 - protein, 533 aa, Unknown
  Bacterial polypetide isolated from the Sargasso Sea
MSKEKIHIFDTTLRDGAQTQGVDFSIDDKLKIAKALDDLGVDYIEGGWPGANPTDTEFFQKKIKLNNSVLTAFGMTKRSGRSADNDPGLSSILNSNTPAVCLVGKSWDFHVDVALGISNEENLENISESAKLFVKEKKEFMFDAEHFFDGFKNNKEYALSCIKSAYDNGARWIVLCDTNGGTLPNEVSEIVNEVSKSVPGKNLGIHAHNDTGNAVSNSLAAVLSGVRQIQGTINGLGERCGNANLMSVIPTLYLKESYSNNYEINIKKENISKLTQCSRLLDEILNRKPNQHLPYVGAAAFSHKGGLHVSAVQKDPKTYEHINPEDVGNVRNIVVSDQSGKSNIVSRLKSIGIDFKQDDPKIKKLLEEVKDREFIGYSYDGADASFELLARRIMGEIPRYISIKEYDVSVKKNTSGEIVSSAKAQLEVDKKLILCEGEGNGPVHALDNAIRNNVDKLAKYSQYLKDLKLVDYKVRILNTGTEAVTRVSIESTDSKGKNWFTIGVSPNIIDASFKALVDSLDYKLFKDKAPASI

SEQ ID NO: 115090 - protein, 371 aa, Unknown
  Bacterial polypetide isolated from the Sargasso Sea
MKKLEGAGLRGQTAGQTSLSTVEQEGSLRYLGYSIEDLAKHASFEEVAYLLLLGHLPNKGQLSDFEDELVSLRTMPNSLIPVLESIPADAHPMEVIRTIISYMGVTEPEKSFDEQLSVAKRLLGITSTAIVYWYKYSHENIKVEQNTGEKSVAGHFLKLLRQEDIEDLHKKTLDVSLTLYAEHEFNASTFTGRVCASTLSDIHSCLTAAVGSLRGPLHGGANEEAMKMLEEVNSTEDVRDYIDRKLENKEKIMGFGHAVYSVKDPRSDIIKAYSEELSKSHAKKMLHDIAAIMEEDMREKKNLFPNTDFFMAPAYHYIKIPTKLFTPLFAIARIVGWSAHVFEQRENNRIIRPSAEYIGPADREWEDIESR

SEQ ID NO: 115091 - protein, 373 aa, Unknown
  Bacterial polypetide isolated from the Sargasso Sea
MTKKLEGAGLRGQVAGETSLSTVGQIEGLAYRGHKIELLAEKSSFEEVAYLLLYDKLPNQAELDDYKKLLKSQRDLPDSLKQVLQKIPSSAHPMDVMRTGTSMLGNLEPEGEFSNQLNSINRMIATMPSIVTYWYKYSHEGLDIDLVNDEDSMAGHFLHILHGKRPSDLHRKVMDVSLILYAEHEFNASTFTARVCASTMSDIHSCVVAAIGSLRGPLHGGANEKAMELIENWTSKEEAKSKIIEMLGNKEKIMGFGHAVYSIRDPRNAVIKEYAKELSELAENDTLYKVAEEVEKVMADEKKMFANADFFHAPAYFYMGIPTKLFTPIFVMSRVSGWTAHCMEQRANNRIIRPSADYIGVETSDWVDISDRS

SEQ ID NO: 115092 - protein, 533 aa, Unknown
  Bacterial polypetide isolated from the Sargasso Sea
MSKDQLYIFDTTLRDGAQTQGVDFSIDDKEKISSTLDELGVDYIEGGWPGANPTDTEFFNKDHNFKSANLTAFGMTKKSEHSAENDPMLSSLINSKSSSICLFGKSWDFQVDVALGISNEENLTNISESAKHIVKSGKEFMFDAEHFFDGYKANADYALACLKSAYDNGARWIVLCDTNGGTLPHEVEKIILEVTKHIPGKNLGIHAHNDTENAVANSLTAVQAGVRQVQGTINGLGERCGNANLTSLIPTFFLKKDFYENYHLNIKRENLKNLTQCSRLLDELLNRKPNKHLPYVGASAFSHKGGMHVSAVQKDPKTYEHINPEEVGNSRNIVVSDQSGQSNIMSRLNSIGIKVEKNDPKIKKLLEEVKDREFIGYSYDGADASFELLARRLMGNIPRYISINEYDVSVKKDKLGDIISHAKAKLEVDGQKILCEGEGNGPVNALDNAIRKNVNKLDKYSEYLKDLRLVDYKVRILNTGTEAVTRVSIESTDSKGLNWFTIGVSPNIIDASFKALIDSLDYKLYKDNAPASL

SEQ ID NO: 115093 - protein, 320 aa, Unknown
  Bacterial polypetide isolated from the Sargasso Sea
MIEYISKPFRWFFKLEAASGLVLLISAILALIISNSSFSYLYFETLEKYIFFGFNNFGLKLSVLHWINDVLMAIFFFFVTLEIKREFIQGELSNIKQAILPIIAAVGGMLVPALIYIYINFGNTETLNGWAIPSATDIAFSLGILSLLGSRVPISLKVFLTALAIIDDLGAIVIIAFFYSGDLSIFYLTMMLLSFIALLVLNKFGFKTFFPYLIIGIALWHFTHESGIHATIAGVLLACTIPHRKKEKDFSLLVKIEHSISPYVAFGIMPLFAFANAGVSLDGISFSSLLLPVPLGILLGLFIGKQLGVFLFSYVAIKFG

SEQ ID NO: 115094 - protein, 317 aa, Unknown
  Bacterial polypetide isolated from the Sargasso Sea
KSQLLEFDKSLKSYRNLPQTTYDIIDIVKDSHPMDVLRTAISSLSSFDEDREDFSEEAIIRKGIRLTSQVPIIVMAHNRMRKGLDPIESSNELSHAANFLYMLEGEKPSEDTARLMDIDFVVHADHGCNASAFTTRVVTGTNADFYGAITAGIAALSGPSHGGAAEGVMELAKDVGTADNAANHVKNLLANRERVMGFGHRVYKAADPRAKHLKEGVKNLSEEKGETEWYDILLAVQEAMTPYARRGIHANVDFFAGAVYYLLGIPSDLFVPIFAVGRIPGWTIQILEQMRHNILIRPLLQYTGERSKEYIPIDKRD

SEQ ID NO: 115095 - protein, 373 aa, Unknown
  Bacterial polypetide isolated from the Sargasso Sea
MTKKLEGAGLRGQVAGETSLSTVGQIEGLAYRGHKIELLAEKATFEEVAYLLLYDKLPNQEELNNYKTLLRSNRDLPDSLKEVLQKIPATAHPMDVMRTGTSMLGNLEPEGDFSNQLDSINRMIATMPSIVTYWYKFSHDGQDIDLVNDEDSMAGHFLHILHGKKPSDLHKKVMDVSLILYAEHEFNASTFTARVCASTMSDIYSCVVAAIGSLRGPLHGGANEKAMELIENWTSKEEAKSNIIEMLNNKEKIMGFGHAVYSIRDPRNAVIKEYAKQLSELADTDTLYLVAEEVEKVMADEKKMFANADFFHAPAYFYMGIPTKLFTPIFVMSRVSGWAAHCMEQRANNRIIRPSAEYIGVESSDWVEIADRS

SEQ ID NO: 115096 - protein, 229 aa, Unknown
  Bacterial polypetide isolated from the Sargasso Sea
DLVNDEDSMAGHFLHILHGKTPSDLHRKVMMFSLILYAEHEFNASTFTARVCASTMSDIHSCVVAAIGSLRGPLHGGANEKAMELIENWTSREEAKEKIIKMLGNKEKIMGFGHAVYSIRDPRNAVIKEYAKELSELAENDTLYKVAEEVEKVMADEKKMFANADFFHAPAYFYMGIPTKLFTPIFVMSRVSGWTAHCMEQRANNRIIRPSADYIGVETSDWVDISDRS

SEQ ID NO: 115097 - protein, 273 aa, Unknown
  Bacterial polypetide isolated from the Sargasso Sea
MTKEKIFIFDTTLRDGAQTEGVNFSIDDKNKIAKALAELGVDYLEGGWPGANTLDTTFFNKPPKLGKTVLTAFGMTKKSGRSAQNDPGLSAILNSNTPAVCLVGKSWDFHVEKALGITNEENLQNIKESSKIFIKNKKEFMFDAEHFFDGYKNNPEYALNCIKTAFDEGARWIVLCDTNGGTLPHEVGEIVFKVSKSIPGKNLGIHAHNDTENAVANSLTAVLSGARQIQGTINGLGERCGNANLISVIPSLVLKESFAKNFEIGISKDKMKT

SEQ ID NO: 115098 - protein, 323 aa, Unknown
  Bacterial polypetide isolated from the Sargasso Sea
MIKYLSKPFIWFFKLEAASGLILLISAILALIISNSSLSNLYFESLKQYIFIGLNNYGLKLSVLHWINDVLMAIFFFFVTLEIKREFIQGELSNIKQAMLPIVAAVGGMLVPALIYVYINWGNSLTISGWAIPSATDIAFSLGVLSLLGSRVPISLKVFLTALAIIDDLGAIVIIAFFYSGNLSVFYLTMMLLSFIGLLILNRTGFKTFLPYLILGIALWHFTHESGIHATIAGVLLACTIPHRKKEKDFSLLVKIEHIISPYVAFGIMPLFAFANAGVSLEGISLMYLLKPVPLGILLGLFIGKQLGVFFFSYISIKLGFAQ

SEQ ID NO: 115099 - protein, 275 aa, Unknown
  Bacterial polypetide isolated from the Sargasso Sea
MSEKIYIFDTTLRDGAQTQGVDFSLDDKEKISKALDNLGVDYIEGGWPGANPTDTEFFNKKHAFKHSKLTAFGMTKKSDHSAENDPMISSLINSKASSICLFGKSWDFHVDVALGISKEQNLKNISESARHIISSGKEFMFDAEHFFDGYKSNKNYALSCIKSAYDAGARWIVLCDTNGGTLPHEISEIITNVIKHVPGKNLGIHAHNDTENAVANSLVAIQAGVRQVQGTINGLGERCGNANLMSVIPTLYLKSEFSNKFEININSDNIKHLTQ

SEQ ID NO: 115100 - protein, 302 aa, Unknown
  Bacterial polypetide isolated from the Sargasso Sea
MSKDKLYIFDTTLRDGAQTQGVDFSIDDKLKITEALDNLGVDYIEGGWPGANPTDTEFFQKKNNCKNSILTAFGMTKKTGRSADNDPGLSALLNSNTKAICIVGKSWDFHVDVALGISNEENLENITESTKLFVKEKKEFMFDAEHFFDGYKANPKYALDCLKAAYDNGARWIVLCDTNGGTLPHEVSTIINEVIKVVPGKNLGIHAHNDTGNAVSNTLTAVLAGVRQVQGTINGLGERCGNANIMSLIPTFYLKKDFSDKFEINIKENNIKNLTQCSRLLDEILNRKPNKHLPYVGAAAFP

SEQ ID NO: 115101 - protein, 373 aa, Unknown
  Bacterial polypetide isolated from the Sargasso Sea
MTKKLEGAGLRGQVAGETSLSTVGQIEGLAYRGHKIETLAEKATFEEVAYLLLYDKLPNQTELDEYKELLKNQRDLPDSLKEVLQKIPANAHPMDVMRTGTSMLGNLEPEGDFSNQLNSINRMIATMPSIVTYWYKFSHEGIDIDLVNDEDTMAGHFLHILHGQKPSDLHRKVMDVSLILYAEHEFNASTFTARVCASTMSDIHSCVVAAIGSLRGPLHGGANEKAMELIENWTSKEEAKSNIIEMLSKKEKIMGFGHAVYSIKDPRNAVIKEYAKELSELADNDTLYQVAEEVEKVMADEKKMFANADFFHAPAYFYMGIPTMLFTPIFVMSRVSGWAAHCIEQRANNRIIRPSAEYIGVESSDWVDISERS

SEQ ID NO: 115102 - protein, 242 aa, Unknown
  Bacterial polypetide isolated from the Sargasso Sea
MITKTTSFFKWFIKQETSAGIVLVFMTVIALIVSNSVLSDTYFSILKTYIPLGFGEFKLKLSVFHWINDALMAIFFLVVGLEIKREFVEGELSRPKQAALPILGAVGGMLVPALVYVAFNYETPETLRGWAIPSATDIAFSIGILSLLGSRVPLSLKVFLVALAIIDDMGAVIIIAIFYSTKLNIFYLTLVLFSFLILMGLNKFKVKSFFPFAIVGTFMWFFTHESGIHATIAGVLLAITIP

SEQ ID NO: 115103 - protein, 330 aa, Unknown
  Bacterial polypetide isolated from the Sargasso Sea
MSKEKIYIFDTTLRDGAQTQGVDFSLNEKEKIAKSLDHLGVDYIEGGWPGANPTDTEFFNKDQNLKNASLTAFGMTKKSEHSANNDPMLSSLINSKSSSVCLFGKAWDFHVDVALGISNEQNLENICESAKHIVSSGKEFMFDAEHFFDGYKSNSEYALSCLKSAYDNGARWIVLCDTNGGTLPHEISKIVEDVTKHIPGKNLGIHAHNDTENAVANSLVAVQAGVRQVQGTINGLGERCGNANLMSLIPTFFFKKDFSDKYEISIKPENIKNLTQCSRLLDEILNRKPNKHLPYVGASAFSHKGGMHVSAVQKDPKTYEHINPDNVGKC

SEQ ID NO: 115104 - protein, 239 aa, Unknown
  Bacterial polypetide isolated from the Sargasso Sea
MSEDIKKGLLGIVVDETEVSKVMPEINSLTYRGYAAQDLCEYCRFEEVAYLILNKDLPNTIQLRKFEKEEKNNRELSKDLYSILKKMPKKAHPMDVARTAVSVMGLEDKETTDSSPEANMRKAIRILAKTPTALAAFYRLRKGKTIIKPKKDLNIAENFFYMCFGKVPQKEIVKAFDVSLILYAEHSFNVSTFTARTITSSLSDIHGAITGAIASLKGPLHGGANEEVMHMMNKIKKPE

SEQ ID NO: 115105 - protein, 276 aa, Unknown
  Bacterial polypetide isolated from the Sargasso Sea
MSKEKIYIFDTTLRDGAQTEGVNFSIDEKNKIAKSLSELGVDYLEGGWPGANTLDTTFFNKPPSLGNTVLTAFGMTKKSGRSAQNDPGLSAILNSNTPAVCLVGKSWDFHVDVALGISNKENLENIKESAKLFVKNKKEFMFDAEHFFDGYKNNPEYAINCLKTAYDEGARWIVLCDTNGGTLPHEVGEIVSKVSKVIPGKNLGIHAHNDTENAVANSLIAILSGARQVQGTINGLGERCGNANLMSVIPTLVLKESFSKKFDIGIKKEKIKKLTE

SEQ ID NO: 115106 - protein, 533 aa, Unknown
  Bacterial polypetide isolated from the Sargasso Sea
MERVYIFDTTLRDGGQTKGVDFSFADKIAISEALDDLGIDYIEGGWPGANPTDDKLFGSPPKLKVSNFVAFGMTRRPNTSAANDPGLNAVLSGKSDSVCLVGKTWDFHVSKALNITLEENIDMISESINEINKRGKQALFDCEHFFDGFKNNKKFALECVRSAFEAGAKWVVLCDTNGGTLPHEITKIINEVNESIPGVPLGIHCHNDSGTAVACSLAAIEAGVRHVQGTINGLGERCGNADLIALIPNLMLKLNYETGIKKENLYKLKHLSRLIDDRLNRSPNLTQPYVGEAAFAHKGGLHASGVQKDSRSYEHVEPEIVGNQRSFVVSDQTGKSNIIARLKEVGLKFDVKDSRLDKLIENIKENEFKGFSYDTAEASFELMARRTLEKVPDYFVIGRFRVMDERRFNAKGDLVVESEASVTLNVGGQSFHEVAIGNGPVNAVDTALRKALTKIYPSLNSVSLVDYKVRIIDSGSGTEATTRVLIECEDDNGDRWRSVGLSTNIIDASVMALYDSLTWRLLSLGITPEAPAN

SEQ ID NO: 115107 - protein, 526 aa, Unknown
  Bacterial polypetide isolated from the Sargasso Sea
MDDKVYIFDTTLRDGQQTTGVNFSVSDKMIISQHLNEIGIDYIEGGWPGANPTDNDFFSRDLELNNSKLTAFGMTRRPGRSVENDPGLNSLINSSASCVCIVGKSSSFHVKNALEISKDENLKMISDSIKYIKSKNKEPIFDAEHFFDGYKEDKEFAISCIKAAYDTGARWVVLCDTNGGTLPNEIFNIVSEVVKIIPGKNIGIHAHNDTENAVANALAAVNAGARQVQGTINGLGERCGNTNLISLIPSLVLKTNFETSINKDKLKNLINISRTLDNILNLQPTKNAPYVGEHAFSHKGGLHASAVEKNSSTYEHIEPEIVGNSRNVVISNQAGRSNILNQLNKLNIELKKDEINKILENIKEKESEGYSFDTALASFELLVRRQLGHFEDYYKLEKFRVTDERRWNAKGSLVTEAEATVHLKVNKTDIMTVGIGNGPVNAIDSALRKGLIDHFPSLEDLKLTDYKVMILSSDKGTGAITRVLIESSDSTNKHWTTIGVSPNIIDASYSAIFDSITYKLFNAQKN

SEQ ID NO: 115108 - protein, 225 aa, Unknown
  Bacterial polypetide isolated from the Sargasso Sea
MKKLQGAGLRGQSAGQTSLSTVEQEGSLRYLGYSIEDLAKNASFEEVAYLLLLGHLPKKQELEEFENELASLREMPDSLVTVLESIPAEAHPMEVVRTIISYMGVIESERSFDEQLDVTKRLLGVTTTAIVYWYKFSHEGIRIEQTSHEVSVAAHFLKLLRQEEINDLHKRTLDVSLTLYAEHEFNASTFTGRVCASTLSDLHSCLTAAVGSLRGPLHGGANEEA

SEQ ID NO: 115109 - protein, 509 aa, Unknown
  Bacterial polypetide isolated from the Sargasso Sea
MSKDRLYIFDTTLRDGAQTQGVDFSIDDKEKISFSLDSLGIDYIEGGWPGANPTDTEFFNKDHKFKSAKLTAFGMTKKTEHSAENDPMLSSLINSKSSSVCLFGKSWDFQVNVALGISNSQNLLNISESAKHIVKSGKEFMFDAEHFFDGYKSNPEYAISCVKAAYDNGARWIILCDTNGGTLPHEVAKIVKEVIKYIPGKNLGIHAHNDTENAVANSLIAVQAGVRQVQGTLNGLGERCGNANLVSLIPTFFLKKDFYENYELNIKRENLKNLTQCSRLLDELLNRKPNKHLPYVGASAFSHKGGMHVSAVQKDPKTYEHVNPEEVGNSRNIVVSDQSGQSNIMSRLNLIGIKVEKSDPKIKKLLDEVKDREFIGYSYDGADASFELLARRLMGEIPRYISINEYDVSVKKDSVGEIISYAKAQLEVDGDKILCEGQGNGPVNALDNAIRKNVNKLAKYSEYLKDLRLVDYKVRILNTGTEAVTRVSIESTDSKGVNWFTIGVSPKYN

SEQ ID NO: 115110 - protein, 384 aa, Unknown
  Bacterial polypetide isolated from the Sargasso Sea
MRINKKIEILDSTLREGEQTPGVSFTKSQKIEIVKMLDDFGVDFIELGHPAVSKDIYSTIKLLNSEPLTSEKIVHARLKKSDIDDAVNLGVPWIGLFFGTSKDYLHDKYNLDEKNALEMIKESIEYAKRNGLKIRFTAEDASRTDIDFLIKIGKLAEKAGADRFSLADTVGILYPAKVSELVSALISELKIPLHMHCHNDFGLATANALQALQSGVKCVDVTINGLGERCGLPPLAEVTAALDELYKIDHSWDLKKLKLMSSYIDKITKTDNKYIRPITGKYSFSHKAGLHVNAMLKNQSSYQSMSPKKLNRRHRIIIDKYTGRKAIQYRLKHLKIEYDDQLIDNIVLEIKRNPIITNWTDKKIMQLAEKFISAKIESAKSSVL

SEQ ID NO: 115111 - protein, 373 aa, Unknown
  Bacterial polypetide isolated from the Sargasso Sea
MTKKLEGAGLRGQVAGETSLSTVGQVEGLAYRGHKIELLAEKSCFEEVAYLLLYDKLPNQKELDDYKQLLKNQRDLPDSLKLVLQKIPSSAHPMDVMRTGTSMLGNLEPEGEFSNQLNSINRMIATMPSIVTYWYKYSHEGLDIDLLNDEDSMAGHFLHILHGEKPTDLHRKVMDVSLILYAEHEFNASTFTARVCASTMSDIHSCVVAAIGSLRGPLHGGANEKAMELIENWTSKEEAKTKIIEMLGNKEKIMGFGHAVYSIRDPRNAVIKEYAKELSQLAENDTLYQVAEEVEKVMADEKKMFANADFFHAPAYFYMGIPTKLFTPIFVMSRVSGWTAHCMEQRANNRIIRPSAEYIGVESSDWVDISDRS

SEQ ID NO: 115112 - protein, 533 aa, Unknown
  Bacterial polypetide isolated from the Sargasso Sea
MSKEKIYIFDTTLRDGAQTEGVNFSIDDKNKISKSLADLGVDYLEGGWPGANTLDTTFFNKPPNLGNTILTAFGMTKRSGRSAENDPGLAAIINSNTPAVCLVGKSWDFHVEKALGITNKENLANIKESTKIFIKNKKEFMFDAEHFFDGYKNNPEYALSSIKTAYDEGARWIVLCDTNGGTLPHEVGEIVLKVAKSIPGKNLGIHAHNDTENAVGNSLTAVLSGARQIQGTINGLGERCGNANLISVIPSLVLKESFAKNFEIGISKDKMKTLTDCSRLLDEILNRKSNRHSAYVGASAFAHKGGLHVSAVTKDPKTYEHIDPNLVGNFRNIVVSDQSGKSNIMSRLEKYGIKIDKSDSKIQKLLNEVKDREFAGYSYDGADASFELLARRLLGEIPKYLTISKYDVSVKRDSKDKINSFAKAHIEVDGKEIICEGSGNGPVNALDNAIRSNVDKVGKYSKYLKDLKLVDYKVRILNTGTNATTRVSIESTDKDGKNWFTIGVSPNIIDASFKALIDSLDYKLYKEKAPAND

SEQ ID NO: 115113 - protein, 163 aa, Unknown
  Bacterial polypetide isolated from the Sargasso Sea
AIASLKGPLHGGANEEVMHMMNKIKKPEKALKWINDALDNKDVVMGFGHRVYKSGDSRVPTMRKYFGKVAKIKKDKKFEKIYDIVEKVMIDRKNIHPNVDYPTGPTYHLMGFDTDFFTPIFVTSRITGWSAHIMEQHAANKLIRPLSKYSGPKHRKVLQLNQR

SEQ ID NO: 115114 - protein, 272 aa, Unknown
  Bacterial polypetide isolated from the Sargasso Sea
MSDEVKKGLLGIVVDETQVSKVMPEINSLTYRGYAVQDLCEMCRFEEAAYLILNGDLPNTIQLRKFEKEERFNRDLSKNLNDIIKHMPKKSHPMDVARTAVSVMGLEDKETNNNSPEANMRKAMRIFAKTPTALAAFYRIRKGKKIIKPKKNLTFAENFFYMCFGKVPNKEIVKAFDVSLILYAEHSFNVSTFTARTITSSLSDIHGAITGAIASLKGPLHGGANEEVMHMMNKIKKPENALKWINNALDKKEVVMGFGHRVYKSGDSRVPT

SEQ ID NO: 115115 - protein, 255 aa, Unknown
  Bacterial polypetide isolated from the Sargasso Sea
MRKALRIFAKTPTALAAFYRIRKGKKIIKPKKNLTFAENFFYMCFGKVPQKEIVKAFDVSLILYAEHSFNVSTFTARTITSSLSDIHGAITGAIASLKGPLHGGANEEVMHMMNKIKKPENALKWINSALKNKEVVMGFGHRVYKSGDSRVPTMRKYFGKVAKLKKDKKFEKIYDIVERVMIKKKNIYPNVDYPTGPTYHLMGFDTDFFTPIFVISRITGWSAHIMEQHAANKLIRPLAKYKGSKHRKVMELNYR

SEQ ID NO: 115116 - protein, 271 aa, Unknown
  Bacterial polypetide isolated from the Sargasso Sea
MGLEDKDTTNNSPEANMRKAMRIFAKTPTALAAFYRIRKGKKIIKPKKNLSFAENFFHMCFGKVPNKEIVKAFDVSLILYAEHSFNVSTFTARTITSSLSDIHGAITGAIASLKGPLHGGANEEVMHMMNKIKKPENALKWINNALSKKEVVMGFGHRVYKSGDSRVPTMEKYFKNVSKIKSDKKFIKIYNIVKKVMIDKKNIHPNVDYPTGPTYHLMGFDTDFFTPIFVTSRITGWSAHIMEQHAANKLIRPLSKYSGQKHRKVMLLNQR

SEQ ID NO: 115117 - protein, 269 aa, Unknown
  Bacterial polypetide isolated from the Sargasso Sea
MSDDIKKGLLGIVVDETEVSKVMPEINSLTYRGYAAQDLCEYCRFEEVAYLILNKDLPNTIQLRQFEKEEKNNRELTKNLYEIIKHMPKRSHPMDVARTAVSVMGLEDKETTDSSPEANMRKALRIFAKTPTALAAFYRIRKGKKIIKPKKTLTFAENFFYMCFGKVPQKEIVKAFDVSLILYAEHSFNVSTFTARTITSSLSDIHGAITGAIASLKGPLHGGANEEVMHMMNKIKKPGNALKWINNALKNKQVVMGFGHRVYKSGDSR

SEQ ID NO: 115118 - protein, 329 aa, Unknown
  Bacterial polypetide isolated from the Sargasso Sea
MPEINLLTYRGYAAQDLCEYCRFEEVAYLILNKDLPNTIELRKFEKEEKNNRELSKNLYEIIKHMPKKSHPMDVARTAVSVMGLEDKETQDSSPEANMRKALRIFAKTPTALAAFYRIRKGKKIIKPKKTLTFAENFFYMCFGKVPQKEIVKAFDVSLILYAEHSFNVSTFTARTITSSLSDIHGAITGAIASLKGPLHGGANEEVMHMMNKIKKPENALKWINNALKNKEVVMGFGHRVYKSGDSRVPTMRQYFGKVAKLKKDKKFEKIYDIVEKVMIKEKNIHPNVDYPTGPTYHLMGFDTDFFTPNICYFKNNWLVSSYNGTTMLL

SEQ ID NO: 115119 - protein, 241 aa, Unknown
  Bacterial polypetide isolated from the Sargasso Sea
IAAFFRARKGKNVIPPKKNLSFSENFFYMCFGKVPSKEIVKAFDVSLILYAEHSFNVSTFTARTITSSLSDIHGAITGAIASLKGPLHGGANEEVMHMMNKIKKPENALKWINKTLDKKEVVMGFGHRVYKKGDSRVPTMEKYFKKVSKVKSDKKFIKIYEIVKKVMIDRKNIHPNVDYPTGPTYHLMGFDTDFFTPIFVISRITGWSAHIMEQHAANKLIRPLSKYSGPDHRKVMLLNQR

SEQ ID NO: 115120 - protein, 176 aa, Unknown
  Bacterial polypetide isolated from the Sargasso Sea
TSSLSDIHGAITGAIASLKGPLHGGANEEVMHMMNKIKKPENALKWINNALDNKEVVMGFGHRVYKSGDSRVPTMRKYFGKVAKIKKDKKFEKIYEIVQKVMIERKNIHPNVDYPTGPTYHLMGFDTDFFTPIFVISRITGWSAHIMEQHAANKLIRPLASYKGSKHRKVLELNQR

SEQ ID NO: 115121 - protein, 253 aa, Unknown
  Bacterial polypetide isolated from the Sargasso Sea
KVMRIFAKMPVALAAFYRARKGKKIIPPKSKLSFSENFFHMCFGKVPNKDIVKAFDVSLILYAEHSFNVSTFTARTITSSLSDIHGAITGAIASLKGPLHGGANEEVMHMMNKIKKPENALKWINKALDNKDVVMGFGHRVYKSGDSRVPTMREYFGKVAKIKKDKKFEKIYDIVEKVMIDRKNIHPNVDYPTGPTYHLMGFDTDFFTPIFVISRITGWSAHIIEQHAANKLIRPLASYKGNKHRRVLQLNQR

SEQ ID NO: 115122 - protein, 180 aa, Unknown
  Bacterial polypetide isolated from the Sargasso Sea
ARTITSSLSDIHGAITGAIASLKGPLHGGANEEVMHMMDKIKKPENALKWINKSLKNKDVVMGFGHRVYKKGDSRVPTMEKYFRKVSSIKKDRKFIKIYDIVKNVMIEKKNIHPNVDYPTGPTYHLMGFDTDFFTPIFVISRITGWSAHIMEQHAANKLIRPLSKYSGAKHRKVMLLNQR

SEQ ID NO: 115123 - protein, 281 aa, Unknown
  Bacterial polypetide isolated from the Sargasso Sea
MDVARTAVSVMGLEDREVTNNSQEANMRKAMRIFSKTPTALAAFYRLRKGKKIISPKKKLSFAENFFHMCFGKVPNKDIVKAFDVSLILYAEHSFNVSTFTARTITSSLSDIHGAITGAIASLKGPLHGGANEEVMHMMKKIKKPENAKKWINNALDKKAVVMGFGHRVYKNGDSRVPTMREYFGKVAKIKKDKTFEKIYDIVEEVMIERKNIHPNVDYPTGPTYHLMGFDTDFFTPIFVISRITGWSAHIMEQHSANKLIRPLAAYNGNKYRKVSEIKDR

SEQ ID NO: 115124 - protein, 281 aa, Unknown
  Bacterial polypetide isolated from the Sargasso Sea
MDVARTAVSLMALEDKETKDNSPKANMRKAIRIFSKTPIALAAFFRARKGKKIISPKKNLSFSENFFYMCFGKVPSKEIVKAFDVSLILYAEHSFNVSTFTARTITSSLSDIHGAITGAIASLKGPLHGGANEEVMHMMNKIKKPENALKWINKALKNKDVVMGFGHRVYKRGDSRVPTMEKYFKKVSSIKKDKKFIRIYDIVKNVMIERKNIHPNVDYPTGPTYHLMGFDTDFFTPIFVISRITGWSAHIMEQHAANKLIRPLSKYSGAKHRKVMLLNQR

SEQ ID NO: 115125 - protein, 264 aa, Unknown
  Bacterial polypetide isolated from the Sargasso Sea
TIQLRKFEKEEKNNRELSKDLYSILKKMPRKSHPMDVARTAVSIMGLEDKETTDSSAEANMRKAVRILAKTPTALAAFYRLRKGKKIIKPKKNLNIAENFFYMCFGKVPQKEIVKAFDVSLILYAEHSFNVSTFTARTITSSLSDIHGAITGAIASLKGPLHGGANEEVMHMMNKIKSPNNALKWINSALDNKEVVMGFGHRVYKSGDSRVPTMRKYFAKVAKIKKDKKFEKIYDIVEKVMIDRKNIYPKCRLSDRPHISFNGF

SEQ ID NO: 115126 - protein, 238 aa, Unknown
  Bacterial polypetide isolated from the Sargasso Sea
NLYEIIKHMPKKSHPMDVARTAVSVMGLEDKETSNSTPEANMRKALRISAKTPTALAAFYRIRSGKKIIKPKKNLTFAENFFYMCFGKVPQKEIVKAFDVSLILYAEHSFNVSTFTARTITSSLSDIHGAITGAIASLKGPLHGGANEEVMHMMNRIKKPENALKWINNALKNKEVVMGFGHRVYKSGDSRVPTMRNYFGKVAKLKKDKKFEKIYDIVEKVMIKKKNIHPNVDYPTGP

SEQ ID NO: 115127 - protein, 278 aa, Unknown
  Bacterial polypetide isolated from the Sargasso Sea
MSDEIKKGLLGIVVDETEVSKVMPEINSLTYRGYAAQDLCEYCKFEEVAYLILNKDLPNTIELRKFEKEERNNRDLSKDLYSILKKMPKKSHPMDVARTAVSIMGLEDKETINSSPEANMRKAIRILAKTPTALAAFYRLRKGKNIIKPKKNLNIAENFFYMCFGKVPQKEIVKAFDVSLILYAEHSFNVSTFTARTITSSLSDIHGAITGAIASLKGPLHGGANEEVMHMMNKIKSPNNALKWINNALDKKEVVMGFGHRVYKSGDSRVPDMRKYFG

SEQ ID NO: 115128 - protein, 294 aa, Unknown
  Bacterial polypetide isolated from the Sargasso Sea
IKKGLLGIVVDETQVSKVMPEINSLTYRGYAVQDLCEMCKFEEAAYLILNGDLPNSIQLKKFENEEKSNRELTKNLSEIIKHMPKKSHPMDVARTAVSVMGLEDKDTSNNTPEANMRKAMRIFAKTPTALAAFYRIRKGKKIIKPKKKLSFAENFFYMCFGKVPNKEIVKAFDVSLILYAEHSFNVSTFTARTITSSLSDIHGAITGAIASLKGPLHGGANEEVMHMMEKIKKPENALKWINNALDKKEVVMGFGHRVYKSGDSRVPTMKKYFKNVAKIKKDKKFSKIYDIVKE

SEQ ID NO: 115129 - protein, 213 aa, Unknown
  Bacterial polypetide isolated from the Sargasso Sea
MCFGKVPSKEIVKAFDVSLILYAEHSFNVSTFTARTITSSLSDIHGAITGAIASLKGPLHGGANEEVMHMMSKIKKPENALKWINKALKNKDVVMGFGHRVYKRGDSRVPTMEKYFKKVASIKKDKKFIKIYDIVKNVMIERKNIHPNVDYPTGPTYHLMGFDTDFFTPIFVISRITGWSAHIMEQHAANKLIRPLSKYSGAKHRKVMLLNQR

SEQ ID NO: 115130 - protein, 277 aa, Unknown
  Bacterial polypetide isolated from the Sargasso Sea
MPEINSLTYRGYAAQDLCAKCKFEEVAYLILNGELPNKKQLKNFEKDESKERKLSKSLINAIKSIPKTAHPMDVARTAVSIMGLEDKDTRDNSPKANLRKVMRIFAKTPVALAAFYRTRKGKKIIPPKNNLSFSENFFHMCFGKVPNKDIVKAFDVSLILYAEHSFNVSTFTARTITSSLSDIHGAITGAIASLKGPLHGGANEEVMHMMNKIKKPENALKWINMALDNKDVVMGFGHRVYKSGDSRVPTMREYFGKVAKIKKDKKFEKIYDIVEKV

SEQ ID NO: 115131 - protein, 287 aa, Unknown
  Bacterial polypetide isolated from the Sargasso Sea
SKESSPYGCCKNCRKYYGLKDNETKDNSSKANMRKVMRIFAKMPVALAAFYRARKGKKIIPPKKNLSFSENFFHMCFGKVPNKDIVKAFDVSLILYAEHSFNVSTFTARTITSSLSDIHGAITGAIASLKGPLHGGANEEVMHMMNKIKKPENALKWINKALNNKDVIMGFGHRVYKSGDSRVPTMREYFGKVAKIKKDKKFEKIYDIVEKVMIDRKNIHPNVDYPTGPTYHLMGFDTDFFTPIFVISRITGWSAHIIEQHAANKLIRPLASYKGSKHRKVLQLNQR

SEQ ID NO: 115132 - protein, 196 aa, Unknown
  Bacterial polypetide isolated from the Sargasso Sea
IFILYAEHSFNVSTFTARTITSSLSDIHGAITGAIASLKGPLHGGANEEVMHMMNKIKKPENALKWINNALKNKEVVMGFGHRVYKSGDSRVPTMRKYFGKVAKLKKDKKFEKIYDIVEKVMIKKKNIYPNVDYPTGPTYHLMGFETDFFTPIFVISRITGWSAHIMEQHAANKLIRPLASYKGNKHRKVMQLNQR

SEQ ID NO: 115133 - protein, 282 aa, Unknown
  Bacterial polypetide isolated from the Sargasso Sea
KKMPKKSHPMDVARTAVSIMGLEDKETVDSTPESNMRKTIRILAKTPTALAAFYRLRKGKKIIKPKKNLNIAENFFYMCFGKVPQKEIVKAFDVSLILYAEHSFNVSTFTARTITSSLSDIHGAITGAIASLKGPLHGGANEEVMHMMNKIKTPKNALKWINNALDNKDVIMGFGHRVYKSGDSRVPTMRKYFAKVAKIKKDKKFEKIYDIVEKVMIERKNIHPNVDYPTGPTYHLMGFDTDFFTPIFVISRITGWSAHIFEQHAANKLIRPLASYKGNQHR

SEQ ID NO: 115134 - protein, 220 aa, Unknown
  Bacterial polypetide isolated from the Sargasso Sea
MAENFFYMCFGKVPQKEIVKAFDVSLILYAEHSFNVSTFTARTITSSLSDIHGAITGAIASLKGPLHGGANEEVMHMMNKIKKPENALKWINKALDNKDVVMGFGHRVYKSGDSRVPTMRKYFSKVAKIKKDKKFEKIYDIVEKVMIERKNIHPNVDYPTGPTYHLMGFDTDFFTPIFVISRITGWSAHIMEQHAANKLIRPLASYKGNQHRKVVQLNQR

SEQ ID NO: 115135 - protein, 317 aa, Unknown
  Bacterial polypetide isolated from the Sargasso Sea
AQDLCAKCKFEEVAYLILNGELPNKKQLKEFEKQERSERKLSKTLLDDIKKFPKKAHPMDVARTTVSIMGLEDKETKDNSPKANMRKVMRIFAKTPVALAAFYRSRKGKKIISPNKKLSFSENFFHMCFGKIPNKDIVKAFDVSLILYAEHSFNVSTFTARTITSSLSDIHGSITGAIASLKGPLHGGANEEVMHMMNKIKKPENALRWINNALDKKEVVMGFGHRVYKSGDSRVPTMREYFGKVAKIKKDKKFEKIYDIVEKVMIERKNIHPNVDYPTGPTYHLMGFDTDFFTPIFVISRITGWSAHIIEQYAANN

SEQ ID NO: 115136 - protein, 300 aa, Unknown
  Bacterial polypetide isolated from the Sargasso Sea
LGIVVDETTISQVMPDINSLTYRGYAVQDLCEKCNFEEVAYLVLNGELPNKSELKKFKNQLKKNRNISINLREIVRHMPKKSHPMDVARTIVSVLGLEDKETTDNSHKANMRKVIRIFAKTPTAIAAFFRARKGKKIIPPKRNLSFAENFFYMCFGKVPSKDIVKAFDVSLILYAEHSFNVSTFTARTITSSLSDIHGAITGAIASLKGPLHGGANEEVMHMMNKIKKPENAFKWINKALDKKEVVMGFGHRVYKKGDSRVPTMEKYFKKVSKIQKDKKFIKIYDVVKSVMIERKTFILM

SEQ ID NO: 115137 - protein, 297 aa, Unknown
  Bacterial polypetide isolated from the Sargasso Sea
YAAQDLCEYCKFEEVAYLILNKDLPNSIELRKFEKEERNNRDLSKDLYSFIKKMPKKSHPMDVARTAVSIMGLEDKETTDSSPEANMRKAVRILAKTPTALAAFYRIRKGKNIIKPKKNLNMSENFFHMCFGKVPQKEIVKAFDVSLILYAEHSFNVSTFTARTITSSLSDIHGAITGAIASLKGPLHGGANEEVMHMMNKIKSPKNALNWINNALAKKEVVMGFGHRVYKSGDSRVPTMRKYFAKVAKIKKDKKFEKIYDIVERVMIDKKNIHPNVDYPTGPTYHLMGFDTEFFYT

SEQ ID NO: 115138 - protein, 266 aa, Unknown
  Bacterial polypetide isolated from the Sargasso Sea
RGYAVQDLCEMCRFEEAAYLILNGDLPNSIQLKKFEKLERSNRDLTKNLSEIIKHMPKKSHPMDVARTAVSVMGLEDKETTDNSPESNMRKAMRIFSKTPTALAAFYRIRKGKKIIKPKKNLTFAENFFYMCFGKVPNKEIVKAFDVSLILYAEHSFNVSTFTARTITSSLSDIHGAITGAIASLKGPLHGGANEEVMHMMNKIKKPENALKWINNALNNKEVVMGFGHRVYKSGDSRVPTMKAYFKKVAKIKKDKKFSKIYDIVE

SEQ ID NO: 115139 - protein, 218 aa, Unknown
  Bacterial polypetide isolated from the Sargasso Sea
EKLCHTKASNIATTVFNTTLILYAEHEFNASTFVARTVTSTGSDMHSGVTAAIGALKGPLHGGANEKVLHQLMDIGVPENIEPWLARKLNDHEVIMGFGHRVYKTGDIRAALLGDACHRLIYSDSTYEKHQKLEKLAYKLEQLMLEKKELRPNLDWPAARIYHALGLPINLFTPLFVVARVSGWTSHIIEQMGNNRLIRPLAKYVGQAPRPYVSIEDR

SEQ ID NO: 115140 - protein, 281 aa, Unknown
  Bacterial polypetide isolated from the Sargasso Sea
MDVARTAVSLMALDDKETKDNSPKANMRKAIRIFSKTPIALAAFFRARKGKKIISPKKNLSFSENFFYMCFGKIPDKEIVKAFDVSLILYAEHSFNVSTFTARTITSSLSDIHGAITGAIASLKGPLHGGANEEVMHMMNKIKKPEKALKWINKALDNKDVVMGFGHRVYKKGDSRVPTMEKYFRKVAFLKNDKKFIKIYDIVKNVMIERKNIHPNVDYPTGPTYHLMGFDTDFFTPIFVISRITGWSAHIMEQHAANKLIRPLSKYSGAKHRKVMLLNQR

SEQ ID NO: 115141 - protein, 271 aa, Unknown
  Bacterial polypetide isolated from the Sargasso Sea
MGLEDKETKDNSPKANMKKVMRIFAKTPTALAAFYRLRKGKKIISPKSNLSFSENFFYMCFGKVPNKEIVKAFDVSLILYAEHSFNVSTFTARTITSSLSDIHGAITGAIASLKGPLHGGANEEVMHMMNKIKKPENALKWINNALDKKAVVMGFGHRVYKSGDSRVPTMREYFAKVAKVKKDKKFEKIYDIVEKVMIDRKNIYPNVDYPTGPTYHLMGFDTDFFTPIFVISRITGWSAHILEQHAANKLIRPLASYKGSSYRKVVPLNQR

SEQ ID NO: 115142 - protein, 290 aa, Unknown
  Bacterial polypetide isolated from the Sargasso Sea
MSDEIKKGLLGIVVDETEVSKVMPEINSLTYRGYAAQDLCAKCKFEEVAYLILNGELPSKKQLKKFEKEEKKERKLSKTLLEDIKKFPKKAHPMDVARTAVSIMGLEDKETKDNSSKANMRKVMRIFAKMPVALAAFYRARKGKKIIAPKKNLSFSENFFHMCFGKVPNKDIVKAFDVSLILYAEHSFNVSTFTARTITSSLSDIHGAITGAIASLKGPLHGGANEEVMHMMNKIKKPENALKWINKALDNKDVVMGFGHRVYKSGDSRVPTMREYFGKVAKIKKDKKFE

SEQ ID NO: 115143 - protein, 282 aa, Unknown
  Bacterial polypetide isolated from the Sargasso Sea
MGELPTKKQLKKFENEEKKERKLSKTLLDDIKRFPKKAHPMDVARTVVSIMGLEDKETKDNSPKANMRKVMRIFAKTPVALAAFYRARKGKKIIPPKKNLSFSENFFQMCFGKVPDKDIVKAFDVSLILYAEHSFNVSTFTARTITSSLSDIHGAITGAIASLKGPLHGGANEEVMHMMNKIKKPENALKWINKALDNKDVVMGFGHRVYKSGDSRVPTMREYFGKVARIKKDKKFEKIYDIVEKVMIDRKNIYPNVDYPTGPMYHLMGFDTDFFTPIFVIS

SEQ ID NO: 115144 - protein, 227 aa, Unknown
  Bacterial polypetide isolated from the Sargasso Sea
KPKKNLSFAENFFYMCFGKVPNKEIVKAFDVSLILYAEHSFNVSTFTARTITSSLSDIHGAITGAIASLKGPLHGGANEEVMNMMNKIKKPENALKWINNALDKKDVVMGFGHRVYKSGDSRVPTMRDYFKRVAKIKKDKKFSKIYDIVEKVMIERKNIHPNVDYPTGPTYHLMGFDTDFFTPIFVTSRITGWSAHIMEQHAANKLIRPLSKYSGPKHRKVMLLNQR

SEQ ID NO: 115145 - protein, 292 aa, Unknown
  Bacterial polypetide isolated from the Sargasso Sea
SQVMPDINSLTYRGYAVQDLCEKCSFEEVAYLILNKELPNKTKLKKFKKELEENRNITINLREIVKHMPKKAHPMDVARTVVSVMGLEDKDTSNNSPAANMRKAIRIFAKTPTAIAAFFRARRSKNVIPAKKGLGFSENFFYMCFGKIPSKEIIKAFDVSLILYAEHSFNVSTFTARTITSSLSDIHSAITGAIGSLKGPLHGGANEEVMHMMDKIKKPENALNWINKSLNNKEVVMGFGHRVYKKGDSRVPTMEKYFKKVAKNKNDKKLHKIYDLVKNVMIKRKNIHPNVD

SEQ ID NO: 115146 - protein, 308 aa, Unknown
  Bacterial polypetide isolated from the Sargasso Sea
AAQDLCAKCKFEEVAYLILNGELPDKKQLRKFEKQERKERKLSKTLLEDIKKFPKKAHPMDVARTAVSIMGLEDKETKDNSPKANMRKVMRIFAKMPVALAAFYRSRKGKKIIPPKSNLSFSENFFHMCFGKVPNKDIVKAFDVSLILYAEHSFNVSTFTARTITSSLSDIHGAITGAIASLKGPLHGGANEEVMHMMNKIKKPENALKWINKALDNKDVVMGFGHRVYKSGDSRVPTMREYFGKVAKIKKDKKFEKIYDIIEKVMIERKNIHPNVDYPTGPTYHLMGFDTDFFTPIFVISRITGWSA

SEQ ID NO: 115147 - protein, 225 aa, Unknown
  Bacterial polypetide isolated from the Sargasso Sea
KKNLSFSENFFHMCFGKVPNKDIVKAFDVSLILYAEHSFNVSTFTARTITSSLSDIHGAITGAIASLKGPLHGGANEEVMHMMNKIKKPEKAHKWINKALDNKDVIMGFGHRVYKSGDSRVPTMREYFGKVAKIKKDKKFERIYDIVEKVMIDRKNIHPNVDYPTGPTYHLMGFDTDFFTPIFVISRITGWSAHIMEQHAANKLIRPLASYKGSKYRKVVQLNQR

SEQ ID NO: 115148 - protein, 283 aa, Unknown
  Bacterial polypetide isolated from the Sargasso Sea
KKGLLGIVVDETEVSKVMPEINSLTYRGYAAQDLCEYCRFEEVAYLILNKDLPNSIELKNFEKEERNNRELTKNLYEIIKHMPKRSHPMDVARTAVSVMGLEDKETTDSSPEANMRKALRIFAKTPTALAAFYRIRKGKKIIKPKKNLTFAENFFYMCFGNVPQKEIVKAFDVSLILYAEHSFNVSTFTARTITSSLSDIHGAITGAIASLKGPLHGGANEEVMHMMSKIKKPENALKWINSALKNKEVVMGFGHRVYKSGDSRVPTMRKYFGKVAKLKKDKK

SEQ ID NO: 115149 - protein, 294 aa, Unknown
  Bacterial polypetide isolated from the Sargasso Sea
MSDEIKKGLLGIVVDETTFSQVMPDINSLTYRGYAVQDLCSKCNFEEVAYLVLNGELPNKKQLKAFIKEERSDRKLSKEILSDIKKMPKKAHPMDVARTAVSLMALEDKETKDNSPKANMRKAIRIFSKTPIALAAFFRARKGKKMIAPKKNLSFSENFFYMCFGKVPSKEIVKAFDVSLILYAEHSFNVSTFTARTITSSLSDIHGAITGAIASLKGPLHGGANEEVMHMMNKIKKPENALKWINKALKNKDVVMGFGHRVYKKGDSRVPTMEKYFKKVASIKKDKKFIKIYD

SEQ ID NO: 115150 - protein, 111 aa, Unknown
  Bacterial polypetide isolated from the Sargasso Sea
IVKAFDVSLILYAEHSFNVSTFTARTITSSLSDIHGAITGAIASLKGPLHGGANEEVMHMMKKIKKPENADKWINNALNKKAVVMGFGHRVYKSGDSRVPTMREYFGKVAK

SEQ ID NO: 115151 - protein, 176 aa, Unknown
  Bacterial polypetide isolated from the Sargasso Sea
TSSLSDIHGAITGAIASFKGPLHGGANEEVMHMMNKIKKPENALKWINKALDNKDVVMGFGHRVYKSGDSRVPTMRKYFAKVAKIKKDKKFEKIYDIIEKVMIERKNIHPNVDYPTGPTYHLMGFDTDFFTPIFVISRITGWSAHIMEQHAANKLIRPLASYKGNQHRKVVQLNQR

SEQ ID NO: 115152 - protein, 219 aa, Unknown
  Bacterial polypetide isolated from the Sargasso Sea
MKLFLYVGFGKVPNKEIVKAFDVSLILYAEHSFNVSTFTARTITSSLSDIHGAITGAIASLKGPLHGGANEEVMHMMNKIKNPKNAHSWINKALDKKEVVMGFGHRVYKSGDSRVPTMREYFGKVAKIKKDKKFEKIYDIVEKVMIKRKNIHPNVDYPTGPTYHLMGFDTDFFTPIFVISRITGWSAHIMEQYAANKLIRPLAKYKGNQHRKVINLNQR

SEQ ID NO: 115153 - protein, 266 aa, Unknown
  Bacterial polypetide isolated from the Sargasso Sea
MSDDIKKGLLGIVVDETEVSKVMPEINSLTYRGYAAQDLCEYCRFEEVAYLILNKDLPNTLELRKFEKEEKNNRELSKDLYSILKKMPKKSHPMDVARTAVSIMGLEDKETVDSSPESNMRKTIRILAKTPTALAAFYRLRKGKKIIKPKKNLSIAENFFYMCFGKVPQKEIVKAFDVSLILYAEHSFNVSTFTARTITSSLSDIHGAITGAIASLKGPLHGGANEEVMHMMNKIKTPNNALKWINNALNNKEVVMGFGHRVYKSG

SEQ ID NO: 115154 - protein, 249 aa, Unknown
  Bacterial polypetide isolated from the Sargasso Sea
IFSKMPTAIAAFFRVRKGKKIIPPKKNLSFAENFFYMCFGNVPSKDIVKAFDVSLILYAEHSFNVSTFTARTITSSLSDIHGAITGAIASLKGPLHGGANEEVMHMMKKIKEPKNALKWINNTLDKKEVVMGFGHRVYKKGDSRVPTMEKYFRKVSKIKKDTKFHKIYDVVKNVMIKRKDIYPNVDYPTGPTYHLMGFDTDFFTPIFVISRITGWAAHIMEQHAANKLIRPLSKYSGPDHRRVMLLNQR

SEQ ID NO: 115155 - protein, 248 aa, Unknown
  Bacterial polypetide isolated from the Sargasso Sea
MDSKKLILKPGLEGVPVTNSSICDIDGKKGKLLYRGYSIEELSKKSSFLETAYLLIWGELPTAIQLRDFEQEVQMHRRLSFRVRDMMKCFPATGHPMDALQSSAASLGLFYSRRAIDDPNYIYNAVIRLIAKIPTMIAAFQLIRKGQDPIQPRDDLTYSSNFLYMLTEKEQDPIAAKVFDRCLILHAEHSLNASTFSARVTASTLTDPYAVIASAVGTLAGPLHGGANEDVIAMLEEIKTPKNAASFL

SEQ ID NO: 115156 - protein, 265 aa, Unknown
  Bacterial polypetide isolated from the Sargasso Sea
CEYCKFEEVAYLILNKDLPNTIQLKKFEKEERNNRDLSKELYAAIKSMPKKSHPMDVARTAVSIMGLEDKETGDSSPEANMRKAIRILAKTPTALAAFYRLRKGKKIIKPKKSLNMAENFFYMCFNKIPQKEIVKAFDVSLILYAEHSFNVSTFTARTITSSLSDIHGAITGAIASLKGPLHGGANEEVMHMMNKIKKPENALKWINKALDNKDVVMGFGHRVYKSGDSRVPTMREYFGKVAKIKKDKKFEKIYDIVEKVMINRK

SEQ ID NO: 115157 - protein, 307 aa, Unknown
  Bacterial polypetide isolated from the Sargasso Sea
KVERKERKLSKTLLESIKNFLKKSHPMDVARTAVSIMGLEDKETKDNSPEANLRKVMRIFAKTPVALAAFYRIRKGKKIIKPKNNLTFSENFFYMCFGKVPEKEIVKAFDVSLILYAEHSFNVSTFTARTITSSLSDIHGAITGAIASLKGPLHGGANEEVMHMMNKIKKPENALNWINNALDQKTVVMGFGHRVYKSGDSRVPTMREYFSKVAKVKKDKKFEKIYDIVEKVMIERKNIHPNVDYPTGPTYHLMGFDTDFFTPIFVISRITGWSAHILEQHAANKLIRPLASYKGNSYRKVVPINQR

SEQ ID NO: 115158 - protein, 163 aa, Unknown
  Bacterial polypetide isolated from the Sargasso Sea
AIASLKGPLHGGANEEVMHMMNKIKKPENALKWINNALKNKEVVMGFGHRVYKSGDSRVPTMRKYFGKVARLKKDKKFEKIYDIVEKVMIKKKNIYPNVDYPTGPTYHLMGFDTDFFTPIFVISRITGWSAHIMEQHAANKLIRPLASYKGSKHRKVMQLNQR

SEQ ID NO: 115159 - protein, 240 aa, Unknown
  Bacterial polypetide isolated from the Sargasso Sea
AAFYRIRKGGKIIKPKKNLNIAENFFYMCFGKVPQKEIVKAFDVSLILYAEHSFNVSTFTARTITSSLSDIHGAITGAIASLKGPLHGGANEEVMHMMNKIQKPENALKWINNALKNKEVVMGFGHRVYKSGDSRVPTMRKYFAKVAKIKKGKKFEKIYDIVEKVMIERKNIYPNVDYPTGPTYHLMGFDTDFFTPIFVISRITGWSAHIMEQHAANKLIRPLASYKGSQHRKVVQLNQR

SEQ ID NO: 115160 - protein, 196 aa, Unknown
  Bacterial polypetide isolated from the Sargasso Sea
SLILYAEHSFNVSTFTARTITSSLSDIHGAITGAIASLKGPLHGGANEEVMHMMNKIKKPENALKWINNALKNKEVVMGFGHRVYKSGDSRVPTMREYFGKVAKIKKDKKFEKIYDIVEKVMIKEKNIYPNVDYPTGPTYHLMGFDTDFFTPIFVISRITGWSAHIMEQHAANKLIRPLASYKGNKHRKVLQLNQR

SEQ ID NO: 115161 - protein, 293 aa, Unknown
  Bacterial polypetide isolated from the Sargasso Sea
MNDEIKKGLLGIVVDETTISQVMPDINSLTYRGYAVQDLCEKCSFEEVAYLVLNGDLPNKNQLKKFLKEERKNRILSKQILNDIKKMPKKAHPMDVVRTAVSLMALEDKDTKDNSPKANMKKAVRIFSKTPTALAAFFRSRKGKKIISPKKNTSFSENFFHMCFGKIPNKDIVRAFDISLILYAEHSFNVSTFTARTITSSLSDIHGAITGAIASLKGPLHGGANEEVMHMMNKVKKPENAFKWINKALDKKEVVMGFGHRVYKKGDSRVPTMEKYFKKVAKIKNDKKFIKIY

SEQ ID NO: 115162 - protein, 243 aa, Unknown
  Bacterial polypetide isolated from the Sargasso Sea
NKKQLKNFIKEERLDRKLSKEILSDIRKMPKKAHPMDVVRTAVSLMSLEDKETRDNSPKANMRKAIRIFAKTPIALAAFFRSRKGKKILAPKKNLSFSENFFYMCFGKVPKKEIVKAFDVSLILYAEHSFNVSTFTARTITSSLSDIHGAITGAIASLKGPLHGGANEEVMHMMSKIKKPKNALKWINKALDKKDVVMGFGHRVYKKGDSRVPTMEKYFKKVASIKNDKKFIKIYDIVKNVMI

SEQ ID NO: 115163 - protein, 278 aa, Unknown
  Bacterial polypetide isolated from the Sargasso Sea
RGYAAQDLCEYCRFEEVAYLILNKDLPNTIQLRKFEKEEKNNRELSKDLYSVIKKMPKKSHPMDVARTAVSIMGLEDKETTDSSPEANMRKAIRILAKTPTALAAFYRIRKGKKIIKPKKNLNIAENFFYMCFGKVPQKEIVKAFDVSLILYAEHSFNVSTFTARTITSSLSDIHGAITGAIASLKGPLHGGANEEVMHMMNRIKDPKNALKWINDALDNKDVVMGFGHRVYKSGDSRVPTMRKYFAKVAKIKKDKKFEKIYDIVEKVMIERKNIHPN

SEQ ID NO: 115164 - protein, 218 aa, Unknown
  Bacterial polypetide isolated from the Sargasso Sea
ENFFYMCFGKVPSKEIVKAFDVSLILYAEHSFNVSTFTARTITSSLSDIHGAITGAIASLKGPLHGGANEEVMHMMNKIKKPENALKWINKALKNKDVVMGFGHRVYKKGDSRVPTMEKYFKKVASIKKDKKFMKIYDIVKNVMIERKNIHPNVDYPTGPTYHLMGFDTDFFTPIFVISRITGWSAHIMEQHAANKLIRPLSKYSGAKHRKVMLLNQR

SEQ ID NO: 115165 - protein, 159 aa, Unknown
  Bacterial polypetide isolated from the Sargasso Sea
EANMRKAMRIFAKTPTALAAFYRIRKGKKIIKPKKNLTFSENFFYMCFGKVPSKEIVKAFDVSLILYAEHSFNVSTFTARTITSSLSDIHGAITGAIASLKGPLHGGANEEVMHMMNKIKKPENALKWINNALDNKDVVMGFGHRVYKSGDSRVPTMKE

SEQ ID NO: 115166 - protein, 291 aa, Unknown
  Bacterial polypetide isolated from the Sargasso Sea
MSDDIKKGLLGIVVDETEVSKVMPEINSLTYRGYAAQDLCEYCRFEEVAYLILNKDLPNTIQLRKFEKEERNNRELTKNLYEIIKHMPKKSHPMDVARTAVSVMGLEDKETTDSSPEANMRKALRIFAKTPTALAAFYRIRKGKKIIKPKKTLTFAENFFYMCFGKVPQKEIIKAFDVSLILYAEHSFNVSTFTARTITSSLSDIHGAITGAIASLKGPLHGGANEEVMHMMSKIKKPENALKWINNALKNKEVVMGFGHRVYKSGDSRVPTMRKYFGKVAKIKKDKKLKK

SEQ ID NO: 115167 - protein, 227 aa, Unknown
  Bacterial polypetide isolated from the Sargasso Sea
SSKKNLSFSENFFHMCFGKVPNKDIVKAFDVSLILYAEHSFNVSTFTARTITSSLSDIHGAITGAIASLKGPLHGGANEEVMHMMNKIKKPEKALKWINKALDNKDVIMGFGHRVYKSGDSRVPTMREYFGKVAKIKKDKKFEKIYDIVEKVMIDRKNIHPNVDYPTGPTYHLMGFDTDFFTPIFVISRITGWSAHIMEQHAANKLIRPLASYKGSKYRKVVQLNQR

SEQ ID NO: 115168 - protein, 283 aa, Unknown
  Bacterial polypetide isolated from the Sargasso Sea
KERTLSKSLINIIKQMPRKSHPMDVARTAVSVMGLEDKEVTNNSPKANLRKAMRIFSKTPTALAAFYRLRKGKKIIAPKKKFTFAENFFYMCFGKVPNKEIVKAFDVSLILYAEHSFNVSTFTARTITSSLSDIHGAITGAIASLKGPLHGGANEEVMHMMKKIKKPENADKWINNALNKKAVVMGFGHRVYKSGDSRVPTMREYFGKVAKIKKDKTYEKIYDIVEKVMIERKNIHPNVDYPTGPTYHLMGFDTDFFTPIFVISRITGWSAHIMEQHSTNKLI

SEQ ID NO: 115169 - protein, 296 aa, Unknown
  Bacterial polypetide isolated from the Sargasso Sea
TFREIVKHMPKKAHPMDVARTVVSVLGLEDKETSNNSPKANMKKAIKIFAKTPTAIAAFFRSRKGKKVIPPKKGLTFAENFFYMCFGEVPNKDIVKAFDVSLILYAEHSFNVSTFTARTITSSLSDIHGAITGAIASLKGPLHGGANEEVMHMMNKIKKPENALKWINKALDKKDVVMGFGHRVYKKGDSRVPTMEKYFKKVAKLKKDKKFIKIYDIVKNVMIERKDIHPNVDYPTGPTYHLMGFDTDFFTPIFVISRITGWAAHIMEQHAANKLIRPLSKYSGPEHRKVMLLNQR

SEQ ID NO: 115170 - protein, 282 aa, Unknown
  Bacterial polypetide isolated from the Sargasso Sea
ERSDRKLSKEILSDIRKMPKKAHPMDVVRTAVSLMALEDKETKDNSSKANMRKAIRIFSKTPIALAAFFRARKGKKMIAPKRNLSFSENFFYMCFGKVPSKEIVKAFDVSLILYAEHSFNVSTFTARTITSSLSDIHGAITGAIASLKGPLHGGANEEVMHMMNKIKKPKNALKWINKALKNKDVVMGFGHRVYKRGDSRVPTMEKYFKKVASIKKDKKFIKIYDIVKNVMIERKNIHPNVDYPTGPTYHLMGFDTDFFTPIFVISRITGWSAHIMEQHAAN

SEQ ID NO: 115171 - protein, 171 aa, Unknown
  Bacterial polypetide isolated from the Sargasso Sea
DIHGAITGAIASLKGPLHGGANEEVMHMMNKIKKPKNAFKWINKALKNKDVVMGFGHRVYKKGDSRVPTMEKYFRKVASIKKDKKFIKIYDIVKEVMIDKKNIHPNVDYPTGPTYHLMGFDTDFFTPIFVISRITGWSAHIMEQHAANKLIRPLSKYSGAKHRKVMLLNQR

SEQ ID NO: 115172 - protein, 301 aa, Unknown
  Bacterial polypetide isolated from the Sargasso Sea
IDNEQKTLNLVLKPGLEGVPVTNSGICEINGTEGKLNYRGYPISELAQKSSFLETAFLLIWGELPTKDELQKFEEDVQMHRRVSFRIRDMLKCFPESGHPMDALQASAASLGLFYSRRAIDDPKYIYDAVVRLIAKIPTMVAAFEQIRKGDDPIQPQDDLPYSSNFLYMLTEREPNPLAARVFDRCLILHAEHSLNASTFSARVTASTLTDPYAVVASAVGTLAGPLHGGANEDVIAMLEEIGTPDKASLFLNDAIAKKRKIMGFGHREYRVKDPRATILQAFAEELFSAFGKDEMYEVAK

SEQ ID NO: 115173 - protein, 287 aa, Unknown
  Bacterial polypetide isolated from the Sargasso Sea
MSEDIKKGLLGIVVDETEVSKVMPEINSLTYRGYAAQDLCEYCRFEEVAYLILNKDLPNTIELRKFEKEEKNNRELSKNLYEIIKHMPKKSHPMDVARTAVSVMGLEDKETQDSSPEANMRKALRIFAKTPTALAAFYRIRKGKKIIKPRKTLTFAENFFYMCFGKVPQKEIVKAFDVSLILYAEHSFNVSTFTARTITSSLSDIHGAITGAIASLKGPLHGGANEEVMHMMNKIKKPENALKWINNALKNKEVVMGFGHRVYKSGDSRVPTMRQYFGKVAKLKKDK

SEQ ID NO: 115174 - protein, 285 aa, Unknown
  Bacterial polypetide isolated from the Sargasso Sea
YAAQDLCAKCKFEEVAYLILNGELPTKKQLKKFEKEERKERKLSKTLLDDIKKFPKKAHPMDVARTAVSIMGLEDKETKDNSPKANMRKVMRIFAKMPVALAAFYRARKGKKIIPPKKNLSFSENFFHMCFGKVPNKDIVKAFDVSLILYAEHSFNVSTFTARTITSSLSDIHGAITGAIASLKGPLHGGANEEVMHMMNKIKKPENALKWINKALDNKDVVMGFGHRVYKSGDSRVPTMREYFGKVANIKKDKKFEKIYDIVEKVMIERKNIHPNVDYPTGPTY

SEQ ID NO: 115175 - protein, 251 aa, Unknown
  Bacterial polypetide isolated from the Sargasso Sea
MRIFAKTPVALAAFYRARKGKKIIPPKKNLSFSENFFHMCFGKTPNKDIVKAFDVSLILYAEHSFNVSTFTARTITSSLSDIHGAITGAIASLKGPLHGGANEEVMHMMNKIKKPENALKWINKALDNKDVIMGFGHRVYKSGDSRVPTMREYFGKVAKIKKDKKFEKIYDIVEKVMIERKNIHPNVDYPTGPTYHLMGFDTDFFTPIFVISRITGWSAHIIEQYSANKLIRPLASYKGSKHRKVINLNQR

SEQ ID NO: 115176 - protein, 101 aa, Unknown
  Bacterial polypetide isolated from the Sargasso Sea
STFTARTITSSLSDIHGAITGAIASLKGPLHGGANEEVMHMMNKIKKPENASKWINNALDNKDVVMGFGHRVYKSGDSRVPTMREYFRKVAKIKKDKKFER

SEQ ID NO: 115177 - protein, 272 aa, Unknown
  Bacterial polypetide isolated from the Sargasso Sea
MPEINSLTYRGYAAQDLCAKCKFEEVAYLILNGELPNKKQLKNFEKNEKKERRLSKSLLDSIKNFPKKSHPMDVARTAVSIMGLEDKETKDNSPKANMRKVMRIFAKTPTALAAFYRLRKGKKIINPKNNLSFSENFFYMCFGKVPNKEIVKAFDVSLILYAEHSFNVSTFTARTITSSLSDIHGAITGAIASLKGPLHGGANEEVMHMMNKIKKPENALKWINTALDKKSVVMGFGHRVYKSGDSRVPTMREYFAKVAKVKKDKKLKKFMT

SEQ ID NO: 115178 - protein, 162 aa, Unknown
  Bacterial polypetide isolated from the Sargasso Sea
IASLKGPLHGGANEEVMHMMNKIKKPEYALKWINNALDKKDVVMGFGHRVYKNGDSRVPTMRDYFGKVAKIKKDKKFEKIYDIVEKVMIERKNIHPNVDYPTGPTYHLMGFDTDFFTPIFVISRITGWSAHIMEQHAANKLIRPLASYKGSQHRKVIQLNQR

SEQ ID NO: 115179 - protein, 265 aa, Unknown
  Bacterial polypetide isolated from the Sargasso Sea
ETTDSSQEANMRKAIRILAKTPTALAAFYRLRKGKKIIKPKKNLNIAENFFYMCFGKVPQKEIVKAFDVSLILYAEHSFNVSTFTARTITSSLSDIHGAITGAIASLKGPLHGGANEEVMHMMNKIKSPKNALKWINNALDKKEVVMGFGHRVYKSGDSRVPTMRKYFAKVAKIKKDKKFEKIYDIVEKVMIERKNIHPNVDYPTGPTYHLMGFDTDFFTPIFVVSRITGWSAHIMEQHAANKLIRPLASYKGNQHRKVVQLNQR

SEQ ID NO: 115180 - protein, 233 aa, Unknown
  Bacterial polypetide isolated from the Sargasso Sea
KGKKIIKPKKNLNIAENFFYMCFGKVPQKEIVKAFDVSLILYAEHSFNVSTFTARTITSSLSDIHGAITGAIASLKGPLHGGANEEVMHMMNKIKTPNNALKWINSALDNKEVVMGFGHRVYKSGDSRVPTMRKYFAKVAKIKKDKKFEKIYDIVERVMIDRKNIHPNVDYPTGPTYHLMGFDTDFFTPIFVISRITGWSAHIMEQHAANKLIRPLASYKGNQHRKVVQLNQR

SEQ ID NO: 115181 - protein, 193 aa, Unknown
  Bacterial polypetide isolated from the Sargasso Sea
LYAEHSFNVSTFTARTITSSLSDIHGAITGAIASLKGPLHGGANEEVMHMMNKIKKPENALNWINNALKNKEVVMGFGHRVYKSGDSRVPTMRKYFGKVAKLKKDKKFEKIYDIVEKVMINKKNIYPNVDYPTGPTYHLMGFDTDFFTPIFVISRITGWSAHIMEQHAANKLIRPLASYKGNKHRKVMQLNQR

SEQ ID NO: 115182 - protein, 293 aa, Unknown
  Bacterial polypetide isolated from the Sargasso Sea
MNSVSQVMPDINSLTYSGYAVQDLCEKCNFEEVAYLVLNGELPNKRQLISFIKEERSDRKLSKEILSDIRKMPKKAHPMDVVRTAVSLMSLEDKETKDNSPKANMRKAIRIFSKTPIALAAFFRARKGKKIIAPKKNLSFSENFFYMCFGKIPSKEIVKAFDVSLILYAEHSFNVSTFTARTITSSLSDIHGAITGAIASLKGPLHGGANEEVMHMMNKIKKPKNALKWINKALKNKDVVMGFGHRVYKRGDSRVPTMEKYFKKVASIKKDKKFIKIYDIVKDVMIERKNIHP

SEQ ID NO: 115183 - protein, 202 aa, Unknown
  Bacterial polypetide isolated from the Sargasso Sea
VKAFDVSLILYAEHSFNVSTFTARTITSSLSDIHGAITGAIASLKGPLHGGANEEVMHMMRKIKKPENALKWINNALDNKSVVMGFGHRVYKSGDSRVPTMREYFGKVAKIKKDKKFEKIYNIVEKVMIERKNIHPNVDYPTGPTYHLMGFDTDFFTPIFVISRITGWSAHIIEQYASNKLIRPLASYKGNKHRKVIQIKKR

SEQ ID NO: 115184 - protein, 204 aa, Unknown
  Bacterial polypetide isolated from the Sargasso Sea
DIVKAFDVSLILYAEHSFNVSTFTARTITSSLSDIHGAITGAIASLKGPLHGGANEEVMHMMNKIKKPENALKWINKALDNKDVVMGFGHRVYKSGDSRVPTMREYFGKVAKIKKDKKFEKIYDIVEKVMIDRKNIHPNVDYPTGPTYHLMGFDTDFFTPIFVISRITGWSAHIIEQHAANKLIRPLASYKGSKHRKVLQLNQR

SEQ ID NO: 115185 - protein, 271 aa, Unknown
  Bacterial polypetide isolated from the Sargasso Sea
MGLEDKETTDNSPKANLRKAMRIFSKMPVALAAFYRLRKGKKIIAPKNKLSFAENFFHMCFGKVPKKEIVKAFDVSLILYAEHSFNVSTFTARTITSSLSDIHGAITGAIASLKGPLHGGANEEVMHMMNKIKKPENALNWINNALDKKAVVMGFGHRVYKNGDSRVPTMREYFGKVAKITKDKKFEKIYDIVEKVMIDRKNIHPNVDYPTGPTYHLMGFETDFFTPIFVISRITGWSAHIIEQHSTNKLIRPLAAYNGSKHRQVANLKDR

SEQ ID NO: 115186 - protein, 309 aa, Unknown
  Bacterial polypetide isolated from the Sargasso Sea
FEKQERKERKLSKTLLEDIKKFPKKAHPMDVARTVVSIMGLEDKETKDNSPKANMRKVMRIFAKTPVALAAFYRVRKGKKIIPPKNNLSFSENFFNMCFGKVPNKDIVKAFDVSLILYAEHSFNVSTFTARTITSSLSDIHGAITGAIASLKGPLHGGANEEVMHMMNKIKKPENALNWINKALDNKDVVMGFGHRVYKSGDSRVPTMREYFGKVAKIKKDKKFEKIYDIVEKVMIERKNIHPNVDYPTGPTYHLMGFDTDFFTPIFVISRITGWSAHIIEQHAANKLIRPLASYKGNQHRKVVQLNQR

SEQ ID NO: 115187 - protein, 257 aa, Unknown
  Bacterial polypetide isolated from the Sargasso Sea
ANMRKVMRIFAKMPVALAAFYRARKGKKIIPPKSKLSFSENFFHMCFGKVPNREIVKAFDVSLILYAEHSFNVSTFTARTITSSLSDIHGAITGAIASLKGPLHGGANEEVMHMMNKIKKPENALKWINKALDNKDVVMGFGHRVYKSGDSRVPTMREYFGKVAKIKKDKKFEKIYDIVEKVMIDRKNIHPNVDYPTGPTYHLMGFDTDFFTPIFVISRITGWSAHIIEQHAANKLIRPLASYKGSKHRRVLQLNQR

SEQ ID NO: 115188 - protein, 164 aa, Unknown
  Bacterial polypetide isolated from the Sargasso Sea
GAIASLKGPLHGGANEEVMHMMNKIKKPEHALKWINKALDNKDVVMGFGHRVYKSGDSRVPTMREYFGKVAKIKKDKKFEKIYDIVEKVMIERKNIHPNVDYPTGPTYHLMGFDTDFFTPIFVISRITGWSAHIMEQHSANKLIRPLASYKGSQHRKVVPINQR

SEQ ID NO: 115189 - protein, 287 aa, Unknown
  Bacterial polypetide isolated from the Sargasso Sea
MSDDIKKGLLGIVVDETEVSKVMPEINSLTYRGYAAQDLCEYCRFEEVAYLILNKDLPNSIELKNFEKEERNNRELTKNLYEIIKHMPKRSHPMDVARTAVSVMGLEDKETSDSSPEANMRKALRIFAKTPTALAAFYRIRKGKKIIKPKKTLTFAENFFYMCFGKVPQKEIVKAFDVSLILYAEHSFNVSTFTARTITSSLSDIHGAITGAIASLKGPLHGGANEEVMHMMDKIKKPENALKWINNALKNKEVVMGFGHRVYKSGDSRVPTMREYFGKVAKIKKDK

SEQ ID NO: 115190 - protein, 290 aa, Unknown
  Bacterial polypetide isolated from the Sargasso Sea
KNFPKKSHPMDVARTAVSILGLKDKETKDNSPKANMRKVMRIFAKTPTALAAFYRLRKGKKIISPKSNLSFSENFFYMCFGKVPNKEIVKAFDVSLILYAEHSFNVSTFTARTITSSLSDIHGAITGAIASLKGPLHGGANEEVMHMMNKIKKPENALKWINNALDKKAVVMGFGHRVYKSGDSRVPTMREYFAKVAKVKKDKKFEKIYDIVEKVMIDRKNIYPNVDYPTGPTYHLMGFDTDFFTPIFVISRITGWSAHILEQHAANKLIRPLASYKGSSYRKVVPLNQR

SEQ ID NO: 115191 - protein, 239 aa, Unknown
  Bacterial polypetide isolated from the Sargasso Sea
MIHRLREGLPIVEADPTKGHAEDFLRMLHDKEATQTQIEALNLYLILLADHGFNASTFSARVTAGTLANLHSTITSAVGTLSGPLHGGANEKAMDMILEVGTKKKASNYIQKAFDNKQKIMGFGHRVYKVDDARKPHLKKMAKQVLEEKGNMKIFDVSEEIEKQVKDRKPIITNVDFYSAPLLYGLEIPTDLFTPLFAMSRVAGWTAHVLEQYRNNRLIRPRARYIGQIDRTFRPIDQR

SEQ ID NO: 115192 - protein, 294 aa, Unknown
  Bacterial polypetide isolated from the Sargasso Sea
MSEEVKKGLLGIVVDETEVSKVMPEINSLTYRGYAVQDLCEFCRFEEAAYLILKGDLPNSIELRQFEKIERGHRDLSKNLYEIIKHMPKKSHPMDVARTAVSVMGLEDKETTDNSQEANTRKALRILAKTPTALAAFYRIRKGKKIIKPKKELTFAENFFYMCFGKVPQKEIVKAFDVSLILYAEHSFNVSTFTARTITSSLSDIHGAITGAIASLKGPLHGGANEEVMHMMNKIKKPENALKWINNALKKKEVVMGFGHRVYKSGDSRVPTMKEYFKKVAKIKKDKKFLKIYD

SEQ ID NO: 115193 - protein, 267 aa, Unknown
  Bacterial polypetide isolated from the Sargasso Sea
DKETNDNSPKANMRKVILIFAKTPTAIAAFFRARKGKKIIPPKKNLSFAENFFYMCFGKVPNKDIVKAFDVSLILYAEHSFNVSTFTARTITSSLSDIHGAITGAIASLKGPLHGGANEEVMHMMNKIKKPDNALKWINNALKKKEVVMGFGHRVYKKGDSRVPTMEKYFKKVSKINGDKKFIKIYDIVKSVMIERKNIHPNVDYPTGPTYHLMGFDTDFFTPIFVISRITGWSAHIIEQHAANKLIRPLSKYSGPDHRKVMLLNQR

SEQ ID NO: 115194 - protein, 266 aa, Unknown
  Bacterial polypetide isolated from the Sargasso Sea
MSEDIKKGLLGIVVDETEVSKVMPEINSLTYRGYAAQDLCEYCRFEEVAYLILNKDLPNTIELRKFEKEEKNNRELSKNLYEIIKHMPKKSHPMDVARTAVSVMGLEDKETQDSSPEANMRKALRIFAKTPTALAAFYRIRKGKKIIKPRKTLTFAENFFYMCFGKVPQKEIVKAFDVSLILYAEHSFNVSTFTARTITSSLSDIHGAITGAIASLKGPLHGGANEEVMHMMNKIKKPENALKWINNALKNKEVVMGFGHRVYKSG

SEQ ID NO: 115195 - protein, 298 aa, Unknown
  Bacterial polypetide isolated from the Sargasso Sea
SEEVKKGLLGIVVDETEVSKVMPEINSLTYRGYAVQDLCEFCRFEEAAYLILKGDLPNSIELRQFEKIERGHRDLSKNLYEIIKHMPKKSHPMDVARTAVSVMGLEDKETTDNSQEANTRKALRILAKTPTALAAFYRIRKGKKIIKPKKELTFAENFFYMCFGKVPQKEIVKAFDVSLILYAEHSFNVSTFTARTITSSLSDIHGAITGAIASLKGPLHGGANEEVMHMMNKIKKPEKALKWIKNALKNKEVVMGFGHRVYKSGDSRVPTMKSYFEKVCKIKKDKKFLKIYEIVKKK

SEQ ID NO: 115196 - protein, 265 aa, Unknown
  Bacterial polypetide isolated from the Sargasso Sea
MSEDIKKGLLGIVVDETEVSKVMPEINSLTYRGYAAQDLCEYCRFEEVAYLILNKDLPNTIQLRKFEKEEKNNRELSKDLYSILKKMPKKAHPMDVARTAVSVMGLEDKETTDSSPEANMRKAIRILAKTPTALAAFYRLRKGKTIIKPKKYLNIAENFFYMCFGKVPQKEIVKAFDVSLILYAEHSFNVSTFTARTITSSLSDIHGAITGAIASLKGPLHGGANEEVMHMMNKIKKPENALKWINNTLDKKEVVMGFGHRVYKS

SEQ ID NO: 115197 - protein, 177 aa, Unknown
  Bacterial polypetide isolated from the Sargasso Sea
ITSSLSDIHGVITGAIASLKGPLHGGANEEVMHMMNKIKKPENALKWINNALKNKEVVMGFGHRVYKSGDSRVPTMRQYFGKVAKLKKDKKFEKIYDIVEKVMIKEKNIHPNVDYPTGPTYHLMGFETDFFTPIFVISRITGWSAHIMEQHAANKLIRPLASYKGSKHRKVLELNQR

SEQ ID NO: 115198 - protein, 188 aa, Unknown
  Bacterial polypetide isolated from the Sargasso Sea
SFNVSTFTARTITSSLSDIHGAITGAIASLKGPLHGGANEEVMHMMNKIKKPENALNWINKALDNKDVVMGFGHRVYKSGDSRVPTMREYFGKVAKIKKDKKFEKIYDIVEKVMIDRKNIHPNVDYPTGPTYHLMGFDTDFFTPIFVISRITGWSAHIIEQHAANKLIRPLASYKGSKHRKVLQLNQR

SEQ ID NO: 115199 - protein, 264 aa, Unknown
  Bacterial polypetide isolated from the Sargasso Sea
GELPSEKQLKNFEKVERKERNLSKTLLESIKNFPKKSHPMDVARTAVSIMGLEDKETKDNSPDANLRKVMRIFAKTPVALAAFYRIRKGKKIIKPKRNLSFSENFFYMCFGKVPEKEIVKAFDVSLILYAEHSFNVSTFTARTITSSLSDIHGAITGAIASLKGPLHGGANEEVMHMMNKIKKPENALNWINNALDQKAVVMGFGHRVYKSGDSRVPTMREYFSKVAKLKKDKKFEKIYDIVEKVMIERKNIHPNVDYPYWTDL

SEQ ID NO: 115200 - protein, 245 aa, Unknown
  Bacterial polypetide isolated from the Sargasso Sea
KKQLKSFIKEERSDRKLSKEILSDIRKMPKKAHPMDVARTAVSLMALEDKETKDNSPKANMRKAIRIFSKTPIALAAFFRARKGKKIIAPKKNLSFSENFFYMCFGKVPSKEIVKAFDVSLILYAEHSFNVSTFTARTITSSLSDIHGAITGAIASLKGPLHGGANEEVMHMMNKIKKPENALKWINKALKNKDVVMGFGHRVYKRGDSRVPTMEKYFKKVSSIKKDKKFIKIYDIVKNVMIEKK

SEQ ID NO: 115201 - protein, 252 aa, Unknown
  Bacterial polypetide isolated from the Sargasso Sea
ISSNGCNKNIVSVLGLEDKETNNNSPEANMRKAIRIFAKAPTAIAAFFRARKGKNVIPPKKKLSFSENFFYMCFGKVPSKEIVKAFDVSLILYAEHSFNVSTFTARTITSSLSDIHGAITGAIASLKGPLHGGANEEVMHMMNKIKKPENALKWINKTLDKKEVVMGFGHRVYKKGDSRVPTMEKYFKKVSKVKSDKKFIKIYEIVKKVMIDRKNIHPNVDYPTGPTYHLMGFDTDFFTPIFVISRITGWSA

SEQ ID NO: 115202 - protein, 276 aa, Unknown
  Bacterial polypetide isolated from the Sargasso Sea
MSDEIKKGLLGIVVDETEVSKVMPEINSLTYRGYAAQDLCAKCKFEEVAYLILNGELPSKKQLKKFEKEERKERKLSKTLLDDIKKFPKKSHPMDVARTAVSIMGLEDKETKDNSPKANMRKVMRIFAKTPVALAAFYRARKGKKIIPPKKNLSFSENFFHMCFGKVPNKEIVKAFDVSLILYAEHSFNVSTFTARTITSSLSDIHGAITGAIASLKGPLHGGANEEVMHMMNKIKKPENALKWINKALDNKDVVMGFGHRVYKSGDSRVPTMREY

SEQ ID NO: 115203 - protein, 374 aa, Unknown
  Bacterial polypetide isolated from the Sargasso Sea
MSDDIKKGLLGIVVDETEVSKVMPEINSLTYRGYAAQDLCEYCRFEEVAYLILNKDLPNTIQLRKFEKEEKNNRELSKDLYSVIKKMPKKSHPMDVARTAVSIMGLEDKETTDSSPEANMRKAVRILAKTPTALAAFYRIRKGKKIIKPKKNLNIAENFFYMCFGKVPQKEIVKAFDVSLILYAEHSFNVSTFTARTITSSLSDIHGAITGAIASLKGPLHGGANEEVMHMMNKIKDPKNALKWINDALDNKEVVMGFGHRVYKSGDSRVPTMRKYFAKVAKIKKDKKFEKIYDIVEKVMIERKNIHPNVDYPTGPTYHLMGFDTDFFTPIFVISRITGWSAHIMEQHAANKLIRPLASYKGNKHRKVLQLNQR

SEQ ID NO: 115204 - protein, 263 aa, Unknown
  Bacterial polypetide isolated from the Sargasso Sea
QDSSPEANMRKALRIFAKTPTALAAFYRIRKGKKIIKPRKTLTFAENFFYMCFGKVPQKEIVKAFDVSLILYAEHSFNVSTFTARTITSSLSDIHGAITGAIASLKGPLHGGANEEVMHMMNKIKKPENALKWINNALKNKEVVMGFGHRVYKSGDSRVPTMRQYFGKVAKIKKDKKFEKIYDIVERVMIKEKNIHPNVDYPTGPTYHLMGFDTDFFTPIFVISRITGWSAHIMEQHAANKLIRPLASYKGSKHRNVLQLNQR

SEQ ID NO: 115205 - protein, 365 aa, Unknown
  Bacterial polypetide isolated from the Sargasso Sea
HLLLGETLRYRGYAVSDLVQCSFEEVAYLLLWGELPTAHQLEAFAARIQRAAQSMPQTIVCCFQKLAESSPQSSIMDVLRTGVSVLGQLECDNGPAESLYDRDLSQQRNKAEQLLGQVPALLTIWIDCLRGRQPSPWPNKPLTTALLEKLCRTKVSDIAATVFNTTLILYAEHEFNASTFAARTVTSTGSDMHSGVTAAIGALKGPLHGGANEKVLHQLMDIGVPENIEPWLARKLNDHEVVMGFGHRVYKTGDIRANLLGDACHRLIHSDSSFEPHDKLEKLAHQLEQLMLEKKGLHPNLDWPAARVYHALGLPINLFTPLFVVARVSGWTSHIIEQMGTSRLIRPLAQYVGPSPRPYVAIKDR

SEQ ID NO: 115206 - protein, 291 aa, Unknown
  Bacterial polypetide isolated from the Sargasso Sea
MRPGLDGVPATQSAICDIDGEQGLLTYRGYPMQDLAANSSFLETAYLLIWGELPSRDQLAEFEHAVQMHRRVSFRVRDMMKCFPASGHPMDALQSSAASLGLFYSRRAIDDPQYIYDAVVRLIAKIPTMVAAFQLIRKGQDPIQPRDDLAYSANFLYMLTEREPDPLAARIFDRCLMLHAEHSLNASTFSARVTASTLTDPYAVVASAVGTLAGPLHGGANEDVLAMLEQVGSPENAGAFLDEAIAAKRKIMGFGHREYKVKDPRAVILQALVEEMFASFGHDDLYDVARA

SEQ ID NO: 115207 - protein, 193 aa, Unknown
  Bacterial polypetide isolated from the Sargasso Sea
LYAEHSFNVSTFTARTITSSLSDVHGAITGAIASLKGPLHGGANEEVMHMMNKIKKPENAHKWINKTLDNKEVVMGFGHRVYKSGDSRVPTMRKYFGKVAKIKKDKKFEKIYNIVEKVMIERKNIHPNVDYPTGPTYHLMGFDTDFFTPIFVISRITGWSAHIIEQHAANKLIRPLSKYSGPKHRKVIQLNQR

SEQ ID NO: 115208 - protein, 374 aa, Unknown
  Bacterial polypetide isolated from the Sargasso Sea
MTEDIKKGLLGIVVDETEVSKVMPEINSLTYRGYAAQDLCAKCKFEEVAYLILNGELPSEKQLKNFEKVERKERNLSKKLLKSIKNFPKKSHPMDVARTAVSIMGLEDKETKDNSPEANLRKVMRIFAKTPVALAAFYRIRKGKKIIKPKSNLSFSENFFYMCFGKVPEKEIVKAFDVSLILYAEHSFNVSTFTARTITSSLSDIHGAITGAIASLKGPLHGGANEEVMHMMNKIKKPENALNWINNALDQKAVVMGFGHRVYKSGDSRVPTMREYFSKVAKVKKDKKFEKIYDIVEKVMIERKNIHPNVDYPTGPTYHLMGFDTDFFTPIFVISRITGWSAHILEQHAANKLIRPLASYKGSSYRKVVPINQR

SEQ ID NO: 115209 - protein, 179 aa, Unknown
  Bacterial polypetide isolated from the Sargasso Sea
RTITSSLSDIHGAITGAIASLKGPLHGGANEEVMHMMKKIKKPANALKWINNALKNKDVVMGFGHRVYKSGDSRVPTMREYFGKVAKIKKDKTFEKIYDIVENVMIKEKNIHPNVDYPTGPTYHLMGFDTDFFTPIFVISRITGWSAHIMEQHAANKLIRPLASYKGNKHRKVMQLNQR

SEQ ID NO: 115210 - protein, 280 aa, Unknown
  Bacterial polypetide isolated from the Sargasso Sea
DVARTAVSIMGLEDKDTTDSSPESNMRKTIRILAKTPTALAAFYRLRKGKKIIKPKKNLNIAENFFYMCFGKVPQKEIVKAFDVSLILYAEHSFNVSTFTARTITSSLSDIHGAITGAIASLKGPLHGGANEEVMHMMNKIKTPNNALKWINNALDKKEVVMGFGHRVYKSGDSRVPTMRKYFAKVAKIKKDKKFEKIYDIVEKVMIERKNIHPNVDYPTGPTYHLMGFDTDFFTPIFVISRITGWSAHIFEQHAANKLIRPLASYRGSKHRKVVPLNQR

SEQ ID NO: 115211 - protein, 240 aa, Unknown
  Bacterial polypetide isolated from the Sargasso Sea
SAYFRTRKGKKIIKPKKKLTFSENFFYMCFGKVPSKDIVKAFDVSLILYAEHSFNVSTFTARTITSSLSDIHGAITGAIASLKGPLHGGANEEVMYMMNKIKNPNNALKWINKALDKKEVVMGFGHRVYKKGDSRVPTMEKYFKKVSKIKADKKFVKIYDIVKNVMIERKNIHPNVDYPTGPTYHLMGFETDFFTPIFVMSRITGWSAHIMEQHAANKLIRPLSKYSGASHRKVMLLNQR

SEQ ID NO: 115212 - protein, 305 aa, Unknown
  Bacterial polypetide isolated from the Sargasso Sea
MDNNKLILKPGLEGVPVANSSICDIDGNKGKLLYRGYSIEELSKKSSFLETAYLLIWGELPTAIQLRDFEQEVQMHRRLSFRVRDMMKCFPATGHPMDALQSSAASLGLFYSRRAIDDPNYIYNAVIRLIAKIPTMIAAFQLIRKGQDPIQPRDDLTYSSNFLYMLTEKEQDPIAAKVFDRCLILHAEHSLNASTFSARVTASTLTDPYAVIASAVGTLAGPLHGGANEDVIAMLEEIKTPENAGSFLDNAIKNKSKIMGFGHREYKVKDPRAIILQKLAEELFIRFGADEMYEVAKSLEAEAIP

SEQ ID NO: 115213 - protein, 374 aa, Unknown
  Bacterial polypetide isolated from the Sargasso Sea
MSDEIKKGLLGIVVDETEVSKVMPEINSLTYRGYAAQDLCAKCKFEEVAYLILNGELPSKKQLKKFEKEERKERKLSKTLLDDIKKFPKKAHPMDVARTAVSIMGLEDKETKDNSPKANMRKVMRIFAKMPVALAAFYRARKGKRIIPPKSKLSFSENFFHMCFGKVPNKDIVKAFDVSLILYAEHSFNVSTFTARTITSSLSDIHGAITGAIASLKGPLHGGANEEVMHMMNKIKKPENALKWINKALDNKDVVMGFGHRVYKSGDSRVPTMREYFGKVAKIKKDKKFEKIYDIVEKVMISRKNIHPNVDYPTGPTYHLMGFDTDFFTPIFVISRITGWSAHIIEQHAANKLIRPLASYKGSKHRKVLQLNQR

SEQ ID NO: 115214 - protein, 291 aa, Unknown
  Bacterial polypetide isolated from the Sargasso Sea
MSDDIKKGLLGIVVDETEVSKVMPEINSLTYRGYAAQDLCAKCKFEEVAYLILNGELPTKKQLKKFEKEERKERKLSKTLLDDIKRFPKKAHPMDVARTAVSIMGLEDKETKDNSPKANMRKVMRIFAKMPVALAAFYRARKGKKIIPPKKNLSFSENFFHMCFGEVPNKDIVKAFDVSLILYAEHSFNVSTFTARTITSSLSDIHGAITGAIASLKGPLHGGANEEVMHMMNKIKKPENALKWINKALDNKDVVMGFGHRVYKSGDSRVPTMREYFGKVAKIKKDKKFEK

SEQ ID NO: 115215 - protein, 379 aa, Unknown
  Bacterial polypetide isolated from the Sargasso Sea
MSDEIKKGLLGIVVDETEVSKVMPEINSLTYRGYAAQDLCEYCRFEEVAYLILNKDLPNTIQLRKFEKEEKNHRELSKNLYEIIKHMPKKSHPMDVARTAVSVMGLEDKETQDSSHEANMRKALRIFAKTPTALAAFYRIRKGKKIIKPKKNLTFAENFFYMCFGKVPQKEIVKAFDVSLILYAEHSFNVSTFTARTITSSLSDIHGAITGAIASLKGPLHGGANEEVMHMMNKIKKPENALKWINNALKNKEVVMGFGHRVYKSGDSRVPTMRQYFGKVAKIKKDKKFEKIYDIVERVMIKEKNIHPNVDYPTGPTYHLMGFDTDFFTPIFVISRITGWSAHIMEQHAANKLIRPLASYKGSKHRKVLQLNHKIIFKY

SEQ ID NO: 115216 - protein, 352 aa, Unknown
  Bacterial polypetide isolated from the Sargasso Sea
MPEINSLTYRGYAAQDLCAKCKFEEVAYLILNGELPTKKQLKKFEREERKERKLSKTLLDDIKKFPRKAHPMDVARTAVSIMGLEDKETKDNSPKANMRKVMRIFAKMPVALAAFYRARKGKKIIPPKSKLSFSENFFHMCFGKVPNKDIVKAFDVSLILYAEHSFNVSTFTARTITSSLSDIHGAITGAIASLKGPLHGGANEEVMHMMNKIKKPENALKWINKALDNKDVVMGFGHRVYKSGDSRVPTMREYFGKVAKIKKDKRFEKIYDIVEKVMIDRKNIHPNVDYPTGPTYHLMGFDTDFFTPIFVISRITGWSAHIIEQHAANKLIRPLASYRGSKHRKVLQLNQR

SEQ ID NO: 115217 - protein, 374 aa, Unknown
  Bacterial polypetide isolated from the Sargasso Sea
MSDDIKKGLLGIVVDETEVSKVMPEINSLTYRGYAAQDLCEYCRFEEVAYLILNKDLPNTLELRKFEKEEKNNRELTKNLYEIIRHMPKKSHPMDVARTAVSVMGLEDKETTDSSPEANMRKALRIFAKTPTALAAFYRIRKGKKIIKPKKTLTFAENFFYMCFGKVPQKEIVKAFDVSLILYAEHSFNVSTFTARTITSSLSDIHGAITGAIASLKGPLHGGANEEVMHMMNKIKKPENALKWINNALKNKEVVMGFGHRVYKSGDSRVPTMRKYFAKVAKIKKDKKFEKIYDIVERVMIKEKNIYPNVDYPTGPTYHLMGFETDFFTPIFVISRITGWSAHIMEQHAANKLIRPLASYKGSKHRKVMQLNQR

SEQ ID NO: 115218 - protein, 298 aa, Unknown
  Bacterial polypetide isolated from the Sargasso Sea
SKNLYEIIKHMPKKSHPMDVARTAVSVMGLEDKETQDSSPEANMRKALRIFAKTPTALAAFYRIRKGKKIIKPRKTLTFAENFFYMCFGKVPQKEIVKAFDVSLILYAEHSFNVSTFTARTITSSLSDIHGAITGAIASLKGPLHGGANEEVMHMMNKIKKPENALKWINNALKNKEVVMGFGHRVYKSGDSRVPTMRQYFGKVAKLKKDKKFEKIYDIVEKVMIKEKNIHPNVDYPTGPTYHLMGFDTDFFTPIFVISRITGWSAHIMEQHAANKLIRPLASYKGSKHRKVLELNQR

SEQ ID NO: 115219 - protein, 374 aa, Unknown
  Bacterial polypetide isolated from the Sargasso Sea
MSDEIKKGLLGIVVDETEVSKVMPEINSLTYRGYAAQDLCAKCKFEEVAYLILNGELPSKKQLKKFEKEERKERKLSKTLLDDIKKFPKKAHPMDVARTAVSIMGLEDKETKDNSPKANMRKVMRIFAKMPVALAAFYRARKGKRIIPPKNKLSFSENFFHMCFGKVPNKDIVKAFDVSLILYAEHSFNVSTFTARTITSSLSDIHGAITGAIASLKGPLHGGANEEVMHMMNKIKKPENALKWINKALDNKDVVMGFGHRVYKSGDSRVPTMREYFGKVAKIKKDRKFEKIYDIVEKVMIDRKNIHPNVDYPTGPTYHLMGFDTDFFTPIFVISRITGWSAHIIEQHAANKLIRPLASYKGSKHRKVLQLNQR

SEQ ID NO: 115220 - protein, 255 aa, Unknown
  Bacterial polypetide isolated from the Sargasso Sea
MRKAMRIFAKTPTALAAFYRIRKGKKIIKPKKNLSFSENFFYMCFGKVPSKEIVKAFDVSLILYAEHSFNVSTFTARTITSSLSDIHGAITGAIASLKGPLHGGANEEVMHMMNKIKKPENALKWINNALDKKDVVMGFGHRVYKSGDSRVPTMKKYFKKVAKIKKDKKFSKIYDIVEKVMIERKNIHPNVDYPTGPTYHLMGFDTDFFTPIFVTSRITGWSAHIMEQHAANKLIRPLSKYNGPKHRKVLLLNQR

SEQ ID NO: 115221 - protein, 374 aa, Unknown
  Bacterial polypetide isolated from the Sargasso Sea
MSDEVKKGLLGIVVDETQVSKVMPEINSLTYRGYAVQDLCEMCRFEEAAYLILNGDLPNTIELRKFEKEERSNRDLSKNLNDIIKHMPKKSHPMDVARTAVSVMGLEDKETTDNSPEANMRKAMRIFAKTPVALAAFYRIRKGKKIIKPKKNLTFAENFFYMCFGKVPNKEIVKAFDVSLILYAEHSFNVSTFTARTITSSLSDIHGAITGAIASLKGPLHGGANEEVMHMMSKIKKPEHALKWINDALDKKEVVMGFGHRVYKSGDSRVPTMREYFKKVAKIKKDKKFSKIYDIVEKVMIERKNIHPNVDYPTGPTYHLMGFDTDFFTPIFVTSRITGWSAHIMEQHSANKLIRPLSKYSGPKHRKVMLLNQR

SEQ ID NO: 115222 - protein, 374 aa, Unknown
  Bacterial polypetide isolated from the Sargasso Sea
MSDDIKKGLLGIVVDETEVSKVMPEINSLTYRGYAAQDLCEYCRFEEVAYLILNKDLPNTIQLRQFEKEERNNRELTKNLYEIIKHMPKKSHPMDVARTAVSVMGLEDKETTDSSAESNMRKALRIFAKTPTALAAFYRIRKGKKIIKPKKTLTFAENFFYMCFGKVPQKEIVKAFDVSLILYAEHSFNVSTFTARTITSSLSDIHGAITGAIASLKGPLHGGANEEVMHMMNKIQKPENALKWINNALRNKEVVMGFGHRVYKSGDSRVPTMREYFGKVAKIKKDKKFEKIYDIVEKVMIKEKNIYPNVDYPTGPTYHLMGFDTDFFTPIFVISRITGWSAHIMEQHAANKLIRPLASYKGNKHRKVMELNQR

SEQ ID NO: 115223 - protein, 329 aa, Unknown
  Bacterial polypetide isolated from the Sargasso Sea
MSEEIKKGLLGIVVDETEVSKVMPEINSLTYRGYAAQDLCAKCKFEEVAYLILNGELPNKKQLKDFEIQERKERKLSNTLLADIKKIPKKAHPMDVARTAVSIMGLEDKETRDNSPKANMRKAMRIFAKTPVALAAFYRARKGKKIIPPKKKYSMSENFFHMCFGKVPNKEIVKAFDVSLILYAEHSFNVSTFTARTITSSLSDIHGAITGAIASLKGPLHGGANEEVMHMMKKIKKPENALKWINNALDNKEVVMGFGHRVYKSGDSRVPTMREYFGKVAKLKKDKKFEKIYDIVEKVMIDRKNIHPNVDYPTGPTYHLMGFDTDFFT

SEQ ID NO: 115224 - protein, 350 aa, Unknown
  Bacterial polypetide isolated from the Sargasso Sea
MSDDIKKGLLGIVVDETEVSKVMPEINSLTYRGYAAQDLCEYCRFEEVAYLILNKDLPNTIQLRQFEKEEKNNRELTKNLYEIIRHMPKRSHPMDVARTAVSVMGLEDKETTDSSPEANMRKALRIFAKTPTALAAFYRIRKGKKIIKPKKTLTFAENFFYMCFGKVPQKEIVKAFDVSLILYAEHSFNVSTFTARTITSSLSDIHGAITGAIASLKGPLHGGANEEVMHMMNKIKKPENALKWINNALKNKEVVMGFGHRVYKSGDSRVPTMRKYFGKVAKLKKDKKFEKIYDIVEKVMIREKNIHPNVDYPTGPTYHLMGFDTDFFTPIFVISRITGLVCSYNGATCC

SEQ ID NO: 115225 - protein, 251 aa, Unknown
  Bacterial polypetide isolated from the Sargasso Sea
MRIFAKTPVALAAFYRLRKGKKIISPKKNLSFAENFFYMCFGKVPQKDIVKAFDVSLILYAEHSFNVSTFTARTITSSLSDIHGAVTGAIASLKGPLHGGANEEVMHMMNKIKKPENALKWINNALEKKAVVMGFGHRVYKSGDSRVPTMREYFGKVAKIKKDKKFEKIYDIVEKVMIDRKNIHPNVDYPTGPTYHLMGFDTDFFTPIFVISRITGWSAHIIEQHATNKLIRPLAAYNGSQYRKVPSINKR

SEQ ID NO: 115226 - protein, 312 aa, Unknown
  Bacterial polypetide isolated from the Sargasso Sea
LKKFEKEEKNNRDLSKDLYSIIKKMPKKSHPMDVARTAVSIMGLEDKETTDSSEEANMRKAIRILAKTPTALAAFYRIRKGKNIIKPKKNLNIAENFFYMCFGKVPQKEIVKAFDVSLILYAEHSFNVSTFTARTITSSLSDIHGAITGAIASLKGPLHGGANEEVMHMMNKIKSPNNALKWINNALDKKEVVMGFGHRVYKSGDSRVPTMRKYFAKVAKIKKDKKFEKIYDIVEKVMIDRKNIHPNVDYPTGPTYHLMGFDTDFFTPIFVISRITGWSAHIMEQHAANKLIRPLASYKGNKHRKVLQLNQR

SEQ ID NO: 115227 - protein, 374 aa, Unknown
  Bacterial polypetide isolated from the Sargasso Sea
MAEDIKKGLLGIVVDETEVSKVMPEINSLTYRGYAAQDLCAKCKFEEVAYLILNGELPSEKQLKNFEKVERKERNLSKTLLESIKNFPKKSHPMDVARTAVSIMGLEDKETKDNSPEANLRKVMRIFAKTPVALAAFYRIRKGKKIIKPKSNLSFSENFFYMCFGKVPEKEIVKAFDVSLILYAEHSFNVSTFTARTITSSLSDIHGAITGAIASLKGPLHGGANEEVMHMMNKIKKPENALNWINNALDQKAVVMGFGHRVYKSGDSRVPTMREYFSKVAKVKKDKKFEKIYDIVEKVMIERKNIHPNVDYPTGPTYHLMGFDTDFFTPIFVISRITGWSAHVLEQHAANKLIRPLASYKGSSYRKVVPINQR

SEQ ID NO: 115228 - protein, 374 aa, Unknown
  Bacterial polypetide isolated from the Sargasso Sea
MSDDIKKGLLGIVVDETEVSKVMPEINSLTYRGYAAQDLCEYCRFEEVAYLILNKDLPNTIQLRKFEKEEKNNRDLSKDLYSIIKKMPKKSHPMDVARTAVSIMGLEDKETTDSSEEANMRKAIRILAKTPTALAAFYRLRKGKNIIKPKKNLNIAENFFYMCFGKVPQKEIVKAFDVSLILYAEHSFNVSTFTARTITSSLSDIHGAITGAIASLKGPLHGGANEEVMHMMNKIKSPNNALKWINNALDKKEVVMGFGHRVYKSGDSRVPTMRKYFAKVAKIKKDKKFEKIYDIVEKVMIERKNIHPNVDYPTGPTYHLMGFDTDFFTPIFVISRITGWSAHIMEQHAANKLIRPLASYKGNKHRKVLQLNQR

SEQ ID NO: 115229 - protein, 362 aa, Unknown
  Bacterial polypetide isolated from the Sargasso Sea
LLTKQLVSQVMPDINSLTYRGYAVQDLCEKCNFEEVAYLVLNGELPNKKQLKNFIKEERSDRKLSKEILSDIRKMPKKAHPMDVVRTAVSLMSLEDKETRDNSPKANMRKAIRIFAKTPIALAAFFRSRKGKKIIAPIKKLSFSENFFYMCFGKVPKTEIVKAFDVSLILYAEHSFNVSTFTARTITSSLSDIHGAITGAIASLKGPLHGGANEEVMHMMNKIKKPENALKWINKALDKKDVVMGFGHRVYKKGDSRVPTMEKYFKKVALIKNDKKFIKIYDIVKNVMIERKNIHPNVDYPTGPTYHLMGFDTDFFTPIFVISRITGWSAHIMEQHAANKLIRPLSKYSGAKHRKVMLLNQR

SEQ ID NO: 115230 - protein, 369 aa, Unknown
  Bacterial polypetide isolated from the Sargasso Sea
MGEDIKKGLMGVTVDETGISKVMPEINSLTYRGYAAQDLCANCEFEEIAYLILNGELPNKKQLKKFEKEERKERKLSKSLINIIKQMPKKSHPMDVARTAVSVMGLEDKEVTNNSPEANLRKAMRIFAKTPTALASFYRLRKGKKVIAPKKKLSFSENFFYMCFGKVPNKEIVKAFDVSLILYAEHSFNVSTFTARTITSSLSDIHGAITGAIASLKGPLHGGANEEVMHMMKKIKKPENAKRWINNALDKKAVVMGFGHRVYKSGDSRVPTMREYFGRVAKIKKDKTFEKIYDIVEEVMIDRKNIHPNVDYPTGPTYHLMGFDTDFFTPIFVISRITGWSAHIMEQYSTNKLIRPLAAYNGSKYRKVP

SEQ ID NO: 115231 - protein, 279 aa, Unknown
  Bacterial polypetide isolated from the Sargasso Sea
MKKIPKKSHPMDVARTAVSIMGLEDKETTDSSPEANMKKAIRILAKTPTALAAFYRLRKGKNIIKPKKNLNIAENFFYMCFGKVPQKEIVKAFDVSLILYAEHSFNVSTFTARTITSSLSDIHGAITGAIASLKGPLHGGANEEVMHMMNKIKTPANALKWINNALDKREVVMGFGHRVYKSGDSRVPTMRKYFAKVAKIKKDKKFEKIYDIVEKVMIERKNIYPNVDYPTGPTYHLMGFDTDFFTPIFVISRITGWSAHIMEQHAANKLIRLLASYKG

SEQ ID NO: 115232 - protein, 299 aa, Unknown
  Bacterial polypetide isolated from the Sargasso Sea
MDSKKLILKPGLEGVPVTNSSICDIDGNKGKLLYRGYSIEELSKKSSFLETAYLLIWGELPTAIQLRDFEQEVQMHRRLSFRVRDMMKCFPATGHPMDALQSSAASLGLFYSRRAIDDPNYIYNAVIRLIAKIPTMIAAFQLIRKGQDPIQPRDDLTYSSNFLYMLTEKEQDPIAAKVFDRCLILHAEHSLNASTFSARVTASTLTDPYAVIASAVGTLAGPLHGGANEDVIAMLEEIKTPENAASFLDNAIKNKSKIMGFGHREYKVKDPRAIILQKLAEELFIRFGADEMYEVAKSL

SEQ ID NO: 115233 - protein, 374 aa, Unknown
  Bacterial polypetide isolated from the Sargasso Sea
MSDEIKKGLLGIVVDETEVSKVMPEINSLTYRGYAAQDLCAKCKFEEVAYLILNGELPTKKQLKKFEKEERKERKLSKTLIDDIRKFPKKAHPMDVARTAVSIMGLEDKETKDNSPKANMRKVMRIFAKMPVALAAFYRARKGKKIIPPKSKLSFSENFFHMCFGKVPNKEIVKAFDVSLILYAEHSFNVSTFTARTITSSLSDIHGAITGAIASLKGPLHGGANEEVMHMMNKIKKPENALKWINKALDNKDVVMGFGHRVYKSGDSRVPTMREYFGKVAKIKKDKKFEKIYDIVEKVMIDRKNIHPNVDYPTGPTYHLMGFDTDFFTPIFVISRITGWSAHIIEQHAANKLIRPLASYKGSKHRRVLQLNQR

SEQ ID NO: 115234 - protein, 269 aa, Unknown
  Bacterial polypetide isolated from the Sargasso Sea
MNKEKIYIFDTTLRDGAQTEGVNFSIDDKNKIAKALAGLGVDYLEGGWPGANTLDTNFFNKPPKLGNTILTAFGMTKRTGRSAENDPGLSAILNSNTQAVCLVGKTWDFHVDKALGITNKENLENIKESTKVFIKKKKEFMFDAEHFFDGYKNNRDYALSCIKTAYDEGARWIVLCDTNGGTLPHEVGEIVSEVAKIIPGKNLGIHAHNDTENAVANSLTAILSGVRQVQGTINGLGERCGNANLISIIPSLFVKESFSKNFEIGITEV

SEQ ID NO: 115235 - protein, 306 aa, Unknown
  Bacterial polypetide isolated from the Sargasso Sea
EERKERKLSKTLLDDIKKFPKKAHPMDVARTAVSIMGLEDNETKDNSLKANLRKVMRIFAKTPVALAAFYRARKGKKIIAPKKNLSFSENFFHMCFGKVPNKDIVKAFDVSLILYAEHSFNVSTFTARTITSSLSDIHGAITGAIASLKGPLHGGANEEVMHMMNKIKKPENALKWINKALKNKDVVMGFGHRVYKSGDSRVPTMREYFGKVAKIKKDKKFEKIYDIVEKVMIDQKNIHPNVDYPTGPTYHLMGFDTDFFTPIFVISRITGWSAHIIEQHAANKLIRPLASYKGSKHRKVLQLNQR

SEQ ID NO: 115236 - protein, 339 aa, Unknown
  Bacterial polypetide isolated from the Sargasso Sea
MSDEIKKGLLGIVVDETEVSKVMPEINSLTYRGYAAQDLCAKCKFEEVAYLILNGELPSKKQLKKFEKEERKERKLSKTLLDDIKKFPKKAHPMDAARTAVSIMGLEDKETKDNSPAANMRKVMRIFAKTPVALAAFYRARKGKKIIAPKKNLSFSENFFHMCFGKVPNKDIVKAFDVSLILYAEHSFNVSTFTARTITSSLSDIHGAITGAIASLKGPLHGGANEEVMHMMNKIKKPENALKWINKALDNKDVVMGFGHRVYKSGDSRVPTMREYFGKVAKIKKDKKFEKIYDIVEKVMIDRKNIHPNVDYPTGPTYHLMGFDTDFFTPIFVISRITG

SEQ ID NO: 115237 - protein, 209 aa, Unknown
  Bacterial polypetide isolated from the Sargasso Sea
KVPKSEIVKAFDVSLILYAEHSFNVSTFTARTITSSLSDIHGAITGAIASLKGPLHGGANEEVMHMMNKIKKPENALKWINNALDKKEVVMGFGHRVYKSGDSRVPTMRKYFGKVANIKKDKKFEKIYDIVEKVMIDRKNIHPNVDYPTGPTYHLMGFDTDFFTPIFVISRITGWSAHIIEQHSTNKLIRPLAAYNGNKHRQVLSINNR

SEQ ID NO: 115238 - protein, 157 aa, Unknown
  Bacterial polypetide isolated from the Sargasso Sea
GPLHGGANEEVMHMMNKIKKPENALKWINNALKKKEVVMGFGHRVYKSGDSRVPTMKEYFKKVAKIKKDKKFLKIYDIVERVMISKKNIHPNVDYPTGPTYHLMGFDTDFFTPIFVISRITGWSAHIMEQHSSNKLIRPLAKYKGSKYRKVMLLNQR

SEQ ID NO: 115239 - protein, 333 aa, Unknown
  Bacterial polypetide isolated from the Sargasso Sea
KCKFEEVAYLILNGELPSKKQLKKLEKEERKERKLSKTLLDDIKKFPKKAHPMDVARTAVSIMGLEDKETKDNSPKANMRKVMRIFAKMPVALAAFYRARKGKRIIPPKNKLSFSENFFHMCFGKVPNKDIVKAFDVSLILYAEHSFNVSTFTARTITSSLSDIHGAITGAIASLKGPLHGGANEEVMHMMNKIKKPENALKWINKALDNKDVVMGFGHRVYKSGDSRVPTMREYFGKVAKIKKDRKFEKIYDIVEKVMIDRKNIHPNVDYPTGPTYHLMGFDTDFFTPIFVISRITGWSAHIIEQHAANKLIRPLASYKGSKHRKVLQLNQR

SEQ ID NO: 115240 - protein, 84 aa, Unknown
  Bacterial polypetide isolated from the Sargasso Sea
SIALSEDYFIQRNLYPNVDFYSGLIYQSMGIPSPMFTVLFTIGRTPGWLAQWKEFLNDKDQKIARPRQIYTGYDSRDYQDLESR

SEQ ID NO: 115241 - protein, 98 aa, Unknown
  Bacterial polypetide isolated from the Sargasso Sea
LGVNDPLLEIAKQLEEVALKDDYFLDRKLYPNVDFYSGIIYRALGIPTTMFTVMFALGRLPGWISQWKEMREDPKWRIYRPRQIYTGRTITKFEEKNK

SEQ ID NO: 115242 - protein, 74 aa, Unknown
  Bacterial polypetide isolated from the Sargasso Sea
MADYENNKLKKSFTLFNNETGKSYDLPVIKGTEGPDVLDIRKLYQETGMFTYDPGFTSTASCESSITYIDGNKG

SEQ ID NO: 115243 - protein, 227 aa, Unknown
  Bacterial polypetide isolated from the Sargasso Sea
MPRTARIEVNDNSIELPLVVGSEGETGIDIGKLRAETKSITLDPGFVNTGSCESGITFLNGEKGILRYRGYPIEVLAEKSNFLEVSYLLIFGELPSNNELEKFEFNVKRHTMLHEDVKHIYQAFPKDAHPMAILSSIVCALSTFYPDFSATDRDAVDLAIWRLMGKLPTIAAWSYKKNIGQPFVFPVNDYSYAKNFLHMLFSVPTTSYEAPPEFVDALNVLFILHAD

SEQ ID NO: 115244 - protein, 110 aa, Unknown
  Bacterial polypetide isolated from the Sargasso Sea
RHSAHEVLEELGSKDEPLLKLAIELEKLALEDPYFVERKLFPNVDFYSGIILRAMDIPTDLFTVLFAVARTVGWLAQWDEMICDPGQKIGRPRQLYTGPAERSFIPISAR

SEQ ID NO: 115245 - protein, 92 aa, Unknown
  Bacterial polypetide isolated from the Sargasso Sea
LAIAVELEKIALEDDYFVEKKLYPNIDFYSGIVMKSLGFPMDMFTVLFAVGRTVGWVSQWNEMIEDTSQRIGRPRQLYIGSEHRQYIGMHKR

SEQ ID NO: 115246 - protein, 103 aa, Unknown
  Bacterial polypetide isolated from the Sargasso Sea
EVLKDLGIKDPILDIAKSLEEVALNDPYFTSRKLYPNVDFYSGIIYKALQIPTEMFTVMFALGRVPGWIAHWREMRINNDPIGRPRQIYTGSNQRDFVSINKR

SEQ ID NO: 115247 - protein, 90 aa, Unknown
  Bacterial polypetide isolated from the Sargasso Sea
MADKKAVVHIEGLAPIELPIYSGTAGTDVIDVRALGQHGYFTFDPGFMSTGSCESKITYIDGDNGVLLHRGYPIEQLAVKSDYLETCYLL

SEQ ID NO: 115248 - protein, 128 aa, Unknown
  Bacterial polypetide isolated from the Sargasso Sea
MIEEKRFKLVDTKTGKEYEFDGLNGSIGPDVINISSLYKKTGLFTYDPGFTSTAACNSKITYIDGEKGILQYRGYPIEELANNSSHLEVCYLLMHGELPSESDKNEFEEIIKNHTLLNEQIIQFYKGF

SEQ ID NO: 115249 - protein, 92 aa, Unknown
  Bacterial polypetide isolated from the Sargasso Sea
LDIAKQLEEAALTDEYFIDRNLYPNVDFYSGIIYKALGFPTEMFTVLFSLGRLPGWIAHWLEMHNSASKIGRPRQIYTGHTEREYVALSQRN

SEQ ID NO: 115250 - protein, 154 aa, Unknown
  Bacterial polypetide isolated from the Sargasso Sea
MAADSISPKTVTLTQGEGGEQIELPVLDGSIGPSVVDIRKLYGATDMFTFDPGYGATGSCVSGLTYIDGDNGVLMHRGYAIEDLAEKSDFLELAYLLLEGDLPSAEEKTTFDNAISRHTMVHEQLSIFFRGFRRDAHPMAIMCGVVGALSAFYH

SEQ ID NO: 115251 - protein, 92 aa, Unknown
  Bacterial polypetide isolated from the Sargasso Sea
MADYEDNIQKNSFTLFNNETGKSYELPVIKGTDGPDVLDIRKLYQETGMFTYDPGFTSTASCDSSITYIDGNKGVLRHRGYNIHDLASNSEF

SEQ ID NO: 115252 - protein, 98 aa, Unknown
  Bacterial polypetide isolated from the Sargasso Sea
MADYENSKQKNSFTLFNNETGKSYELPVIKGTDGPDVLDIRKLYQETGMFTYDPGFTSTASCDSSITYIDGNKGVLRHRGYNIHDLASNSEFLEVCYL

SEQ ID NO: 115253 - protein, 110 aa, Unknown
  Bacterial polypetide isolated from the Sargasso Sea
IIKKAADDVLGKLGVVDPVLDIAKKLEEVALNDDYFQSRGLYPNVDFYSGIIYRALGIPTEMFTVMFALGRLPGWIAQWKEMMYENQPISRPRQIYTGETARDFVDIDKR

SEQ ID NO: 115254 - protein, 59 aa, Unknown
  Bacterial polypetide isolated from the Sargasso Sea
GFPPEMFTVIFAIARTAGWTAQWTEMIEDPIQKIGRPRQLYTGKGITKYGVGRSSKNTR

SEQ ID NO: 115255 - protein, 237 aa, Unknown
  Bacterial polypetide isolated from the Sargasso Sea
MANNAHSEKSVTMTDNTSGKKVTFSVRSGTIGPDVIDMRNLYGETGMFTFDPGYGATGSCVSGLTYIDGDEGVLLHRGYAIEELAEKADFLELAYLLLEGELPNPIEKKEFDTAITRHTMVNEQLSAFFRGFRRDAHPMAILCGVTGALSAFYHDSTDIHDPRQRMIASHRMIAKMPTLASMAFKYSLGQPFNYPRNNLNYAENFLQMCFAVPAEDYIVDPVLADAMNKIFILHADH

SEQ ID NO: 115256 - protein, 265 aa, Unknown
  Bacterial polypetide isolated from the Sargasso Sea
MSNQLSFEINGRKADLPLYTGSEGETAIDISKLRSQTGTITLDPGYVNTGACTSGITFLNGEEGILRYRGYPIEQLAENSSFLEVSYLLIHGELPNAEQLEDFERNITRHTMLHEDLRHIYQAFPKGAHPMAMLSSVVNALSTFYPDFSATDQKGVDLAIWRLMGKMPTIAGWAFKKNIGQPFIYPDNNLSYCANFLSMMFQVPAVDYEPAEEFVKALNVLFILHADHEQNCSTSTVRLVGSSQANLFASIASGIAALWGPLHGG

SEQ ID NO: 115257 - protein, 237 aa, Unknown
  Bacterial polypetide isolated from the Sargasso Sea
LRAKTGYITLDPGYVNTGSCSSSVTFLDGEKGILRYRGYPIEQLAENSSFVEVAYLLLNGSLPTVKQLDDFNDHLSKHSLIHEDMKHFFEGFSTTAHPMVILSSMVSSLSAYYSEASGAASVNQLEVNTARLMAKIRTIAAFSYKKSIGQPFIYPQDKLAYCANFLNMMFAVPAEPYEVDPEIIKALDLLLILHADHEQNCSASTVRVVGSSMANVYASVASGILALWGPLHGGANQ

SEQ ID NO: 115258 - protein, 96 aa, Unknown
  Bacterial polypetide isolated from the Sargasso Sea
YFKEKNLYPNVDFYSGILLKALGIPTSMFTPIFAVGRTVGWLSQWKEMIEDNEFKITRPRQLFTGDKNRSYKKVPEREKKSIFNLLWLKKTFLNNQ

SEQ ID NO: 115259 - protein, 279 aa, Unknown
  Bacterial polypetide isolated from the Sargasso Sea
PIELPVIIGSEGEKAIDVSKLRAKTGYITLDPGYVNTGSCSSSVTFLDGEKGVLRYRGYPIEQLAENSSFVEVAYLLLHGALPTAQQLDDFNDHLSKHSLIHEDMKHFFEGFSTTAHPMVILSSMVSSLSAYYSEASGAASVNQLDVNTARLMAKIRTIAAFSYKKSIGQPFIYPQNKLAYCANFLNMMFAVPAEPYEVDPEITKALDLLLILHADHEQNCSASTVRVVGSSMANVYASVASGILALWGPLHGGANQQVLRMLERIHAKGDDLDKYVRL

SEQ ID NO: 115260 - protein, 204 aa, Unknown
  Bacterial polypetide isolated from the Sargasso Sea
MNEKNSGTFTLINDKTGEKYTLPVIDGTTGPSVIDVRTLYGETDHFTFDPGYTSTGSCESALTYIDGDKGILLHRGYPIEQLAEHSNFLEVAHLLLYGDLPNQQESEKFVTDITYHTMLHDQLMNFYRGFRRDAHPMAIMCGVVGALSSFYHDSTDIADPHARMVASYRLIAKVPTIAAMAFKYSLGQPFNFPQNKLTYAENFL

SEQ ID NO: 115261 - protein, 245 aa, Unknown
  Bacterial polypetide isolated from the Sargasso Sea
MGKSAKIEYDGKSYTFPVITGSENEEAIDINQLRSETGLITYDPGYKNTGHCISEITYLDGENGVLRYRGYSVDELCQKKSFLEVAYLLIYGDLPTKSEIQKFQEDIREEALVDEDLKQIFKSFPKSAHPMGVLSSLTSALIAFNPLNETKISIKDAAGTTEKDKMYLSTIRLLAKFPIMSSWTLRKIKGLPLNYSNNNIEYTENIAYMMFAKPNQDYKQNDIIVNALNTLLILHADHEQNLFTS

SEQ ID NO: 115262 - protein, 185 aa, Unknown
  Bacterial polypetide isolated from the Sargasso Sea
MDKEVTLHRGLQGVYFDRSETTFIDGKEGVLEYRGYNINDLAEHSSFEETSYLLIYGKLPNKEELSEFDAMLKSYRKLPEEIFDVINVVKDSHPMDALRTTVSALSSFDEDRNDNSEEATIRKGIRLTSQVATIVMAHHNIRNGKEPIDPSDNLNHAGNFLYMLNGKSPDQDTIDLMDKDFYCML

SEQ ID NO: 115263 - protein, 236 aa, Unknown
  Bacterial polypetide isolated from the Sargasso Sea
MSEFDKIQINRNNKKIAELDILKGSLGPDVIDIRNLQKQTGFFTYDPSYGATSSCESSITFIDGDKGILLYRGYPIEQLAEESTFLEIAYLLLKGELPNKQQFEMFSHNIINHTMVHEQILNFYQGFRRNAHPMAILCGATGAMSAFYEDSADINDPNQRMISTNRLIAKIPTLAAMAYKYSVGQPFNYPDNELSYSENFLKMCFAVPTEKYNSQKVLSDAIEKIFILHADHEQNA

SEQ ID NO: 115264 - protein, 59 aa, Unknown
  Bacterial polypetide isolated from the Sargasso Sea
MKSLGYPMDMFTVLFAVGRTVGWVSQWNEMIEDTSQRIGRPRQLYVGSDYRQYVGIHKR

SEQ ID NO: 115265 - protein, 59 aa, Unknown
  Bacterial polypetide isolated from the Sargasso Sea
MTDKIKEKADLKLNGDLYNFDVHEGTIGPDVLDISKLYAQSGKFTYDPGFTSTANCKST

SEQ ID NO: 115266 - protein, 160 aa, Unknown
  Bacterial polypetide isolated from the Sargasso Sea
MADYEDKKVNNKQFTLFNNESGKSYQLPLIESKDGPNVLDIRKLYQETGLFTFDPGFTSTASCESGITYIDGEKGILRHRGYDIHDLASKSEFLEVCYLLLHGELPSPEDKQKFKDVITNHTMLHEQLVNLYRGFRRDAHPMAIMVGVVGALSAFYHDST

SEQ ID NO: 115267 - protein, 252 aa, Unknown
  Bacterial polypetide isolated from the Sargasso Sea
RMVATMPSIVTYWYKYSHDGEDISLVNDEDTMAGHFLYILHGKTPSDLFRRVMDASLILYAEHEFNASTFTARVCASTMSDIHSCVVAAIGSLRGPLHGGANEAAMEMIENWKTREEAKDNILKMLANKDKIMGFGHAVYSERDPRNAVIKEFSKQLAEAYGDDNLYQVSEEVETVMWDEKKLFPNADFFHASAYFYMGIPTKLFTPIFVMSRVTGWTAHCMEQRANNRIIRPSADYTGPESSEWVNIEDRE

SEQ ID NO: 115268 - protein, 286 aa, Unknown
  Bacterial polypetide isolated from the Sargasso Sea
CQFEEVAYLILKGKLPNQSELDAYKAKLRGMRGLPTALKEVLERIPKNAHPMDVLRTGCSMLGNLEMETSFDQQQDVTDRMLACFPSIICYWYRFSHDGVRVDVETDDDSIGGHFLHMLHGEKPRELHEQVMHVSLILYAEHEFNASTFTARVCASTLSDMHSCVTGAIGSLRGPLHGGANEAAMEMIEGFTSADDAEEKMMGMLERKEKIMGFGHAIYSDSDPRNEIIKKWSEKLAADVGDDVLYPVSVRCEEVMWREKKLFCNADFFHASAYNFMGIPTPLFTP

SEQ ID NO: 115269 - protein, 88 aa, Unknown
  Bacterial polypetide isolated from the Sargasso Sea
MADTKAKLTLNGDAAIELDVLKGTLGQDVIDIRSLGSKGMFTFDPGFTSTASCESKITFIDGDEGVLLHRGFPIDQLATESNYLEVCY

SEQ ID NO: 115270 - protein, 286 aa, Unknown
  Bacterial polypetide isolated from the Sargasso Sea
MGKKLEGAGLRGQVAGETALSTVGKEGKGLTYRGYAIEDLAEKATFEEVAYMLLYGKLPNQDEYESYTSKLRSYRDLPRELKNVLTAIPKETHPMDVLRTGTSMLGNLEPEGDFTNQNDTADRILAAMPSIMTYWYRASHFGEDIDTLTDHKTMGGQFLSLLTGSEPSDEHIRALDTSLICYAEHGFNASTFTARTCASTLSDMHSCITAAIGTLRGPLHGGANEAAMEMIERFSSREDANVGVKNMLANKEKIMGFGHAVYSDEDPRNKIVKAWAKKLSSNASNP

SEQ ID NO: 115271 - protein, 146 aa, Unknown
  Bacterial polypetide isolated from the Sargasso Sea
ITQYVAKAKDKNDPFRLMGFGHRVYKNHDPRATIIRKMCHRVLEKLGREQDTPLFELALELEQIALKDSYFIEKNLYPNVDFYSGIIYQALGIPKSMFTVMFAIARTVGWVAQWREMVRDPETRIGRPRQRYIGPAERNYIPITNR

SEQ ID NO: 115272 - protein, 223 aa, Unknown
  Bacterial polypetide isolated from the Sargasso Sea
DSIAGHFLSCLHGKPPSELHEQVMNVSLILYAEHEFNASTFTARVCASTLSDIHSSVTGAIGSLRGPLHGGANEAAMDMISQWSSPDEAETELLEMLKNKDKIMGFGHAIYRESDPRNEIIKGWAKKLSEEVGDKVLYAVSERVDEVMWREKKLFPNADFYHASAYHFMGIPTKLFTPIFVCSRVAGWAAHIMEQRANNRIIRPSADYIGPESSEWVDIEARS

SEQ ID NO: 115273 - protein, 239 aa, Unknown
  Bacterial polypetide isolated from the Sargasso Sea
MGKKLEGAGLRGQVAGETALSTVGKEGKGLTYRGYAIEDLAEKATFEEVAYMLLYGKLPNQDEYDSYTSKLRNYRDLPRELKNVLTAIPKETHPMDVLRTGTSMLGNLEPEGDFTNQNDTADRILAAMPSIMTYWYRASHFGEDIDTLTDHKTMGGQFLSLLTGSEPSDEHIRALDTSLICYAEHGFNASTFTARTCASTLSDMHSCITAAIGTLRGPLHGGANEAAMEMIERFSSRED

SEQ ID NO: 115274 - protein, 161 aa, Unknown
  Bacterial polypetide isolated from the Sargasso Sea
GPLHGGANEDVIAMLEEIKTPENAGSFLDNAIKNKSKIMGFGHREYKVKDPRAIILQKLAEELFIRFGADEMYEVAKSVEAEAIPRLGPKGIFPNVDFYSGLVYRKLGIPRDLFTPIFAISRVAGWLAHWREQLGANRIFRPSQIYTGSAPRDWISLENRE

SEQ ID NO: 115275 - protein, 295 aa, Unknown
  Bacterial polypetide isolated from the Sargasso Sea
KRFIKEERAERKLSKSILNDIKRMPKNAHPMDVIRTCVSLMGLEDKDTKNNSPKANMRKAMRIFSKTPTAVAAYFRARKGKKIISPDKKLSFSENFFKMMFNKVPDKEIVRAFDISLILYAEHSFNVSTFTARTITSSLSDLHGAITGAIASLKGPLHGGANEAVMHMMKEIGKPEKAKNWIENALSKKKVVMGFGHRVYRTGDSRVPTMKHYMFKVAKLLNKEKYTKIYEILEKVMIEKKNIHPNVDFPCGPTYYMMGIDIDFYTPIFVMSRITGWSAHIMEQHASNKLIRPFI

SEQ ID NO: 115276 - protein, 192 aa, Unknown
  Bacterial polypetide isolated from the Sargasso Sea
YAEHSFNVSTFTARTITSSLSDLHGAITGAIASLKGPLHGGANEAVMHMMKEIKKPEKAKTWIENALDKKKVIMGFGHRVYRTGDSRVPTMKHYMFKVAKLLKKEKYTQIYEILEKVMLEKKNIHPNVDFPCGPTYYMMGIDIDFYTPIFVMSRITGWSAHIMEQHASNKLIRPLSKYKGQEVREVMLLNQR

SEQ ID NO: 115277 - protein, 281 aa, Unknown
  Bacterial polypetide isolated from the Sargasso Sea
MGKKLEGAGLRGQVAGETALSTVGKEGKGLTYRGYAIEDLAEKATFEEVAYMLLYGKLPNQDEYDSYTSKLRNYRDLPRELKNVLTAIPKETHPMDVLRTGTSMLGNLEPEGDFANQNDTADRILAAMPSIMTYWYRASHFGEDIDTLTDHKTMGGQFLSLLTGSEPSYEHTRALDTSLICYAEHGFNASTFTARTCASTLSDMHSCITAAIGTLRGPLHGGANEAAMEMIERFSSREDANVGVKNMLANKEKIMGFGHAVYSDEDPRNKIVKAWAKKLSS

SEQ ID NO: 115278 - protein, 206 aa, Unknown
  Bacterial polypetide isolated from the Sargasso Sea
LLILHADHEQNCSTSTVRIVGSSEASLFASVSAGISALWGRLHGGANQAVLEMLEAIKNDGGDTKKFMEKAKDKNDPFRLMGFGHRVYKNFDPRAKIIKVAAHEVLKDLGIKDPILDIAKSLEKEALNDPYFTTRKLYPNVDFYSGIIYKALQIPTEMFTVMFALGRVPGWIAHWREMRMNNDPIGRPRQVYTGSNQRDFVSINKR

SEQ ID NO: 115279 - protein, 199 aa, Unknown
  Bacterial polypetide isolated from the Sargasso Sea
MNVSLILYAEHEFNASTFTARVCASTLSDLYSCVTAAIGSLRGPLHGGANEAAMEMIERFSSAQEAVEGTLGMLARKDKIMGFGHAIYKDSDPRNEVIKGWSKKLADEVGDTVLFPVSEAIDKTMWEQKKLFPNADFYHASAYHFMGIPTKLFTPIFVCSRLTGWAAHVFEQRANNRIIRPSAEYTGVEQRKFVPIERR

SEQ ID NO: 115280 - protein, 283 aa, Unknown
  Bacterial polypetide isolated from the Sargasso Sea
MSEEIKKGLLGIVVDETTISHVVPELSALTYRGYTVQELCDKCDFEEVAYLVLNGELPNKSQLKKFIKQERSERKLSKQILNDIKKMPRNAHPMDVIRTCVSLMALEDKDTKDNSPKANMRKAMRIFAKTPTAVAAYFRTRKGKSIIAPSKKLSFSENFFKMMFNKVPDKEIVRAFDISLILYAEHSFNVSTFTARTITSSLSDLHGAITGAIASLKGPLHGGANEAVMHMMKEIGKPEKAKAWIENALNKKKVVMGFGHRVYRTGDSRVPTMKHYMFKVAKL

SEQ ID NO: 115281 - protein, 214 aa, Unknown
  Bacterial polypetide isolated from the Sargasso Sea
TGKGLTYRGFAIEELAEKATFEEVAFMLLYGHLPNQEEFNSYSNKLKGHRKLPKELMEVLERIPSSTHPMDVMRTGCSMLGNLEPEGDFSNQNETADRILAAMTSIITYWYRYSHDGVKVDTATDHETIGGQFLSLLTGKEPSEEHSRALDVSLILYAEHGFNASTFTARTCASTLSDMHSCITGAIGTLRGPLHGGANEAAMDMIEKFSTRED

SEQ ID NO: 115282 - protein, 270 aa, Unknown
  Bacterial polypetide isolated from the Sargasso Sea
EKCSFEEVAYLILNKELPNKIKLKKFKKELEENRNITINLREIVKHMPKRAHPMDVARTVVSVMGLEDKDTSNNSPTANMRKAIRIFAKTPTAMAAFFRARKSKNVIPPKKGLGFSENFFYMCFGKIPNKEIVKAFDISLILYAEHSFNVSTFTARTITSSLSDIHSAITGAIGSLKGPLHGGANEAVMHMMNRIKKPENALKWINNALNKKEVVMGFGHRVYKKGDSRVPTMEKYFKKISKIKNDKTFHKIHDIVKKVMIERKDIHPQC

SEQ ID NO: 115283 - protein, 66 aa, Unknown
  Bacterial polypetide isolated from the Sargasso Sea
MTPSEVKATLSFSDGSPSVELPIYKGTVGPDVIDIRKLYGQTGKFTYDPGFMSTASCNSKITYIDG

SEQ ID NO: 115284 - protein, 163 aa, Unknown
  Bacterial polypetide isolated from the Sargasso Sea
GANQAVLEMLMRIHNDGGNIDKYVDMAKDKDSGFRLMGFGHRVYKNFDPRALIIKNYCDQILEKVGLHDPLLDIAKQLEHVALEDDFFKERKLYPNVDFYSGIIYKALGFPIDMFTVLFALGRLPGWIAHWVEMSQSPPKIGRPRQIYTGASERPFLPLEARG

SEQ ID NO: 115285 - protein, 223 aa, Unknown
  Bacterial polypetide isolated from the Sargasso Sea
MVKKKLNKKNNRRAKLIIDNTSYEFPIYNSTEGEAVIDISKLHAEANIFTYDPGFTSTASCESKITYIDGDKGILRYRGYDIEELAKKSDFIEVVNLLIYGDLPNKKQLTKYKKLITRHTLLHQQIINFFQGFRRDAHPMAMMVGVMGALSSFYQDTLNINDSHQRQEATRRIIAKSATIGAMAYKYSLGQAFVSPRNNLSFSENFLYMCFSNTAENYKVSPV

SEQ ID NO: 115286 - protein, 308 aa, Unknown
  Bacterial polypetide isolated from the Sargasso Sea
LSCLNGELPNKNQLKRFIKQERSERKLSKQILNDIKKMPRNAHPMDVIRTCVSLMALEDKDTKDNSPKANMRKAMRIFAKTPTAVAAYFRTRKGKTIIAPSKKLSFSENFFKMMFNKVPDKEIVRAFDISLILYAEHSFNVSTFTARTITSSLSDLHGAITGAIASLKGPLHGGANEAVMHMMKEIGKPEKAKAWIENALNKKKVVMGFGHRVYRTGDSRVPTMKHYMFKVAKLLKKEKYTRMYEILEKVMIQRKNIHPNVDFPCGPTYYMMGIDIDFYTPIFVMSRITGWSAHIMEQHASNKLIRPL

SEQ ID NO: 115287 - protein, 271 aa, Unknown
  Bacterial polypetide isolated from the Sargasso Sea
MGLEDKDTRDNSPKANMNKAMRIFAQTPTAVAAYFRARKGKKFIPPNKKLSYSENFFNMMFGKVPNKEIVKAFDVSMILYAEHSFNVSTFTARTITSSLSDMHGAITGAIASLKGPLHGGANEAVMHMFKEIKNPEKAETWINNALNKKKVVMGFGHRVYRSGDSRVPTMKKYFLKVAELKNNTKYPKMYEILEKVMLERKNIHPNVDYPCGPTYHLMGIDTDFFTPVFVMARITGWSAHIIEQHAANKLIRPLSKYKGSEHREVLSLNIR

SEQ ID NO: 115288 - protein, 182 aa, Unknown
  Bacterial polypetide isolated from the Sargasso Sea
FTARTITSSLSDLHGAITGAIASLKGPLHGGANEAVMHMMKEIKKPEKAKTWIENALNKKKVIMGFGHRVYRTGDSRVPTMKHYMFKVAKLLKKEKYTQIYEILEKVMLEKKNIHPNVDFPCGPTYYMMGIDIDFYTPIFVMSRITGWSAHIMEQHASNKLIRPLSKYKGQEVREVMLLNQR

SEQ ID NO: 115289 - protein, 110 aa, Unknown
  Bacterial polypetide isolated from the Sargasso Sea
DKHDDPLLKVALELERIALEDEYFIQKKLFPNVDFYSGFILKALGFPTSMFTVLFAIGRTVGWISQWKEMIEDPINKIGRPRQLYLGKTSRVYQQESTREKKSIFKWLWK

SEQ ID NO: 115290 - protein, 150 aa, Unknown
  Bacterial polypetide isolated from the Sargasso Sea
IKNDGGDTKKFMEKAKDKNDSFRLMGFGHRVYKNFDPRAKIIKVTAHEVLKDLGIKDPILNIAKSLEKEALNDPYFTSRKLYPNVDFYSGIIYKALNIPTEMFTVMFALGRVPGWIAHWREMRMNNDPIGRPRQVYTGSKKRDFLPLKNR

SEQ ID NO: 115291 - protein, 115 aa, Unknown
  Bacterial polypetide isolated from the Sargasso Sea
RAKLIRATCDRLLEKLSRRDPIFDMAQQLEEVALADEYFIERKLYPNVDFYSGVIYRAMGIPVQMFTVLFTMGRLAGWIAHWIEMHHSPTKKICRPRQVYTGETLREFVPIADRT

SEQ ID NO: 115292 - protein, 269 aa, Unknown
  Bacterial polypetide isolated from the Sargasso Sea
VQDLCEKCIFEEVAYLVLNGELPRSKELKKFINEERNNRKLSKQILNDIKNMPKKAHPMDAVRSAVSLMGLEDKDARDNSPKANMRKAMRIFAQTPTAVAAYFRARKGKKFIPPNKKLSYSENFFHMMFGKVPKKEIVEAFDVSMILYAEHSFNVSTFTARTITSSLSDMHGAITGAIASLKGPLHGGANEAVMHMFKEIKSPQKAKSWINNALDKKKVVMGFGHRVYRSGDSRVPTMKKYFLKVAELMKNTKYPEMYNILEEVMLERK

SEQ ID NO: 115293 - protein, 330 aa, Unknown
  Bacterial polypetide isolated from the Sargasso Sea
KLEGAGLRGQVAGQTALSTVGKEGQGLTYRGYAIEDLAEKATFEEVAYMLLYGKLPNQDEYDSYTSKLRKYRDLPRELKSVLNAIPKETHPMDVLRTGTSMLGNLEPEGGFANQNDTADRILAALPSIMTYWYRASHFDEDINTLTDHKTMGGQFLSLLTGSEPTEEHTRALDTSLICYAEHGFNASTFTARTCASTLSDMHSCITAAIGTLRGPLHGGANEAAMEMIERFSSREDANVGVKNMLENKEKIMGFGHAVYSDEDPRNKIVKAWAKKLSSNASNSIIYEVSEEIEKVMSEEKISLQYRFLYGICIQFFRHTNTNLYSTFCYW

SEQ ID NO: 115294 - protein, 223 aa, Unknown
  Bacterial polypetide isolated from the Sargasso Sea
MANKNRRLNNKFAKLSLNNKTFKLPIYNSTQGESVIDISKLHSQAKIFTYDPGFTSTASCESKITFIDGDKGILRYRGYDIEELAIKSDFIEVVNLLIYGDLPNKEQLIKYKKLITRHTLLHEQIINFFQGFRRDAHPMAMMVGVMGALSSFYQDSLDINDPHQRQEATRRIIAKSSTIGAMAYKYSIGQAFVSPKNNLSFSENFLHMCFSNTAEEYKISPSL

SEQ ID NO: 115295 - protein, 85 aa, Unknown
  Bacterial polypetide isolated from the Sargasso Sea
MGGQFLSLLTGSEPTEEHTRALDTSLNCYAEHGFKASTFTARTCASTLSEMHSCITAAIGTLRGPLHGGANEAAMEMIERISSRE

SEQ ID NO: 115296 - protein, 250 aa, Unknown
  Bacterial polypetide isolated from the Sargasso Sea
ETTISQVMPDINSLTYRGYAVQDLCEKCCFEEVAYLILNKELPNKSKLKKFKKELEENRNITINLREIVKHMPKKSHPMDVARTVVSVMGLEDKDTSNNTPAANMRKAIRIFAKTPTAMAAFFRTRKGKNVIPPKKGLGFSENFFYMCFGKIPSKEIIKTFDISLILYAEHSFNVSTFTARTITSSLSDIHSAITGAIGSLKGPLHGGANEAVMHMMNKINKPESALKWINNALDKKEVVMGFGHRVTKK

SEQ ID NO: 115297 - protein, 249 aa, Unknown
  Bacterial polypetide isolated from the Sargasso Sea
MSEDIKKGLMGIVVDETTISQVMPEINSLTYRGYKVQDLCQKCSFEEVAYLVLNGELPKSKELKKFIKEERNNRKLSKQILNNIKNMPKKAHPMDAIRTAVSLMGLEDKDVRDNSPKANMKKAMRIFSQTPTAVAAYFRARKGKKFILPNKKLSYSENFFNMLFGKVPNKEIVKAFDVSMILYAEHSFNVSTFTARTITSSLSDMHGAITGAIASLKGPLHGGANEAVMHMFNKIKKPENAEAWINNAL

SEQ ID NO: 115298 - protein, 251 aa, Unknown
  Bacterial polypetide isolated from the Sargasso Sea
ILAAMPSIMTYWYRASHFGEDIDTLTDHKTMGGQFLSLLTGSKPSDEHIRALDTSLICYAEHGFNASTFTARTCASTLSDMHSCITAAIGTLRGPLHGGANEAAMEMIERFSSREDANVGVKNMLANKEKIMGFGHAVYSDEDPRNKIVKAWAKKLSSNASNPVIYEVSEEIEKVMSEEKNLFANTDFYMASAYNFLGIPTPIFTPLFVIGRTSGWAANVMEQRADNRIIRPSEEYIGPESATWVDLQDRD

SEQ ID NO: 115299 - protein, 224 aa, Unknown
  Bacterial polypetide isolated from the Sargasso Sea
PTKNFEVYEEFVQALNILFILHADHEQNCSTSTVRLVGSSEANLFASISTGIAALWGRLHGGANQAVLEMLEQIHNDNEGIQKFLNLAKDKKSNFKLMGFGHRVYKNFDPRAKILKKYCDKILKLLGTKDPLLDIAKRLEEAALTDSYFIDRNLYPNVDFYSGIIYKAMGFPTDMFTVLFALGRLPGWIAHWLEMRNGISKIGRPRQIYTGETVRKYIPLSKRG

SEQ ID NO: 115300 - protein, 143 aa, Unknown
  Bacterial polypetide isolated from the Sargasso Sea
MIDEKRFKLVDTKTGKEYEFDGIKGSIGPDVINISSLYKKTGLFTYDPGFTSTAACNSKITYIDGEKGILQYRGYPIEELANNSSHLEVCYLLMHGELPSESDKNEFEEIIKNHTLLNEQIIQFYRGFRRDAHPMAMMIGIVG

SEQ ID NO: 115301 - protein, 98 aa, Unknown
  Bacterial polypetide isolated from the Sargasso Sea
ENEPLLLLAKELESIALKDSYFVDRKLFPNVDFYSGIILRAMGFPSNMFTVLFALARTVGWITHWMEMASEESIKIGRPRQLYTGHPQRSYIKIINRK

SEQ ID NO: 115302 - protein, 307 aa, Unknown
  Bacterial polypetide isolated from the Sargasso Sea
LSLLYGKLPTITELSNYKNCLKSLRDLPDSLKKVLREIPASAHPMAVMATGCSMLGNLEPEESMDAQMDSINRMVATLPSIVTYWYRYSHDGEDISLVNDEDTIAGHFLHILHGKTPSDLHRRVMDASLVLYAEHEFNASTFTARVCASTMSDIFSCVVAAIGSLKGPLHGGANEAAMEMIENWKTRDEAKTNILDMLANKGKIMGFGHAIYSEKDPRNAVIKEFSKELSQEYGDDTLYQVSEEVEQVMWDEKKLFPNADFFHASAYFYLGIPTKLFTPIFVMSRVTGWTAHCMEQRANNRIIRPQC

SEQ ID NO: 115303 - protein, 320 aa, Unknown
  Bacterial polypetide isolated from the Sargasso Sea
VAYLILNDDLPNKNQLSEFKKNERNNREISGNLKSIIKNYPKKAHPMDTTRTSISHMGLEDPDASDNSKEANMRKSLRLLSKISTAVAANFRVRKGQDIIEPNNDLDFCENFFHMCFGKVPSKEVVKAFDASMTLYAEHSFNASTFTSRVITSSLSDMHGAVTGAVASLKGPLHGGANEAVAHMLNEVGSSDKAEEFILNKIKNKELIMGFGHRVYRNGDSRVPTMTEYFHKTAKYYKNSELPKISKILEDTMLREKNIKPNLDFPAGPTYLLMGFDIDFFTPIFIVSRITGWCAHIMEQFESNKLIRPLSKYTGTSHKK

SEQ ID NO: 115304 - protein, 99 aa, Unknown
  Bacterial polypetide isolated from the Sargasso Sea
GSADSPLLELAIALEEIALKDDYFRERNLYPNVDFYSGIIYQALGIPTSMFTVMFAIGRTVGWVSHWREMITDPNSKISRPRQLYTGPGKRNYISIDKR

SEQ ID NO: 115305 - protein, 229 aa, Unknown
  Bacterial polypetide isolated from the Sargasso Sea
AVPAEPYEVDPEIVQALDLLLILHADHEQNCSASTVRVVGSSMANVYASVASGILALWGPLHGGANQQVLRMLEQIHADGDDLDKYVRLAKDPDSDFRLMGFGHRVYKNFDPRATIIKGACDRVLNLLGVDDPLLDLARRLEEVALSDEYFVERKLYPNVDFYSGIIYRAIGIPENMFTVMFALGRLPGWIAQWKEMHQDPKTKIARPRQIYNGETVRDYVPIEKRVAG

SEQ ID NO: 115306 - protein, 81 aa, Unknown
  Bacterial polypetide isolated from the Sargasso Sea
LKDDYFREKNLYPNVDFYSGIIYQALGIPTSMFTVMFAIGRTVGWVSHWREMITDPNSKISRPRQLYTGPEKRNYISIDKR

SEQ ID NO: 115307 - protein, 279 aa, Unknown
  Bacterial polypetide isolated from the Sargasso Sea
DLEVSPEKVKGKKYDEKYFLNTSAALIGALGSIVAAWHRIRNGDEPISSKPDCTYAENFLHILGAEKITPLMTRIMDATLVLHGEHTINASTFTAMVTSSTLANASQVVASAIGSLSGPLHGGANEKVIAMLQKIQSKEEIRPWLDETLKAKNVVWGMGHREYSVKDPRANILTDMVQELFEEREGGVTDIFEKAIELEKACEEKLSHKGVYPNVDFYSGILYKEMDIPTDIFTPIFAMSRVSGWLAHWIEQIQDNKIFRPTQNYVGSNDRAYVDISDR

SEQ ID NO: 115308 - protein, 300 aa, Unknown
  Bacterial polypetide isolated from the Sargasso Sea
LSKKSSFLETAYLLIWGELPTAIQLRDFEQEVQMHRRLSFRVRDMMKCFPATGHPMDALQSSAASLGLFYSRRAIDDPNYIYNAVIRLIAKIPTMIAAFQLIRKGQDPIQPRDDLTYSSNFLYMLTEKEQDPIAAKVFDRCLILHAEHSLNASTFSARVTASTLTDPYAVIASAVGTLAGPLHGGANEDVIAMLEEIKTPKNAASFLDNAIRNKSKIMGFGHREYKVKDPRAIILQKLAEELFIRFGADEMYEVAKSLEAEAIPRLGPKGIFPNVDFYSGLVYRKLGIPRDLFTPNFCNI

SEQ ID NO: 115309 - protein, 78 aa, Unknown
  Bacterial polypetide isolated from the Sargasso Sea
MPKNIRTSKKNSAKLVIKNKTYELPIYNSTEGESVIDISKLHSQAKIFTYDPGFTSTASCESKITFIDGDKGILRYRG

SEQ ID NO: 115310 - protein, 221 aa, Unknown
  Bacterial polypetide isolated from the Sargasso Sea
MTDKTAKLTIDGKEIDLPIYEATNGPDVVDVGKLTGQGYFTYDPGFVSTAACDSEITFIDGDQGILLHRGYPIEQLAEKSQHLELCYLLLNGELPSESELNEFIANVKSRAAVDSQFKEFFKGFKTNAHPMAIMCGVTGALAASFHNSLDIDNAEDRKETSLQLIAKIPTMAAMSYKNALGEDFVEPREDLGYAENFLHMMFAKKGEDYKVSPTIAKAMGR

SEQ ID NO: 115311 - protein, 215 aa, Unknown
  Bacterial polypetide isolated from the Sargasso Sea
EPEGEFSNQNETADRVLASMASIITYWYRYSHEGVKVETATDHPTIGGQFLSLLTGNEPSEEHSRALDVSLILYAEHGFNASTFTARTCASTLSDMHSCITGAIGTLRGPLHGGANEAAMEMIEKFSNREEAKSGVLDLLANKEKIMGFGHAVYSTEDPRNAIIKEWSKKLSEIDGDATLYEVSDEIERVMDEEKGMFANTDFFMASAYHYLGIP

SEQ ID NO: 115312 - protein, 137 aa, Unknown
  Bacterial polypetide isolated from the Sargasso Sea
MVKKKKINKKNIRKAKLIIDETTYEFPIYNSTEGESVIDISKLHAEANVFTYDPGFTSTASCESKITYIDGIKGILRYRGYDIEELARKSDFIEVVNLLIYGDLPNKEQLIKYKRLITRHTLLHEQIINFFQGSGEM

SEQ ID NO: 115313 - protein, 211 aa, Unknown
  Bacterial polypetide isolated from the Sargasso Sea
MSEKNNKIANLKLPNGSNIEFPIHSGTIGPDVIDVKKLYSESDHFTYDPGFTSTGSCKSKITYIDGEKGVLLHRGYKIEDLAENCDFLEVAYLLLNSDLPNPEQKKVFDNKITTHTMIHEQLSMFFRGFRRDAHAMAVMCGVVGALSAFYHDSTDITDPSQRLVASHRLVAKIPTIAAMAYKFSIGQPFIYPRNDLSYSENFLNMMFSVPA

SEQ ID NO: 115314 - protein, 213 aa, Unknown
  Bacterial polypetide isolated from the Sargasso Sea
MMFGKVPNKEIVKAFDVSMILYAEHSFNVSTFTARTITSSLSDMHGAITGAIASLKGPLHGGANEAVMHMFKEINKPEKAQTWINNALDNKKVVMGFGHRVYRSGDSRVPTMKKYFLKVAELKKNKKYPEIYETLEKVMLERKNIHPNVDYPCGPTYHLMGIDTDFFTPVFVMARITGWSAHIIEQHAANKLIRPLSKYKGSEHREVLSLNIR

SEQ ID NO: 115315 - protein, 143 aa, Unknown
  Bacterial polypetide isolated from the Sargasso Sea
DEYVAKAKDKADPFRLMGFGHRVYKNFDPRATVMRQTCHEVLAELNIQDPLLDIAMKLEQIALEDPYFVEKKLYPNVDFYSGIILKAIGIPTSMFTVIFAMARTVGWISHWDEMLSQPGHKISRPRQLYTGETHRDYKATDKR

SEQ ID NO: 115316 - protein, 80 aa, Unknown
  Bacterial polypetide isolated from the Sargasso Sea
DDYFIKKKLYPNVDFYSGIILKALGLPESMFTVIFAVARTVGWISQWKEMIGMEKSKISRPRQLYTGKAKRDFIDINDRK

SEQ ID NO: 115317 - protein, 240 aa, Unknown
  Bacterial polypetide isolated from the Sargasso Sea
MSEEIKKGLLGIVVDETTISHVVPELSALTYRGYTVQELCDKCDFEEVAYLVLNGELPNKNQLKKFIKQERSERKLSKQILNDIKRMPRNAHPMDVIRTCVSLMALEDKDTKDNSPKANMRKAMRIFAKTPTAVAAYFRSRKGKSIIAPSKKLSFSENFFKMMFNKVPDKEIVRAFDISLILYAEHSFNVSTFTARTITSSLSDLHGAITGAIASLKGPLHGGANEAVMHMMKEIGKPEK

SEQ ID NO: 115318 - protein, 239 aa, Unknown
  Bacterial polypetide isolated from the Sargasso Sea
MSEEVKKGLLGIVVDETTISQVMPEINSLTYRGYTVQELCDKCSFEEVAYLVLNGELPNKKQLRKFEKEERSNRKLSKQILSDISKMPKKAHPMDVIRTAVSLMGLEDKETKDNSPKANMRKAMRIFAQAPTAVAAFFRLRKGKKIVKPNPRLSFAENFLNMMFNRIPNKEITRAFEISLILYAEHSFNVSTFTARTITSSLSDIHGAITGAIASLKGPLHGGANEAVMHMMKEIKKPE

SEQ ID NO: 115319 - protein, 72 aa, Unknown
  Bacterial polypetide isolated from the Sargasso Sea
KLYPNVDFYSGIILDAMGFPTSMFTPIFALARTVGWISQWKEMISDPSNKIGRPRQLYTGVEYRDYVKLNER

SEQ ID NO: 115320 - protein, 239 aa, Unknown
  Bacterial polypetide isolated from the Sargasso Sea
MKANSNNSAGLRGQVAGETELCTVGQSGTGLTYRGYEITDLANNAEFEEIAFLLLKGHLPKSQELNSYKTKLKKLREIPSELKSVLEQIPSNSHPMDVMRTGCSMLGCLETEESFSEEDDKIDRMLALFPSIISYWYRYSHDKVRIDTVTDDDTIGAHFLRLLHDEKPSDLYTKVMNVSLILYAEHEFNASTFAARVCASTLSDLHSCITAAIGTLRGPLHGGANEAAMDLIQKFKSPG

SEQ ID NO: 115321 - protein, 245 aa, Unknown
  Bacterial polypetide isolated from the Sargasso Sea
AAWHRIRSDQDPISSNPESTYAENFLLMLGAEKITPLMTRIMDATLVLHGEHTINASTFTAMVTSSTLANASQVVASAIGSLSGPLHGGANEKVVSMLSKIDSKDDIRPWLDDTLKAKNVVWGMGHREYSVKDPRANILTDMVQELFNEREGGVTDIFEKAIELEKACEEKLAHKGVYPNVDFYSGILYKEMDIPTDIFTPIFAMSRVSGWLSHWIEQIQDNKIFRPTQNYVGSDDRDYTDISGR

SEQ ID NO: 115322 - protein, 133 aa, Unknown
  Bacterial polypetide isolated from the Sargasso Sea
MADKKATVHIDGLDPIELPIYQGTAGQDVIDVRTLGSHGHFTYDPGFMSTGSCESSITYIDGGKGVLLHRGYPIEQLADESNYIELCYLLLNGELPTKEQYEAFAQEITHNTMLDTKIANFFQGFRFDAHPMA

SEQ ID NO: 115323 - protein, 198 aa, Unknown
  Bacterial polypetide isolated from the Sargasso Sea
NCSASTVRVVGSSMANVYASVASGILALWGPLHGGANQQAVQMLQQIYEDGSNISKYIELAKNKKNKFRLMGFGHRVYKNFDPRARIIKKVCHKLLNKLGVKDPLLQIALDLENATLEDEYFIEKKLYPTLDFYTGIMYRAIGIPLNMFTVMFALGRVPGWIAQWKEMHEDKTQKIARPRQLFIGPNKRKYKNINERS

SEQ ID NO: 115324 - protein, 128 aa, Unknown
  Bacterial polypetide isolated from the Sargasso Sea
MADTPTKSATLKIDGEDNAIELPIYSGNLGPDVVDVGKLTGQGYFTYDPGFVSTASCDSEITFIDGDNGVLLHRGYPIEQLAEKSSYLELCYLLLNGELPSKEEGEAFVDTIKHHTMVNETLRQFLWA

SEQ ID NO: 115325 - protein, 182 aa, Unknown
  Bacterial polypetide isolated from the Sargasso Sea
FTARTITSSLSDMHGAITGAIASLKGPLHGGANEAVMHMFKEIKTPEKAKDWINNALDKKKVVMGFGHRVYRSGDSRVPTMKRYFLKVAEIMKNNKYPKIYETLEKIMLERKNIHPNVDYPCGPTYHLMGIDTDFFTPVFVMARITGWSAHIMEQHTANKLIRPLSKYKGSEHREVLALNIR

SEQ ID NO: 115326 - protein, 263 aa, Unknown
  Bacterial polypetide isolated from the Sargasso Sea
MTEDIKKGLLGIVVDETTISHVVPELSALTYRGYKVQDLCDKCEFEEVAYLVLHGELPSKKQLKKFTKQERSERKLSNSILKDIKRMPKNAHPMDVIRTCVSLMALEDKDTKDNSPKANMRKAMRIFAKTPTAVAAYFRVRKGKKIISPDKKLSFSENFFKMMFNKVPDKEIVRAFDISLILYAEHSFNVSTFTARTITSSLSDLHGAITGAIASLKGPLHGGANEAVMHMMKEIGKPEKAKSWIENALSKKKVVMGFGHRVT

SEQ ID NO: 115327 - protein, 275 aa, Unknown
  Bacterial polypetide isolated from the Sargasso Sea
MYGALPNQNEFNEYSNKLISMRALPESLIEVLERIPAEAHPMDVMRTGCSMLGNIEPEGDFSNQQESADRILATMASVIVYWYKYSHEGVKVNTETDNPTIGGHFLSLLHGKEVGEDQIRCLDTSLILYAEHGFNASTFTARTCASTLSDIHSCITGAIGTLRGPLHGGANEAAMELIEKFSSTEEAKLAVLKMLENKEKIMGFGHAVYSTEDPRNAIIKKWSEKLSKDNGDETLYLVSAEIEKTMDEEKNMFANTDFFMASAYSYLGIPTKLFT

SEQ ID NO: 115328 - protein, 250 aa, Unknown
  Bacterial polypetide isolated from the Sargasso Sea
PVIVGSEGEKALDISRLRSGTSYITLDEGFVNTGSTTSGITFLDGEKGILRYRGYPIEDLAARCDFIEVAYLLIYGELPTEDELTTFRNSLSNHSMIHEDMRSFYSGFPRDAHPMAIVGSVVGALSTFYQDSLDVRDPKQVEVSVHRLLAKLPTIAAYSYKKSIGQPLIYPRNDRSYCENFLKMMFAVPCEEYEIDPDFAEALDMLLIVHADHEQNCSTSTVRMVGSSDANLFASISAGVSALWGPLHGG

SEQ ID NO: 115329 - protein, 110 aa, Unknown
  Bacterial polypetide isolated from the Sargasso Sea
MKNKNFAKLSINNKTYNLPIYKASEGNSVIDIAKLFAESGHFTYDPGFTSTASCQSKITYIDGDKGILRYRGYDIEDLAKNSDFIEVTNLLIYGDLPNKKQLNKYYKLDI

SEQ ID NO: 115330 - protein, 179 aa, Unknown
  Bacterial polypetide isolated from the Sargasso Sea
MLEKPQKYAELKIDEKSIKVPVSKGTLGPDVLDIRTLYKETGLFTYDPGFTSTASCDSNITFIDGDKGELLYRGYPIEELAEKSTFLEVSYLLLRGELPDKSQYDDFCSRVTRHTMLHEQMLNFFRGFRRDAHPMAIVCGVQAAMSAFYHDSTDINDPWQREVATIRMIAKLPTIVAGL

SEQ ID NO: 115331 - protein, 261 aa, Unknown
  Bacterial polypetide isolated from the Sargasso Sea
NKNQLSEFKKNERNNREISDNLKSIIKNYPKKAHPMDTTRTSISHMGLEDPDASDNSKEANMRKSLRLLAKISTAVAANFRVRKGQDIIEPNNDLDFCENFFHMCFGKVPSKEVVKAFDASMTLYAEHSFNASTFTSRVITSSLSDMHGAVTGAVASLKGPLHGGANEAVAHMLNEVGSSDKAEEFILNKIKNKELIMGFGHRVYRNGDSRVPTMTEYFHKTAKYYKNSKLPKISKILEDTMLREKNIKPNLDFPAGPTYL

SEQ ID NO: 115332 - protein, 198 aa, Unknown
  Bacterial polypetide isolated from the Sargasso Sea
ILHAEHSLNASTFSARVTASTLTDPYAVIASAVGTLAGPLHGGANEDVIAMLEEIKTPENAGSFLDKAIKNKSKIMGFGHREYKVKDPRAIILQKLAEELFIRFGADEMYEVAKTLEAEAIPRLGPKGIFPNVDFYSGLVYRKLGIPRDLFTPIFAISRVAGWLAHWREQLGANRIFRPSQIYTGSAPRAWISLENRE

SEQ ID NO: 115333 - protein, 241 aa, Unknown
  Bacterial polypetide isolated from the Sargasso Sea
MSEEIKKGLLGIVVDETTISHVVPELSTLTYRGYTVQELCDKCDFEEVAYLVLHGELPNKKQLKKFIREERSERRLSRQILKDIQKMPKNAHPMDVIRTCVSLMALEDKDTKDNSPKANMRKAMKIFAKTPTAVAAYFRVRKGKRIISPNKKLSFSENFFKMMFNKVPDKEIVRAFDISLILYAEHSFNVSTFTARTITSSLSDLHGAITGAIASLKGPLHGGANEAVMDMMKEIGKPEKA

SEQ ID NO: 115334 - protein, 304 aa, Unknown
  Bacterial polypetide isolated from the Sargasso Sea
LKGELPNEAELAAYKKRLKAMRNLPQALKEVLERIPASAHPMDVMRTGCSMLGNLETEQSFAQQQDATDRLLAIFPGLINYWYNFSHKGQRIEVETAADSIAEQFLWTLHGEKPTQLHTDVMNSSLILYAEHEFNASTFTARVCASTLSDMHSCITGAIGSLRGPLHGGANEAAMELIEKMDNPDDAETKLMGMLERKEKIMGFGHAIYAESDPRNAVIKEWSEKLGKANGNTSLYDISVRCEAVMWREKKLFCNADFFHASAYNYMGIPTKLFTPIFVCSRLTGWAAHVMEQRADNRIIRPSA

SEQ ID NO: 115335 - protein, 255 aa, Unknown
  Bacterial polypetide isolated from the Sargasso Sea
MRKTIRIFAKTPTALAAFFRTRKGKNVIPPKKGLGFSENFFYMCFGKVPSKEIIKAFDVSLILYAEHSFNVSTFTARTITSSLSDMHSAITGAIGSLKGPLHGGANEAVMHMMNKINKPENALKWINNALDKKEVIMGFGHRVYKKGDSRVPTMEKYFIKVSKIKNDKKFLKIYDTVKNVMIDRKDIHPNVDFPTGPTYHLMGFDTDFFTPIFVISRITGWSAHIMEQHAANKLIRPLSKYSGEKHRKVMLLNQR

SEQ ID NO: 115336 - protein, 99 aa, Unknown
  Bacterial polypetide isolated from the Sargasso Sea
MLKKKNSKKNKKIAKIIIGKDTYDLPIYESTIGENVIDISKLHSLANHFTYDPGFTSTASCESKITYIDGKNGILRYRGYDIEELAKKSDFIEVANLLI

SEQ ID NO: 115337 - protein, 276 aa, Unknown
  Bacterial polypetide isolated from the Sargasso Sea
MAEKKLEGAGLRGQVAGQTALSTVGKTGKGLTYRGFAIEELAEKATFEEVAFMLLYGYLPNQEEFNSYSNKLKRHRELPKELIEVLERIPSSTHPMDVMRTGCSMLGNLEPEGDFSNQNETADRILAAMTSIITYWYRYSHDGVKVDTATDHETIGGQFLSLLTGKEPSEEHSRALDVSLILYAEHGFNASTFTARTCASTLSDMHSCITGAIGTLRGPLHGGANEAAMDMIEKFSTREDAKQGVLDLLAKKEKIMGFGHAVYSNEDPRNAIIKKW

SEQ ID NO: 115338 - protein, 314 aa, Unknown
  Bacterial polypetide isolated from the Sargasso Sea
EELEGAGLRGQVAGETALSTVGKEGKGLTYRGYAIEDLAEKATFEEVAYMLLYGKLPNQDEYDSYTSKLRNYRDLPRELKNVLTAIPKETHPMDVLRTGTSMLGNLEPEGDFTNQNDTADRILAAMPSIMTYWYRASHFGEDIDTLTDHKTMGGQFLSLLTGSEPSDEHIRALDTSLICYAEHGFNASTFTARTCASTLSDMHSCITAAIGTLRGPLHGGANEAAMEMIERFSSREDANVGVKNMLANKEKIMGFGHAVYSDEDPRNKIVKAWAKKLSSNASNPVIYEVSEEIEKVMSEEKISLQYRFLYGICI

SEQ ID NO: 115339 - protein, 305 aa, Unknown
  Bacterial polypetide isolated from the Sargasso Sea
IKLGNEMGERKLEGAGLRGQVAGNTALSTVGKTGKGLTYRGYAIEELAEKATFEEVAYMLLYGKLPTQSDYDEYSSKLQTYRSLPKELKEVLERIPQDTHPMDVMRTGCSMLGNLEPEGDFSNQNETADRILASMTSIITYWYRYSHEGVKVETATDHPTIGGQFLSLLTGSEPSEEHSRALDVSLILYAEHGFNASTFTARTCASTLSDMHSCITGAIGTLRGPLHGGANEAAMEMIEKFSTREEAKSGVLELLANKEKIMGFGHAVYSNEDPRNAIIKEWSHKLSGLNGDATLYEVSDEIERV

SEQ ID NO: 115340 - protein, 232 aa, Unknown
  Bacterial polypetide isolated from the Sargasso Sea
GVRIDTATDEPSLAAHFLRTLSGESPNELHQQVMDTSLILYAEHEFNASTFTARVCASTLSDMHSCVTGAIGSLRGPLHGGANEAAMELIEKFATPDAATEGVRGMLERKDKIMGFGHAIYRTSDPRNVIIKQWAEKLADDVGDKILYPVSCAIEKLMWDEKELFANADFFHASAYNSMGIPTKLFTPIFVCSRVAGWTAHVMEQRENNRIIRPSADYVGPEPRKVEPIAER

SEQ ID NO: 115341 - protein, 72 aa, Unknown
  Bacterial polypetide isolated from the Sargasso Sea
EYFIEKKLYPNVDFYSGIIYRALGIPTEMFTVMFALGRIPGWIAQWKEMRDSNNPIGRPRQIYNGPTHRTIS

SEQ ID NO: 115342 - protein, 74 aa, Unknown
  Bacterial polypetide isolated from the Sargasso Sea
MTDKTAKLTIDGKDIDLPIYEATNGPDVVDVGKLTGQGYFTYDPGFVSTAACDSEITFIDGDQGILLHRGYPIE

SEQ ID NO: 115343 - protein, 233 aa, Unknown
  Bacterial polypetide isolated from the Sargasso Sea
KGKKIIQPNKKLSYSENFFNMMFGKVPNKEIVKAFDVSMILYAEHSFNVSTFTARTITSSLSDMHGAITGAIASLKGPLHGGANEAVMYMFKDIKKPEKAESWINNALDKKKVVMGFGHRVYRSGDSRVPTMKKYFLKVAEIKNNTSFPKIYATLERIMLERKNIHPNVDYPCGPTYHLMGIDTDFFTPIFVMARITGWSAHIIEQHAANKLIRPLSKYKGSEHREVLSLNIR

SEQ ID NO: 115344 - protein, 132 aa, Unknown
  Bacterial polypetide isolated from the Sargasso Sea
PFRLMGFGHRVYKHYDPRAKIIRKMCHKVLNQKGSADSPLLELAIELEEIALKDDYFREKNLYPNVDFYSGIIYQALGIPTSMFTVMFAIGRTVGWVSHWREMITDPNSKISRPRQLYTGPEKRNYISIDKR

SEQ ID NO: 115345 - protein, 125 aa, Unknown
  Bacterial polypetide isolated from the Sargasso Sea
MNKKSTVTIGDNIYDLPLIDGTIGPSVIDVSKLYGDSNYFTYDPGFTSTASCKSSITYIDGDKGECFYRGYPMDVLAEESNFLEIVYLLWQEELPDKKQWSEFSEAIKNHTMVHEQFKNFFNGLE

SEQ ID NO: 115346 - protein, 231 aa, Unknown
  Bacterial polypetide isolated from the Sargasso Sea
MKKKNNRKAKLIIDNTTYEFPIYNSTEGEAVIDISKLHAEANIFTYDPGFTSTASCESKITYIDGDNGILRYRGYDIAELAKKSDFIEVVNLLIYGDLPNKVQLAKYKRLITRHTLLHEQIINFFQGFRRDAHPMAMMVGVMGALSSFYQDTLNINDSHQRQEATRRIIAKSATIGAMAYKYSLGQAFVSPKNNLSFSENFLYMCFSNTAETYEVSPVIAKAMDTILILHA

SEQ ID NO: 115347 - protein, 227 aa, Unknown
  Bacterial polypetide isolated from the Sargasso Sea
DLSYSSNFLYMLTEKEQDPIAAKVFDRCLILHAEHSLNASTFSARVTASTLTDPYAVIASAVGTLAGPLHGGANEDVIAMLEEIKTPENAGSFLDNAIQSKSKIMGFGHREYKVKDPRAIILQKLAEDLFVKFGKDEMYEVAKKVELEAIPRLGPKGIFPNVDFYSGLVYRKLGIPRDLFTPIFAISRVAGWLAHWREQLGANRIFRPSQIYTGSTPRDWITLETRK

SEQ ID NO: 115348 - protein, 212 aa, Unknown
  Bacterial polypetide isolated from the Sargasso Sea
MPRKKSLKKFKTAKLIYNNNTYEFPVYDSTEGEAVIDISKLHSKANIFTYDPGFTSTASCESKITFIDGDKGILRYRGYDIEELAKKSDFIEVVNLLIYGDLPNKRQLTKYKNLISRHTLLHEQIINFFQGFRRDAHPMAMMVGVMGALSSFYQDSLDINDSHQRQEATRRIVAKSATIGAMSYKYSIGQSFVSPKNNLSFSENFLHMCLAI

SEQ ID NO: 115349 - protein, 252 aa, Unknown
  Bacterial polypetide isolated from the Sargasso Sea
MSEDIKKGLLGIVVDETTISQVMPDINSLTYRGYAVQDLCEKCSFEEVAYLILNKELPTKAQLTKFKKELELNRNITINLREIVKHMPKKSHPMDVARTVVSVMGLEDKDTSNNSPTSNMRKAIRIFAKTPTAMAAFFRARKGKNVISPKKGLGFSENFFYMCFGKIPNKEIIKAFDVSLILYAEHSFNVSTFTARTITSSLSDIHSAITGAIGSLKGPLHGGANEAVMHIIYKIKKPENALKWINNALDKK

SEQ ID NO: 115350 - protein, 251 aa, Unknown
  Bacterial polypetide isolated from the Sargasso Sea
MRIFAKTPTAVAAYFRTRKGKSIIAPSKKLSFSENFFKMMFNKVPDKEIVRAFDISLILYAEHSFNVSTFTARTITSSLSDLHGAITGAIASLKGPLHGGANEAVMHMMKEIGKPERAKAWIENALNKKKVVMGFGHRVYRTGDSRVPTMKHYMFKVAKLLKKEKYTRMYEILEKVMLDRKNIHPNVDFPCGPTYYMMGIDIDFYTPIFVMSRITGWSAHIMEQHASNKLIRPLSKYRGAEVREVMLLNQR

SEQ ID NO: 115351 - protein, 154 aa, Unknown
  Bacterial polypetide isolated from the Sargasso Sea
MTKEENKKKPFTLFNNETGQSIELPVLVGTEGPDVLDIRNLYKDTGLFTYDPGYTSTASCNSAITFIDGNKGILRHRGYDIKDLANKSDFLEVCYLLLHGDLPSPEDKQKFENVIQRHTMVHEQLVNLYRGFRRDAHPMAIMGWCCGCIISFLS

SEQ ID NO: 115352 - protein, 130 aa, Unknown
  Bacterial polypetide isolated from the Sargasso Sea
RLMGFGHRVYKNFDPRAKVMQKICHEVLDHLGIKDDPLLAIAVELEKIALEDEYFVEKKLYPNIDFYSGIVMKSLGYPMDMFTVLFAVGRTVGWVSQWNEMIEDTSQRIGRPRQLYVGSDYRQYVGIHKR

SEQ ID NO: 115353 - protein, 290 aa, Unknown
  Bacterial polypetide isolated from the Sargasso Sea
LPRSKELKKFINEERSNRKLSKQILNDIKNMPKNAHPMDAIRSAVSLMGLEDKDASDNSPKANMRKAMRIFAQTPTAVAAYFRARKGKKFIPPNKKLSYSENFFHMMFGKVPKKEIVEAFDVSMILYAEHSFNVSTFTARTITSSLSDMHGAITGAIASLKGPLHGGANEAVMHMFKEIKLPQKAKSWINNALDKKKVVMGFGHRVYRSGDSRVPTMKKYFLKVAELMKNTKYPEMYNTLEKVMLERKNIHPNVDYPCGPTYHLMGIDTDFFTPVFVMARITGWSAHIMN

SEQ ID NO: 115354 - protein, 170 aa, Unknown
  Bacterial polypetide isolated from the Sargasso Sea
MNEKTFKITNQESGKDLGLERKDAVLGPSVVDITALYREQGVFTYDPGFGATACCSSTITYIDGEQGVLMYRGYPIEQLAAHSTYIEVAYLLMYGELPTQEELTGFDQSIRNHTMLNESFLRFFNGFDHDAHPMAMVSGIVACMSAFYHDSTDIQDAAHRDVFAHRIIAK

SEQ ID NO: 115355 - protein, 323 aa, Unknown
  Bacterial polypetide isolated from the Sargasso Sea
TVQDLCAKCKFEEVAYLLLNDDLPNKEQLEQFEKEERLNRPISDSLKSIIKNYPKNSHPMDTTRTSVSHMGLEDPDAADNSKEANMRKAMRLLAKISTAVAADFRVRKGEKIIDPDPKLGFCENFFNMCFDKVPSKEVIKAFDVSMTLYAEHSFNASTFTSRVITSSLSDMHGAVTGAIASLKGPLHGGANEAVAHMLNEVGSPDKAEQFIMNKIKNKELIMGFGHRVYRNGDSRVPTMTEYYHKTAEFYQNKKLPEISKILEETMLREKNIKPNLDFPAGPTYYLMGFDIDFFTPIFIVSRITGWAAHVMEQFDSNKLIRPL

SEQ ID NO: 115356 - protein, 292 aa, Unknown
  Bacterial polypetide isolated from the Sargasso Sea
FPATGHPMDALQSSAASLGLFYSRRAIDDPNYIYNAVIRLIAKIPTMIAAFQLIRKGQDPIQPRDDLTYSSNFLYMLTEKEQDPIAAKVFDRCLILHAEHSLNASTFSARVTASTLTDPYAVIASAVGTLAGPLHGGANEDVIAMLEEIETPEKAASFLENAIKNKSKIMGFGHREYKVKDPRAIILQKLAEELFIRFGADKMYEVAKRLEAEAIPRLGPKGIFPNVDFYSGLVYRKLGIPRDLFTPIFAISRVAGWLAHWREQLGANRIFRPSQIYTGSAPRDWISLENRE

SEQ ID NO: 115357 - protein, 226 aa, Unknown
  Bacterial polypetide isolated from the Sargasso Sea
PSKSLSFSENFFKMMFNKVPDKEVVRAFDISLILYAEHSFNVSTFTARTITSSLSDLHGAITGAIASLKGPLHGGANEAVMHMMKEIGKPEKAKAWIENALAKKKVVMGFGHRVYRTGDSRVPTMKHYMFKVAKLLKKEKYTKMYEILEKVMIERKNIHPNVDFPCGPTYYMMGIDIDFYTPIFVMSRITGWSAHIMEQHTSNKLIRPLSKYKGKEVREVMLLNQR

SEQ ID NO: 115358 - protein, 249 aa, Unknown
  Bacterial polypetide isolated from the Sargasso Sea
LAAMTSIITYWYRYSHDGVKVDTATDHETIGGQFLSLLTGKEPSEEHSRALDVSLILYAEHGFNASTFTARTCASTLSDMHSCITGAIGTLRGPLHGGANEAAMDMIEKFSTREDAKQGVLDLLAKKEKIMGFGHAVYSNEDPRNAIIKKWSNTLADSNGDRTLYEVSDEIEHVMDEEKGMFANTDFFMASAYHYLGIPTPIFTPLFVIGRTSGWASNIMEQRADNRIIRPSEEYIGPDNATWVDIKDR

SEQ ID NO: 115359 - protein, 302 aa, Unknown
  Bacterial polypetide isolated from the Sargasso Sea
KFQSDINEESLVDEHIKDIFQSFPKSAHPMGVLSSLTSALIAFNPENETKLSLKESDKSEDDQKLYNSTVKLLAKFPILSSWTLRKIKGLPLNYSSDKFNYVENIAYLMFAKPNQEYIQNDIIVNALNSLLILHADHEQNCSTSTVRIVGSSYAGLFASISAGISALWGRLHGGANQAVIEMLELIKNDDSNIEKYIEKAKDKNDPFRLMGFGHRVYKNFDPRAKIIKKAADQVLNDLGINDPVLDIAKEIETKALSDPYFIEKKLYPNVDFYSGIIYRALGIPSEMFTVIFALGRIPGWIA

SEQ ID NO: 115360 - protein, 270 aa, Unknown
  Bacterial polypetide isolated from the Sargasso Sea
SRRAIDDPNYIYNAVIRLIAKIPTMIAAFQLIRKGQDPIQPRDDLTYSSNFLYMLTEKEQDPIAAKVFDRCLILHAEHSLNASTFSARVTASTLTDPYAVIASAVGTLAGPLHGGANEDVIAMLEEIKHPENAGAFLDKAIKNKSKIMGFGHREYKVKDPRAIILQKLAEELFIRFGADEMYEVAKSLEAEAIPRLGPKGIFPNVDFYSGLVYRKLGIPRDLFTPIFAISRVAGWLAHWREQLGANRIFRPSQIYTGSALRDWTSLENRE

SEQ ID NO: 115361 - protein, 299 aa, Unknown
  Bacterial polypetide isolated from the Sargasso Sea
NKLKGHRKLPKELMEVLERIPSSTHPMDVMRTGCSMLGNLEPEGDFSNQNETADRILAAMTSIITYWYRYSHDGVKVDTATDHETIGGQFLSLLTGKEPSEEHSRALDVSLILYAEHGFNASTFTARTCASTLSDMHSCITGAIGTLRGPLHGGANEAAMDMIEKFSTREDAKQGVLDLLAKKEKIMGFGHAVYSNEDPRNAIIKKWSNTLADSNGDRTLYEVSDEIERVMDEEKGMFANTDFFMASAYHYLGIPTPIFTPLFVIGRTSGWASNIMEQRADNRIIRPSEEYIGPDNATW

SEQ ID NO: 115362 - protein, 128 aa, Unknown
  Bacterial polypetide isolated from the Sargasso Sea
MGFGHRVYKNYDPRAKLMRETCHEVLEELGLHDDPLFKLAMALEKIALEDEYFVSRKLYPNVDFYSGIVQRALGIPTAMFTCIFAMARTVGWIAQWNEMIADPEQKIGRPRQLFVGETQREARALDKR

SEQ ID NO: 115363 - protein, 233 aa, Unknown
  Bacterial polypetide isolated from the Sargasso Sea
MGEKKLEGAGLRGQVAGNTALSTVGKAGKGLTYRGYAIEELAEKATFEEVAYMLLYGKLPTQSEYDEYSSKLKSYRSLPTELKEVLERIPQDAHPMDVMRTGCSMLGNLDPEGDFSNQSETADRILASMASIVTYWYRYSHEGVKVETATDHPTIGGQFLSLITGKEPSEEHSRVLDVSLILYAEHGFNASTFTARTCASTLSDMHSCITGAIGTLRGPLHGGANEAAMEMIE

SEQ ID NO: 115364 - protein, 381 aa, Unknown
  Bacterial polypetide isolated from the Sargasso Sea
MDSNKLILKPGLEGVPVTNSSICDIDGNKGKLLYRGYSIEELSKKSSFLETAYLLIWGELPTAIQLRDFEQEVQMHRRLSFRVRDMMKCFPATGHPMDALQSSAASLGLFYSRRAIDDPNYIYNAVIRLIAKIPTMIAAFQLIRKGQDPIQPRDDLTYSSNFLYMLTEKEQDPIAAKVFDRCLILHAEHSLNASTFSARVTASTLTDPYAVIASAVGTLAGPLHGGANEDVIAMLEEIKTPENAGSFLDNAIKNKSKIMGFGHREYKVKDPRAIILQKLAEELFIRFGADEMYEVAKSVEAEAIPRLGPKGIFPNVDFYSGLVYRKLGIPRDLFTPIFAISRVAGWLAHWREQLGANRIFRPSQIYTGSAPRDWISLESRE

SEQ ID NO: 115365 - protein, 188 aa, Unknown
  Bacterial polypetide isolated from the Sargasso Sea
FKASTFTARTCASTLSDMHSCITAAIGTLRGPLHGGANEAAMEMIERFSSREDANVGVKNMLANKEKIMGFGHAVYSDEDPRNKIVKAWAKKLSSNASNPVIYEVSEEIEKVMSEEKNLFANTDFYMASAYNFLGIPTPIFTPLFVIGRTSGWAANVMEQRADNRIIRPSEEYIGPESATWVDLQDRD

SEQ ID NO: 115366 - protein, 161 aa, Unknown
  Bacterial polypetide isolated from the Sargasso Sea
MADYEDNKQKSSFTLFNNETGKSYELPIIKGTDGPDVLDIRNLYQETGLFTYDPGFTSTASCDSAITFIDGNKGILRHRGYDIHELASNSEFLEVCYLLLHGELPSPEDKKKFKDVITNHTMLHEQLVHLYRGFRRDAHPMAIMVGVVGALSAFYHDKYRF

SEQ ID NO: 115367 - protein, 374 aa, Unknown
  Bacterial polypetide isolated from the Sargasso Sea
MTEDIKKGLMGIVVDETTISQVMPEINSLTYRGYKVQDLCQKCSFEEVAYLVLNGELPKSKELKKFINEERNNRKLSKQILNDIKNMPKKAHPMDAIRTAVSLMGLEDKDVRDNSPKANMKKAMRIFAQTPTAVAAYFRARKGKKSIPPNKKLSYSENFFNMMFGKVPNKEIVKAFDISMILYAEHSFNVSTFTARTITSSLSDMHGAITGAIASLKGPLHGGANEAVMYMFKDIKKPQRAKSWINNALDKKKVVMGFGHRVYRSGDSRVPTMKKYFLKVAEIKKNTNFPKIYEILEQVMLERKNIHPNVDYPCGPTYHLMGIDTDFFTPIFVMARITGWSAHIIEQHAANKLIRPLSKYKGSEHREVLSLNIR

SEQ ID NO: 115368 - protein, 328 aa, Unknown
  Bacterial polypetide isolated from the Sargasso Sea
MSDEVKKGLMGIVVDETTISQVMPEINSLTYRGYKVQDLCEKCIFEEVAYLVLNGELPRSKELKKFINEERDNRKLSKQILNDIRNMPKKAHPMDAIRSAVSLMGLEDKDASDNSPKANMRKAMRIFAQTPTAVAAYFRARKGKKFIPPNKKLSYSENFFHMMFGKVPKKEIVEAFDISMILYAEHSFNVSTFTARTITSSLSDMHGAITGAIASLKGPLHGGANEAVMHMFKEIKSPQKAKSWINNALDKKKVVMGFGHRVYRSGDSRVPTMKKYFLKVAELMKNTKYPEMYNTLEEVMLERKNIHPNVDYPCGPTYHLMGIDTRFF

SEQ ID NO: 115369 - protein, 244 aa, Unknown
  Bacterial polypetide isolated from the Sargasso Sea
MPEINSLTYRGYKVQDLCEKCTFEEVAYLVLNGELPKKSELKKFISEERKNRKLSKQILDDIVKMPKRAHPMDVVRTAVSLMGLEDRDTSNNSPKANMKKAMRIFAQTPTAVAAFFRARRGKKIIKPDSKLSYSENFFKMMFGKVPNKDIVKAFDVSMILYAEHSFNVSTFTARTITSSLSDMHGAITGAIASLKGPLHGGANEAVMYMFKEIKKPEKAAAWINNALDKKRVIMGFGHRVYRSG

SEQ ID NO: 115370 - protein, 375 aa, Unknown
  Bacterial polypetide isolated from the Sargasso Sea
MGQQKPLGGAGLRGQSAGETSICTVGKSGTGLTYRGYDIQELADGAQFEEVAYLLLKGELPDEQQLEDYKRTLRSLRTLPAALLEVLERIPADAHPMDVLRTGCSMLGDLEPEDGFEHEHAVADRLLAAFPGILLYWYKFSHDGVRIPLDTDEECIGGHFLALLHQKAPSELERLVMHVSLILYAEHEFNASTFAARVCASTLSDMFSCVTAAIGTLRGPLHGGANEAAMAMIEPWQDEAQARRELLAKLAAKEKIMGFGHAVYRTSDPRNVIIKNWSAKLAEAVGDDRLYRVSCEAEKVMWEEKELFPNADFFHASAYHYMGIPTKLFTPIFVCSRVTGWCAHVMEQREHNRIIRPSADYVGPAPRHFVSLQQR

SEQ ID NO: 115371 - protein, 374 aa, Unknown
  Bacterial polypetide isolated from the Sargasso Sea
MSDEIKKGLMGIVVDETTISQVMPEINSLTYRGYKVQDLCEKCVFEEVAYLVLNGELPRSKELKKFINEERNNRKLSKQILNDIKNMPKKAHPMDAIRTAVSLMGLEDKDARDNSPKANMRKAMRIFAQTPTAVAAYFRARKGKKFIPPNKKLSYSENFFHMMFDKVPKKEIVDAFDISMILYAEHSFNVSTFTARTITSSLSDMHGAITGAIASLKGPLHGGANEAVMDMFKEIKSPEKAESWINNALDKKKVVMGFGHRVYRSGDSRVPTMKKYFFKVAELMKNTKYPKIYNTLEKVMLERKNIHPNVDYPCGPTYHLMGIDTDFFTPIFVMARITGWSAHIMEQHAANKLIRPLSKYKGSEHREVLALNIR

SEQ ID NO: 115372 - protein, 375 aa, Unknown
  Bacterial polypetide isolated from the Sargasso Sea
MSDAKKLSGAGLRGQSAGETALSTVGVSGSGLTYRGYDVKDLAENATFEEVAHLILYGELPTTAQLEAYKSKLKGMRGLPQALKEVLERIPADAHPMDVMRTGCSMLGNLEAEHSFSEQSQIADRLLAAFPSIICYWYRFSHDGVRIETETNDEQIGAHFLHLLHGKAPSALHAKVMDVSLILYAEHEFNASTFTARVCASTLSDMHSCVTGAIGSLRGPLHGGANEAAMELIQDMKDEADARDVLMGKLERKEKIMGFGHAIYRESDPRNAIIKEWSEKLAADYGDDRLYRVSVACEAMMWEQKKLFCNADFFHASAYHFMGIPTKLFTPIFVCSRVTGWTAHVMEQRSNNRIIRPSADYVGVALRKVVPISDR

SEQ ID NO: 115373 - protein, 391 aa, Unknown
  Bacterial polypetide isolated from the Sargasso Sea
MTDSSTHLYSPGLVGIIATESSVSNINGKKGILSYRGYSIEELAQKSTFEETSYLLLFGELPTSAQLKEFTSKVTQYRDLPEELVSILKALPKHTRPMDVLQMAVSSLGTFYDLEVSPEKVKGKKYDEKYFLNTSAALIGALGSIVAAWHRIRNGDEPISSKPDCTYAENFLHILGAEKITPLMTRIMDATLVLHGEHTINASTFTAMVTSSTLANASQVVASAIGSLSGPLHGGANEKVIAMLQKIETKEEIRPWLDDTLKAKNVVWGMGHREYSVKDPRANILTEMVQQLFDEREGGVTDIFEKAIELEKACEEKLSHKGVYPNVDFYSGILYKEMDIPTDIFTPIFAMSRVSGWLAHWIEQIQDNKIFRPTQNYVGSDDRAYVDISDR

SEQ ID NO: 115374 - protein, 288 aa, Unknown
  Bacterial polypetide isolated from the Sargasso Sea
MSEEIKKGLLGIVVDETTISHVVPELSTLTYRGYTVQELCDKCDFEEVAYLVLNGDLPNKKQLKKFIKEERSERKLSKQILKNIQTMPKNAHPMDVIRTCVSLMALEDKDTKDNSPKANMRKTMRIFAKTPTAVSAYFRYRKGKKIISPSKNLSFSENFFKMMFNKVPDKEIVRAFDISLILYAEHSFNVSTFTARTITSSLSDLHGAITGAIASLKGPLHGGANEAVMHMMKEIGKPEKAKAWIENALAKKKVVMGFGHRVYRTGDSRVPTMKHYMFKVAKLLKKKN

SEQ ID NO: 115375 - protein, 310 aa, Unknown
  Bacterial polypetide isolated from the Sargasso Sea
MSEEIKKGLLGIVVDETTISQVVPELSALTYRGYTVQELCDKCDFEEVAYLVLNGELPNRSQLKKFIKQERSERKLSKQILSDIKKMPRNAHPMDVIRTCVSLMALEDKDTKDNSPKANMRKAMRIFAKTPTAVAAYFRSRKGKKIINPNNKLSFSENFFKMMFNKVPDKEIVRAFDISLILYAEHSFNVSTFTARTITSSLSDLHGAITGAIASLKGPLHGGANEAVMHMMKEIGRPEKAKAWIENALAKKKVVMGFGHRVYRTGDSRVPTMKHYMFKVAKLLKKEKYTKMYEILEKVMLDKKNIHPKR

SEQ ID NO: 115376 - protein, 190 aa, Unknown
  Bacterial polypetide isolated from the Sargasso Sea
MADKIATLHLPGKDPVELPILSGTVGPDVIDVRKLGAQGYFTFDPGFMATGSCKSSITYIDGDQGVLLHRGYPIAQLATQASYLEVCYILLYGEAPTKAQYTEFERLVTRHTMVHEQIAFFFRGFRRDAHPMAVMCGVVSALSAFYHDALDINNEEHREICAFRLLSKMPTLAAMCYKYSIGQPFMQPRN

SEQ ID NO: 115377 - protein, 350 aa, Unknown
  Bacterial polypetide isolated from the Sargasso Sea
MGEKKLDGAGLRGQVAGKTALSTVGKEGKGLTYRGYAIEELAEKASFEEVAYMLLYGNLPNQSEYDLYSSKLKSYRSLPDQLKEVLERIPADAHPMDVMRTGCSMLGNLESEGDFSNQNETADRIMASFASIVTYWYRYAHDGIRVETETDHPTIGGQFLSLLTGKEPSEEHARALDVSLILYAEHGFNASTFTARTCASTLSDMHSCITGAIGTLRGPLHGGANEAAMEMIEKYSSREEAKAGVLELLAKKEKIMGFGHAVYSTEDPRNAIIKVWSEKLSKLDGDKTLFEVSDEIERVMDEEKGMFANTDFFMASAYNYLRDTYCNIHSIICHRQNLGLGCKYHRAKSG

SEQ ID NO: 115378 - protein, 206 aa, Unknown
  Bacterial polypetide isolated from the Sargasso Sea
DEHTRALILSLICYAEHGLNASTFTARTCASTLSDMHSCITAAIGTLRGPLHGGANEAAMEMIERFSSREDANVGVKSMLANKEKIMGFGHAVYSDEDPRNKIVKAWAKKLSSNASNPVIYDVSEEIEKVMSEEKNLFANTDFYMASAYNFLGIPTPIFTPLFVIGRTSGWAANVMEQRADNRIIRPSEDYIGPESATWVDLQDRD

SEQ ID NO: 115379 - protein, 80 aa, Unknown
  Bacterial polypetide isolated from the Sargasso Sea
RLLFVERKLYPNVDFYSGIILKALGIPTSMYTVMFALARSAGWVAQWMEMMEDPDFKIGRPRQLYTGEKSRDYIPIDKRN

SEQ ID NO: 115380 - protein, 373 aa, Unknown
  Bacterial polypetide isolated from the Sargasso Sea
MAKKLEGAGLRGQVAGETSLCTVGQEEGLAYRGHKIETLAEKGTFEEVAYLLLYGKLPNKTELSNYKNLLKSLRDLPDSLKKVLQEIPASAHPMAVMATGCSMLGNLEPEESMDAQMDSINRMVATLPSIVTYWYKFSHDGEDISLVNDEDTIAGHFLHILHGKSPSDLHRRVMDASLVLYAEHEFNASTFTARVCASTMSDIYSCVVAAIGSLKGPLHGGANEAAMEMIENWKTRDEAKANIMDMLANKGKIMGFGHAIYSEKDPRNAVIKEFSKELSQEYGDDTLYQVSEEVEQVMWDEKKLFPNADFFHASAYFYLGIPTKLFTPIFVMSRVTGWTAHCMEQRANNRIIRPSAEYTGPETSVWVDLEDRE

SEQ ID NO: 115381 - protein, 374 aa, Unknown
  Bacterial polypetide isolated from the Sargasso Sea
MVDKQLGGAGLRGQSAGDTALCTVGKSGTGLTYRGYDITDLAENATFEEVAYLIYFGELPNQQQLDEYKTTLRGYRKLPEELIAVLEAIPASAHPMDVMRTGCSMLGNLEPEGDFENQQRAADRLLGALPSIINYWYQYSHHGNRIDTDSDEDSLAGHFLKTLSGNSPSELHQRVMDVSLILYAEHEFNASTFTARVCASTLSDMHSCVTGAIGSLRGPLHGGANEAAMEMIEKFSSVEDATQGVHGMLERKDKIMGFGHAIYRTSDPRNVIIKQWAEKLADEVGDESLYPISCAVEKVMWDEKELFANADFFHASAYHFMGIPTKLFTPIFVCSRVSGWTAHVMEQRVNNRIIRPSADYVGPEPRVLAPIGER

SEQ ID NO: 115382 - protein, 212 aa, Unknown
  Bacterial polypetide isolated from the Sargasso Sea
MFNKVPDKEIVRAFDISLILYAEHSFNVSTFTARTITSSLSDLHGAITGAIASLKGPLHGGANEAVMHMMKEIGKPEKAKDWIENALEKKKVVMGFGHRVYRTGDSRVPTMKHYMFKVAKLLKKEKYTKMYEILEKVMLDRKNIHPNVDFPCGPTYYMMGIDIDFYTPIFVMSRITGWSAHIMEQHASNKLIRPLSKYKGQEVREVMLLNQR

SEQ ID NO: 115383 - protein, 129 aa, Unknown
  Bacterial polypetide isolated from the Sargasso Sea
MVKKKLNKKSNRKAKLIINQKTYEFPIYNSTEGEAVIDISNLHAEANIFTYDPGFTSTASCESKITYIDGDKGILRYRGYDIEELARKSDFIEVVNLLIYGDLPNKDQLTKYKRLITRHTLLHEQIINF

SEQ ID NO: 115384 - protein, 370 aa, Unknown
  Bacterial polypetide isolated from the Sargasso Sea
MSDEVKKGLMGIVVDETTISQVMPEINSLTYRGYKVQDLCEKCIFEEVAYLVLNGELPRSKELKKFTNEERNNRKLSKQILNDIKNMPKKAHPMDAIRSAVSLMGLEDKDASDNSPKANMRKAMRIFAQTPTAVAAYFRARKGKKFIPPNKKLSYSENFFHMMFGKVPKKEIVEAFDVSMILYAEHSFNVSTFTARTITSSLSDMHGAITGAIASLKGPLHGGANEAVMHMFKEIKSPQKAKSWINNALDKKKVVMGFGHRVYRSGDSRVPTMKKYFLKVAELVKNTKYPEMYNTLEKVMLERKNIHPNVDYPCGPTYHLMGIDTDFFTPVFVMARITGWSAHIMEQHTANKLIRPLSNIKEVSTERCWL

SEQ ID NO: 115385 - protein, 374 aa, Unknown
  Bacterial polypetide isolated from the Sargasso Sea
MAEEIKKGLMGIVVDETTISQVMPEINSLTYRGYKVQDLCEKCSFEEVAYLVLNGELPKSKELKKFIKEERSNRKLSKQILNDIKNMPKKAHPMDAIRSAVSLMGLEDKDTRDNSPKANMRKAMRIFAQTPTAVAAYFRARKGKKFIPPIKKLSYSENFFNMMFGKVPNKEIVKAFDVSMILYAEHSFNVSTFTARTITSSLSDMHGAITGAIASLKGPLHGGANEAVMHMFKEIKKPERAEAWINDALDKKKVVMGFGHRVYRSGDSRVPTMKNYFLKVAKLMKNTKYPKMYEILEKVMLERKNIHPNVDYPCGPTYHLMGIDTDFFTPVFVMARITGWSAHIMEQHTANKLIRPLSKYKGNDHRKVLALNVR

SEQ ID NO: 115386 - protein, 374 aa, Unknown
  Bacterial polypetide isolated from the Sargasso Sea
MAEEIKKGLMGIVVDETTISQVMPEINSLTYRGYKVQDLCEKCSFEEVAYLVLNGELPKSKELKKFIKEERNNRKLSKQILSDIKNMPRKAHPMDAIRSAVSLMGLEDKDTRDNSPKANMRKAMRIFAQTPTAVAAYFRARKGKKFIPPNKKLSYSENFFNMMFGKIPNKEIVKAFDVSMILYAEHSFNVSTFTARTITSSLSDMHGAITGAIASLKGPLHGGANEAVMHMFKEINKPEKAETWINNALDKKKVVMGFGHRVYRSGDSRVPTMKKYFLKVAELKKNTKYPKMYKTLEKIMLERKNIHPNVDYPCGPTYHLMGIDTDFFTPVFVMARITGWSAHIIEQHAANKLIRPLSKYKGSEHREVLSLNIR

SEQ ID NO: 115387 - protein, 433 aa, Unknown
  Bacterial polypetide isolated from the Sargasso Sea
MSKKVTLQYNDKEYNFNLLKGSENENAIDVSSLRSEANLITLDPGFKNTGSCKSSITFLDGEKGILRYRGYSIEDLAKNANFLEVAFLLIFGELPTKKELEKLISDIQENAIIDEDLKKILVSFPRSAHPMGILSSLTSALIAFNPEKKISLNKKTGDGHTYMYNLIVKLLAKIPILVAWVHRRRKGLSLDYGDYTQGYVENITKMMFQLPNQAYVKNDVIVNAMNKLLILHADHEQNCSTSTVRIVGSSEASLFASVSAGISALWGRLHGGANQAVLEMLEAIKNDGGDTKKFMEKAKDKNDPFRLMGFGHRVYKNFDPRAKIIKVAAHEVLKDLGIKDPILDIAKSLEKEALNDPYFTTRKLYPNVDFYSGIIYKALQIPTEMFTVMFALGRVPGWIAHWREMRMNNDPIGRPRQVYTGSNQRDFVSINKR

SEQ ID NO: 115388 - protein, 137 aa, Unknown
  Bacterial polypetide isolated from the Sargasso Sea
MADLKAKLELPGNDSIELPVKQGSAGFDVIDISKLGSKGYFTFDPGFLATASCESAITYIDGDQGILLHRGYPIEQLAVDSDYLDLCYLLLYGELPTKEQYAEFVHTVKTHTMVHEQIAFFFRGFRRDAHPMAMLCG

SEQ ID NO: 115389 - protein, 327 aa, Unknown
  Bacterial polypetide isolated from the Sargasso Sea
EVAYMLLYGKLPNQDEYDSYTSKLRNYRDLPRELKNVLTAIPKETHPMDVLRTGTSMLGNLEPEGDFTNQNDTADRILAAMPSIMTYWYRASHFGEDIDTLTDHKTMGGQFLSLLTGSEPSDEHIRALDTSLICYAEHGFNASTFTARTCASTLSDMHSCITAAIGTLRGPLHGGANEAAMEMIERFSSREDANVGVKNMLANKEKIMGFGHAVYSDEDPRNKIVKAWAKKLSSNASNPVIYEVSEEIEKVMSEEKNLFANTDFYMASAYNFLGIPTPIFTPLFVIGRTSGWAANVMEQRADNRIIRPSEEYIGPESATWIDLKDRD

SEQ ID NO: 115390 - protein, 210 aa, Unknown
  Bacterial polypetide isolated from the Sargasso Sea
MKLADNKATLSFSNGSPSVDLPVYQGSIGPDVIDIRKLYAQTGMFTYDPGFLSTAATQSAITYIDGDKGELLYRGYPIEQLAENCDFLETCHLLLYGDLPNAAQKTDFTSRVTNHTMVNEQMQFFLRGFRRDAHPMAVLTGLVGALSAFYHDSTDINNPQHREIAAIRLIAKMPTLVAMAYKYGMGQPYMYPQNHLSYAGNFLRMMFGTP

SEQ ID NO: 115391 - protein, 362 aa, Unknown
  Bacterial polypetide isolated from the Sargasso Sea
GQVLGNTALSPVGKTGKGLTYRGYAIEELAEKATFEEVAYMLLYGKLPTQSEYNEYAVKLQSYRSLPNELKEVLERIPQDAHPMDVMRTGCSMLGNLEPEGDFSNQNETADRILASMASVITYWYRYSHEGVKVETETDHATIGGQFLSLLTGREPSEEHSRALDVSLILYAEHGFNASTFTARTCASTLSDMHSCITGAIGTLRGPLHGGANEAAMEMIEKFNTREEAKSGVLDLLANKEKIMGFGHAVYSTEDPRNAIIKEWSKKLSGLDGDATLYEVSDEIEKVMDEEKGMFANTDFFMASAYHYLGIPTQIFTPLFVIGRTSGWAANIMEQRADNRIIRPSEEYIGPDNSVWVDMADR

SEQ ID NO: 115392 - protein, 374 aa, Unknown
  Bacterial polypetide isolated from the Sargasso Sea
MSEEIKKGLLGIVVDETTISHVVPELSTLTYRGYTVQELCDKCDFEEVAYLVLHGELPNKKQLKKFIKDERSERKLSKQILNDIQKMPKTAHPMDVIRTCVSLMALEDKDTKDNSPKANMRKAMRIFAKTPTAVAAYFRYRKGKKIISPDKKLSFSQNFFKMMFNKVPDKEIVRAFDISLILYAEHSFNVSTFTARTITSSLSDLHGAITGAIASLKGPLHGGANEAVMHMMKEIKKPEKAKAWIENALDKKKVIMGFGHRVYRTGDSRVPTMKHYMFKVAKLLKKEKYTQIYEILEKVMLEKKNIHPNVDFPCGPTYYMMGIDIDFYTPIFVMSRITGWSAHIMEQHASNKLIRPLSKYKGQEVREVMLLNQR

SEQ ID NO: 115393 - protein, 84 aa, Unknown
  Bacterial polypetide isolated from the Sargasso Sea
MTDKIKEKANLKMNDNLYDFDVHEGTIGPDVLDISKLYAQSGKFTYDPGFTSTANCKSTITYIDGEEGTLLYRGYPIDQLAEHR

SEQ ID NO: 115394 - protein, 272 aa, Unknown
  Bacterial polypetide isolated from the Sargasso Sea
LMGLEDKDASDNSPKANMRKAMRIFAQTPTAVAAYFRARKGKKFIPPNKKLSYSENFFHMMFGKVPNKEIVEAFDVSMILYAEHSFNVSTFTARTITSSLSDMHGAITGAIASLKGPLHGGANEAVMHMFKEIKSPQKAKSWINNALDKKKVVMGFGHRVYRSGDSRVPTMKKYFLKVAELMKNTKYPEMYNTLEEVMLERKNIHPNVDYPCGPTYHLMGIDTDFFTPVFVMARITGWSAHIMEQHTANKLIRPLSKYKGSEHREVLALNIR

SEQ ID NO: 115395 - protein, 322 aa, Unknown
  Bacterial polypetide isolated from the Sargasso Sea
MLLYGKLPNQSEYDEYSSKLKSYRSLPTELKEVLERIPQDAHPMDVMRTGCSMLGNLEPEGDFSNQNETADRVLASMASIITYWYRYSHDGVKVETATDHSTIGGQFLSLLTGKEPSEDHARALDVSLILYAEHGFNASTFTARTCASTLSDMHSCITGAIGTLRGPLHGGANEAAMEMIEKFNTREEAKSGVLKLLANKEKIMGFGHAVYSTEDPRNAIIKEWSKTLSSLDGDTTLYEVSDEIEKVMDEEKGMFANTDFFMASAYHYLGIPTQIFTPLFVIGRTSGWAANIMEQRADNRIIRPSEEYIGPDNSVWVDIADR

SEQ ID NO: 115396 - protein, 375 aa, Unknown
  Bacterial polypetide isolated from the Sargasso Sea
MSDAKKLTGAGLRGQSAGETALSTVGVSGSGLTYRGYDVKDLAENATFEEVAYLILYGELPTTAQLESYKTKLKGMRGLPQALKEVLERIPADAHPMDVMRTGCSMLGNLEAEHNFSEQSQIADRLLAAFPSIICYWYRFSHDGVRIDTETDDNQIGAHFLHLLHGKAPSALHAKVMDVSLILYAEHEFNASTFTARVCASTLSDMHSCVTGAIGSLRGPLHGGANEAAMELIQDMKDEADARDVLMGKLERKEKIMGFGHAIYRDSDPRNAIIKEWSEKLAADYGDDRLYRVSVACEALMWEQKKLFCNADFFHASAYHFMGIPTKLFTPIFVCSRVTGWTAHVMEQRSNNRIIRPSADYVGVSPRKVVPIANR

SEQ ID NO: 115397 - protein, 210 aa, Unknown
  Bacterial polypetide isolated from the Sargasso Sea
DIIVNALNTLLILHADHEQNCSTSTVRIVGSSYAGMYASISAGISALWGRLHGGANQAVIEMLELIKNDNSDIDKYLNKAKDKSDPFRLMGFGHRVYKNFDPRAKIIKKAADQVLNDLGIDDPILEIAKTIEDKALNDEYFIQKKLYPNVDFYSGIIYRALGIPTDMFTVMFALGRIPGWIAQWKEMRDSNNPIGRPRQIYNGPTHRSIS

SEQ ID NO: 115398 - protein, 248 aa, Unknown
  Bacterial polypetide isolated from the Sargasso Sea
GFFCFIVTYWYRYSHDGVRVETETDHPTIGGQFLSLLTGKEPSEDHARALDVSLILYAEHGFNASTFTARTCASTLSDMHSCITGAIGTLRGPLHGGANEAAMEMIEKYSSREEAKEGVLDLLDKKEKIMGFGHAVYSTEDPRNAIIKVWSEKLSKLNGDTTLFEVSDEIERVMDEEKGMFANTDFFMASAYNYLGIPTAIFTPLFVIGRTSGWAANIMEQRADNRIIRPSEEYIGPDNSVWVDMSDR

SEQ ID NO: 115399 - protein, 361 aa, Unknown
  Bacterial polypetide isolated from the Sargasso Sea
MMGKKLEGAGLRGQVAGETALSTVGKEGKGLTYRGYAIEDLAEKATFEEVAYMLLYGKLPNQDEYDSYTSKLRNYRDLPRELKNVLTAIPKETHPMDVLRTGTSMLGNLEPEGDFTNQNDTADRILAAMPSIMTYWYRASHFGEDIDTLTDHKTMGGQFLSLLTGSEPSDEHIRALDTSLICYAEHGFNASTFTARTCASTLSDMHSCITAAIGTLRGPLHGGANEAAMEMIERFSSREDANVGVKNMLANKEKIMGFGHAVYSDEDPRNKIVKAWAKKLSSNASNPVIYEVSEEIEKVMSEEKNLFANTDFYMASAYNFLGIPTPIFTPLFVIGRTSGWAANVMEQRADNRIIRPSEEYI

SEQ ID NO: 115400 - protein, 338 aa, Unknown
  Bacterial polypetide isolated from the Sargasso Sea
DLANKSDFLEVCYLLLHGDLPSPEDKEKFENVIQRHTMVHEQLVNLYRGFRRDAHPMAIMVGVVGALSAFYHDSTDFSDINQRMIACHRLIAKIATIGAMAYKYSIGQPFVYPKNNLSYCENFLHMTFSVPTEDYIINPKISKAMDRFFILHADHEQNASTSTVRLAGSSGANPFACIAAGIASLWGPAHGGANEAVIKMLENIGDVSKIPEYINRAKDKNDDFRLMGFGHRIYKNYDPRADVMKKSAHEVLKELGMEDDRLLKIAIELEKIALKDPYFIEKKLYPNVDFYSGIILKALGFPTSMFTVIFAIGRTVGWISQWKEMIEDPINKIGRPKT

SEQ ID NO: 115401 - protein, 300 aa, Unknown
  Bacterial polypetide isolated from the Sargasso Sea
HRGYDIKDLTKNSDFLEVCYLLLHGDLPSLEDKNKFSKAILNHTMLHEQLVYLYRGFRRDAHPMAIMVGVVGALSAFYHDSTDFSDLNQRMIACHRLIAKIPTIGAMAYKYSIGQPFVYPKNNLTYSENFLNMTFSVPTENYEINPIISNAMDKFFILHADHEQNASTSTVRLAGSSGANPFACIAAGIASLWGPAHGGANEAVIMMLEKIGDIENIQEYIEKAKNKDDPFRLMGFGHRVYKNYDPRAEVMKKTAHDVLKELNKMDDPLLKIALKLEEIALNDQYFIDKKLYPNVDFYSG

SEQ ID NO: 115402 - protein, 227 aa, Unknown
  Bacterial polypetide isolated from the Sargasso Sea
MFGVPTEEYKVNPIVERAMDRIFTLHADHEQNASTSTVRLAGSSGANPFACIAAGIASLWGPAHGGANEACLKMLEEIGSVDRIPEYIAKAKDKNDPFRLMGFGHRVYKNHDPRATVMRETCHEVLTELQIKDPLLDVAMELERIALSDPYFIEKKLYPNVDFYSGIIMKAIGIPMSMFTVIFAISRTIGWIAHWNEMHSDPDQKIGRPRQLYTGQPQREFTPLDQR

SEQ ID NO: 115403 - protein, 322 aa, Unknown
  Bacterial polypetide isolated from the Sargasso Sea
IIPNSTKSWAKKITLKNDIQSVDLEIKDASVGPSVIDLKSLYNDTGYFTFDPSYSTTASCESKITYIDGAKGILEYRGYPIEQLAEQSTYLEVAYLLFNGELPSSNISLNEFRSQVKKNMSLPENMSGIFTGFGKDAHPMAMLTTAVAALSGSYHEGINVRDEDHQKEFFFNILGKMPILVANVFNHNQEDANVGYDESLSYAENILRLFFGWKDGYEINPIFSKALDILLILHADHEQNCSTSSVRLTGSSGTNPYAAIAAGVAALWGPAHGGANEAVVKMFGEIGSKDNISKYIDKAKDKNDPFRLMGFGHRVYKNYDPR

SEQ ID NO: 115404 - protein, 227 aa, Unknown
  Bacterial polypetide isolated from the Sargasso Sea
FFGWKDGYEIDPILSKALDILLILHADHEQNCSTSSVRLTGSSGTNPYAAIAAGVAALWGPAHGGANEAVVRMFDEIVTKDNIPKFIEKAKDKNDPFRLMGFGHRVYKNYDPRATIIRSQCHKVLESTGNDSNPMFELALELEEIALNDEYFVERNLYPNVDFYSGLIYQAMDIPKEMFTAMFALARTVGWATHWCEMMSNPKHKIGRPRQLYLGEKKRDYIPISDR

SEQ ID NO: 115405 - protein, 270 aa, Unknown
  Bacterial polypetide isolated from the Sargasso Sea
LHSLAKVFTYDPGFTSTASCESKITYIDGDKGILRYRGYDIEELANKSDFIEVVNLLIYGDLPNKEQLKKYKKLITRHTLLHEQIINFFQGFRRDAHPMAMMVGVMGALSSFYQDTLDINDAHQRQEATRRIIAKSSTIGAMAYKYSIGQAFVSPKNNLSFSENFLHMCFSNTAEEYKISPVISKAMDTIFILHADHEQNASTSTVRLAGSSGANPFACIAAGVSSLWGPAHGGANQAALEMLEEIGSTKNIRKYLNKAKSKKDPFKLMG

SEQ ID NO: 115406 - protein, 285 aa, Unknown
  Bacterial polypetide isolated from the Sargasso Sea
MLLHGELPSPEDKKQFNQVIINHTMLHQQLVNLYGGFRRDAHPMAIMVGVVGALSAFYHDSTDFSDIEQRMIACHRLIAKIPTIGAMAYKYSVGQPFVYPKNDLTYSENLLYMTFSVPTEEFRISPKIVKALDKFLILHADHEQNASTSTVRLAGSSGANPFACIAAGIASLWGPAHGGANEAVIKMLEDIGDISNISKFIAKAKDKNDPFRLMGFGHRVYKNYDPRASVMKESAHEVLKELDNGNDPLLNIALELEKIALKDEYFIEKKLYPNVDFYSGLILKA

SEQ ID NO: 115407 - protein, 172 aa, Unknown
  Bacterial polypetide isolated from the Sargasso Sea
MSNNSYSEKNKIIFNGKELELETLSGSVGPDVVDIRSLYSNLGIFTYDPGYGSTGSCESAITYIDGEKGVLLHRGYPIDQLANKSSFLEVAYLLLNGELPNKPEKDEFENAITFHTMVHEQLINFYRGFRRDAHPMAIMVGVVGALSAFYPDSTNINDPYERLVSSRRLIAK

SEQ ID NO: 115408 - protein, 170 aa, Unknown
  Bacterial polypetide isolated from the Sargasso Sea
LWGPAHGGANESVVRMFDEIGSKDNISQYIEKAKDKNDPFRLMGFGHRVYKNYDPRATIIRSQCHKVLESTGNDSNPMFELALELEEIALNDDYFVQRNLYPNVDFYSGLIYQAMDIPKEMFTAMFALARTVGWATHWCEMMSNPKHRIGRPRQLYLGEKKRDYVPLSDR

SEQ ID NO: 115409 - protein, 248 aa, Unknown
  Bacterial polypetide isolated from the Sargasso Sea
MVETSKTAKLLLDGKEYDLPIMSPTAGPDVLDIRKLYGEAGVFTYDPGFTSTASCDSTITFIDGGKGELLHRGYPIDQLAEHSHYLEVCYLLLYGNLPKPAELEDFENRVTNHTMIHEQMGYLFRGFRRDAHPMAIMTGVVGAMSAFYHDSTDINDPWQREVASIRMIAKMPTIAAMAYKYTIGQPFVYPRNDLDYASNFLRMCFAVPAENYEVNPILSRAMDRIFTLHADHEQNASTSTVRLASSSG

SEQ ID NO: 115410 - protein, 165 aa, Unknown
  Bacterial polypetide isolated from the Sargasso Sea
MGGANVAALNMLKTIGDVKNIKKYIDKAKDKNDPFRLMGFGHRVYKNYDPRAKVMQKTCHEVLDEVGRTDDKLLEVAKELEKIALNDKYFIEKKLYPNIDFYSGITLSAMGFPSSMFTVLFAIARTAGWLAHWKEMCLDPKNKIGRPRQLYTGEKPRKFKPLQKR

SEQ ID NO: 115411 - protein, 206 aa, Unknown
  Bacterial polypetide isolated from the Sargasso Sea
MPTAEQKEKFVSTVKNHTMVHEQIRNFFNGFRRDAHPMAIMCGVVGALSAFYHDSLDINNPEHREITAYRLIAKMPTIAAMCYKYALGQPFMYPRNDLGYAENFLHMMFGNPCEESKISPTLAKAMDRIFILHADHEQNASTSTVRLAGSSGANPFACIAAGISALWGPAHGGANEAVLNMLDEIGSLDNIDAYIAKAKDKNDPFK

SEQ ID NO: 115412 - protein, 274 aa, Unknown
  Bacterial polypetide isolated from the Sargasso Sea
LTLFNNDTGQSFQIPVLKGNEGPDVLDIRNLYNETGMFTYDPGFTSTASCKSSITFIDGHKGILRHRGYNIKDLAANSDFIEVCYLLLHGDLPSSADKEKFEKVITDHTMLHEQLVYLYRGFRRDAHPMAIMVGVVGALSAFYHDSTDFSDLNQRMIASHRLIAKIATIGAMAYKYSIGQPFVYPKNNLSYAENFLHMTFSVPTEEYKVNPIIANAIDKFFILHADHEQNASTSTVRLAGSSGANPFACIAAGIASLWGPAHGGANEAVIQMLK

SEQ ID NO: 115413 - protein, 265 aa, Unknown
  Bacterial polypetide isolated from the Sargasso Sea
MLEKTNKTAKITIDGKTVEVPVTKGSLGPDVLDIRSLYKQTGLFTFDPGFTSTASCESDITFIDGDKGELLYRGYPIEQLADKSSFLEVSYLLLYGELPTKLQYEDFSSKVTRHTMLHEQMLNFFRGFRRDAHPMAIVCGVQAAMSAFYHDSTDINDPWQREVATIRMIAKLPTIVAWAYKYSIGQPFAYPKNNLQYAQNFLQMCFSVPAEDYVVDPILSTAMDRIFILHADHEQNASTSTVRLAASSGANPFACIAAGIACLWG

SEQ ID NO: 115414 - protein, 237 aa, Unknown
  Bacterial polypetide isolated from the Sargasso Sea
MIACHRLIAKIPTIGAMAYKYSIGQPFVYPRNDLSYAENLLYMTFSVPTEKFNISPKIVKAMDRFLILHADHEQNASTSTVRLAGSSGANPFACIAAGIASLWGPAHGGANEAVIKMLEEIEHIDNIPDFINRAKDKNDPFRLMGFGHRVYKNYDPRASVMKESAHEVLNELNKTDDQLLKIALELEKIALKDEYFIEKKLYPNVDFYSGIILKALGFPTSMFTVLFAIGRTVGWIS

SEQ ID NO: 115415 - protein, 235 aa, Unknown
  Bacterial polypetide isolated from the Sargasso Sea
MLPFFAMCFSVPAEEYVSDPILSKAMDRIFILHADHEQNASTSTVRLAASSGANPFACIAAGIACLWGPAHGGANEAALNMLKEIGAPNRIPEYIIKAKDKNDPFRLMGFGHRVYKNFDPRSRVMKQSADEVLDLLGIKDNPTLQVAKELEKIALEDEYFIEKKLYPNVDFYSGIILEAMNFPTSMFTPIFALARTVGWLAQWQEMISDPNIKIGRPRQLFTGATHRTYKAFDKR

SEQ ID NO: 115416 - protein, 266 aa, Unknown
  Bacterial polypetide isolated from the Sargasso Sea
ATYLLHGELPSPADKENFENLISKHTMVHEQLVHLYRGFRRDAHPMAIMVGVVGALSAFYHDSTDFSDINQRMVACHRLIAKIATIGAMAYKFSIGQPFVYPRNNLSYTENFLHMTFSVPTEEYKINPKIARAMDRFFILHADHEQNASTSTVRLAGSSGANPFACIAAGIASLWGPAHGGANEAVIKMLKEIGDVSNIPEYINKAKDKKDPFRLMGFGHRVYKNYDPRASVMKQSAHEVLEELNKLDDPLLKIALELEKIALEDS

SEQ ID NO: 115417 - protein, 272 aa, Unknown
  Bacterial polypetide isolated from the Sargasso Sea
MEDFENRVTNHTMIHEQMGYLFRGFRRDAHPMAIMTGVVGAMSAFYHDSTDINDPWQREVASIRMIAKMPTIAAMAYKYTIGQPFVYPRNDLDYASNFLRMCFAVPAENYEVNPILSRAMDRIFTLHADHEQNASTSTVRLASSSGANPFACIAAGIACLWGPAHGGANQACLEMLREIGTADRIPEFIKRAKDKDDPFRLMGFGHRVYKNTDPRAKVLKRSADEVLDLLGVNNNPLLQVAKQLEEVALNDEYFADKKLFPNVDFYSGIILE

SEQ ID NO: 115418 - protein, 200 aa, Unknown
  Bacterial polypetide isolated from the Sargasso Sea
FACVSAGIASLWGPAHGGANEAVMNMLLKIKRNAKIKDFIDRAKDPKDTFKLMGFGHRVYKNYDPRASVMREACHNVLNELGRKNNRFLAIALDLEDAALNDKYFIKKKLYPNVDFYSGILLWALGFPLSMYTAVFAVARTVGWVSHWKEMIEDPTRKISRPRQLYTGYKKRDYIELDKRQKNSILNTISSIIKNRYQKS

SEQ ID NO: 115419 - protein, 320 aa, Unknown
  Bacterial polypetide isolated from the Sargasso Sea
CYLLLHGDLPSSEDKQKFKDVITNHTMIHEQLVHLYRGFRRDAHPMAIMVGVVGALSAFYHDSTDFSDVNQRMIACHRLIAKMPTIGAMAYKYSIGQPFVYPSNDLSYAENFLYMTFSVPTAEFKISPKIVRAMDRFFILHADHEQNASTSTVRLAGSSGANPFACIASGIASLWGPAHGGANEAVIKMLEEIGDVKNIPEYIKKAKDKNDPFRLMGFGHRVYKNYDPRATVMKESAHEVLEELNKHDDPLLKIALELEKIALNDEYFIQKKLFPNVDFYSGFILKALGFPTSMFTVLFAIGRTVGWISQWERDDRRSNK

SEQ ID NO: 115420 - protein, 190 aa, Unknown
  Bacterial polypetide isolated from the Sargasso Sea
SEFLEVCYLLLHGELPSPENKQKFKDVITNHTMLHEQLVNLYRGFRRDAHPMAIMVGVVGALSAFYHDSTDFSDINQRMIACHRLIAKIPTIGAMAYKYSIGQPFVYPRNDLSYAENFLYMTFSVPSEDYKVSPKIVRAMDRFFTLHADHEQNASTSTVRLAGSSGANPFACIAAGIASLWGPAHGGANE

SEQ ID NO: 115421 - protein, 278 aa, Unknown
  Bacterial polypetide isolated from the Sargasso Sea
HASLDLSDAEQRRQSAVRLIAKVPTLSALIYRHGKGLPANTPDTSLDYVSRFLKQTFESADGQYDLNPDVVKALDLLFILHADHEQNASTSTVRLVGSTGANPYASVAAGVTALWGPAHGGANEAVLKMLEEIGSADNVESAVLKAKDKTSGFRLMGFGHRVYKNFDPRAKVIGEMTSKVLKQLGVQDPLLDVAVKLEQAALQDDYFVARKLYPNVDFYSGIIYKALQIPTEMFTVMFALGRTSGWVAHWLEQQVDPEMKIGRPRQVYTGSDVRDYQG

SEQ ID NO: 115422 - protein, 293 aa, Unknown
  Bacterial polypetide isolated from the Sargasso Sea
GDQGILLHRGYPIEQLAVDSDYLDLCYLLLYGELPTKEQYAEFVHTVKTHTMVHEQLAFFFRGFRRDAHPMAMLCGVTGALSAFYQDSLDVNDPRHREIAAYRLVSKMPTIAAMCYKYSSGQPFVYPRNDLSYAGNFLSMMFAVPCEEYKVNPIVERAMDRIFILHADHEQNASTSTVRLAGSSGANPFACIAAGIASLWGPAHGGANEACLQMLEEIGSVDRIPEFIARAKDKNDPFRLMGFGHRVYKNFDPRAKVMRETCHEVLKELKVQDPLLDVAMELERIALEDEYFI

SEQ ID NO: 115423 - protein, 209 aa, Unknown
  Bacterial polypetide isolated from the Sargasso Sea
ILHADHEQNASTSTVRLAGSSGANPFACIAAGVSSLWGPAHGGANQAALEMLEQIGSSKNIKKYINKAKNKKDKFKLMGFGHRVYKNYDPRAKILKKICQKVLNHIGIKNDPILKLAMDLEKIALKDKYFIEKKLYPNVDFYSGIILRAIGFPPEMFTVIFAISRTAGWTAQWTEMIEDPIQKIGRPRQLYTGSTKLKYGLKRSKKNTR

SEQ ID NO: 115424 - protein, 218 aa, Unknown
  Bacterial polypetide isolated from the Sargasso Sea
FSVPAQKYESQKILSDAIEKIFILHADHEQNASTSTVRLAGSSGANPFACISAGIASLWGPAHGGANEAVLKMLREIEDEKNISNYLKKARDKGDPFRLFGFGHRVYKNYDPRAKVMQKTCHEVLSLLGIKNDPLLTLAMKLENIALEDDYFIEKKLYPNVDFYSGIILKAIGFPTSMFTVLFAVARTVGWVAQWNEMIEDPNQRIGRPRQLYTGPKT

SEQ ID NO: 115425 - protein, 209 aa, Unknown
  Bacterial polypetide isolated from the Sargasso Sea
YRGFRRDAHPMAIMVGVVGALSAFYHDSTDFSDINQRMIACHRLIAKIPTIGAMAYKYSIGQPFVYPRNDLSYAENFLYMTFSVPTEDFKISPKIVQAMDRFFILHADHEQNASTSTVRLAGSSGANPFACIAAGIASLWGPAHGGANEAVIKMLEEIGDVKNIPQYINKAKDKNDPYRLMGFGHRVYKNYDPRASVMKESAHEVLEEL

SEQ ID NO: 115426 - protein, 309 aa, Unknown
  Bacterial polypetide isolated from the Sargasso Sea
IGDLPTNLEIQKLQEDIREEALVDEDLKQIFKSFPKSAHPMGVLSSLTSALIAFNPLNETKISLKDSAGTTEKDKMYLSTIRLLAKFPIMSSWTLRKIKGLPLNYSNNNLEYTENIAYMMFAKPNQDYKQNDIIVNALNTLLILHADHEQNCSTSTVRIVGSSYAGLYASISAGISALWGRLHGGANQAVIEMLELIKNDGSDIDKYINKAKDKSDPFRLMGFGHRVYKNFDPRAKIIKKAADQVLNDLGIDDPILEIAKSIEEKALNDEYFIEKKLYPNVDFYSGIIYRALGIPTEMFTVMFALGRIP

SEQ ID NO: 115427 - protein, 277 aa, Unknown
  Bacterial polypetide isolated from the Sargasso Sea
FEGFSTTAHPMVILSSMVSSLSAYYSEASGAASVDQLEVNTARLMAKIRTIAAFSFKKSIGQPFIYPQDKLAYCANFLNMMFAVPAEPYKVDPEICKALDLLLILHADHEQNCSASTVRVVGSSMANVYASVASGILALWGPLHGGANQQVLRMLERIHADGDDLDKYVRLAKDPDSDFRLMGFGHRVYKNFDPRATIIKSACDRVLNLLGVNDPLLDLARRLEEVALSDEYFVERKLYPNVDFYSGIIYRAIGIPENMFTVMFALGRLPGWIAQWK

SEQ ID NO: 115428 - protein, 322 aa, Unknown
  Bacterial polypetide isolated from the Sargasso Sea
KLYQQTGMFTYDPGFTSTASCDSSITYIDGNKGVLRHRGYNIHDLASNSEFLEVCYLLLHGDLPSPEDKQKFIDVITNHTMLHEQLVHLYRGFRRDAHPMAIMVGVVGALSAFYHDSTDFSDINQRMVACHRLIAKIPTIGAMAYKYSIGQPFVYPRNDLSYAENFLYMTFSVPTEDFKISPKIVQAMDRFFILHADHEQNASTSTVRLAGSSGANPFACIAAGIASLWGPAHGGANEAVIKMLEEIGDVKNIPQYISKAKDKNDSFRLMGFGHRVYKNYDPRASVMKESAHEVLEELNKLDDPLLKIAIELEKIALKDEYF

SEQ ID NO: 115429 - protein, 171 aa, Unknown
  Bacterial polypetide isolated from the Sargasso Sea
AFGALAHGGANEACLNMLKEIGTADNIPKFIERAKDKDDPFRLMGFGHRVYKNYDPRAKVMQKTCHEVLAALGKENDPLFKLAMDLEKIALEDPYFVEKKLYPNVDFYSGITLSAINIPSNMFTVIFALSRTVGWISQWMEMMSDPDYRLARPRQLYIGEKQRDVLKRDER

SEQ ID NO: 115430 - protein, 277 aa, Unknown
  Bacterial polypetide isolated from the Sargasso Sea
LELPGNDSIELPVKQGSAGFDVIDISKLGSKGYFTFDPGFLATASCESAITYIDGDQGILLHRGYPIEQLAVDSDYLDLCYLLLYGELPTKEQYAEFVHTVKTHTMVHEQLAFFFRGFRRDAHPMAMLCGVTGALSAFYQDSLDVNDPRHREIAAYRLVSKMPTIAAMCYKYSSGQPFVYPRNDLSYAGNFLSMMFAVPCEEYKVNPIVERAMDRIFILHADHEQNASTSTVRLAGSSGANPFACIAAGIASLWGPAHGGANEACLQMLEEIGSVDR

SEQ ID NO: 115431 - protein, 249 aa, Unknown
  Bacterial polypetide isolated from the Sargasso Sea
MVKKKLNKRNNRKAKIIIDETTYEFPIYNSTEGEAVIDISKLHAEANIFTYDPGFTSTASCESKITYIDGDKGILRYRGYDIEELAKKSDFIEVVNLLIYGDLPNKEQLTKYKMLITRHTLLHEQIINFFQGFRRDAHPMAMMVGVMGALSSFYQDTLNINDSHQRQEATRRIIAKSATIGAMAYKYSLGQAFVSPRNNLSFSENFLYMCFSNTAENYKVSPVLAKAMDTILILHADHEQNASTSTVRL

SEQ ID NO: 115432 - protein, 173 aa, Unknown
  Bacterial polypetide isolated from the Sargasso Sea
MFTYDPGFTSTASCDSSITYIDGNKGVLRHRGYNIHDLASNSEFLEVCYLLLHGELPSPEDKQKFIDVITNHTMLHEQLVHLYRGFRRDAHPMAIMVGVVGALSAFYHDSTDFSDINQRMVACHRLIAKIPTIGAMAYKYSIGQPFVYPRNDLSYAENFLYMTFFVPTVRVYN

SEQ ID NO: 115433 - protein, 149 aa, Unknown
  Bacterial polypetide isolated from the Sargasso Sea
MVKSSKTAKLLLDGKEYDLPIMSPTAGPDVLDIRKLYGDAGVFTYDPGFTSTASCDSTITFIDGGKGELLHRGYPIDQLAEYSHYLEVCYLLLYGDLPTPAELEDFENRVTNHTMIHEQMGYLFRGFRRDAHPMAIMTGVVGAMSAFYH

SEQ ID NO: 115434 - protein, 303 aa, Unknown
  Bacterial polypetide isolated from the Sargasso Sea
VELETKDASVGPSVIDLKNLYHDTGYFTFDPSYSTTASCESYITYIDGAKGILEYRGYPIEQLAEQSTYLEVAYLLFNGELPSSNIALDEFRSDVKHNMTLPENMDLIFSGFGRDAHPMAMLTTAVAALSGSYHDGINIRDKGHQKEFFFNILGKMPILVANVFNHNQKDANVDYDESLSYSENVLRLFFGWKGDYEIDPVLSKALDILLILHADHEQNCSTSSVRLTGSSGTNPYAAIAAGVAALWGPAHGGANEAVVRMFDEIGSKDNIPQYIEKAKDKNDPFRQMGFGHRVYKNYDPRAT

SEQ ID NO: 115435 - protein, 122 aa, Unknown
  Bacterial polypetide isolated from the Sargasso Sea
YKNYDPRATVMKKTADEVLKAVGKEDEPMFKLARELEKIALEDEYFISKKLYPNVDFYSGVILQAMGFPSSLFTVLFAVARTVGWVAQWNEMIEDPEQRIGRPRQLYTGAKERDFIKIKDRI

SEQ ID NO: 115436 - protein, 158 aa, Unknown
  Bacterial polypetide isolated from the Sargasso Sea
NISKFIERAKDKNDQFRLMGFGHRVYKNYDPRANVLRKYCHNLLKETDNFNLPLFRLANKLEEIALNDSYFIKKKLYPNVDFYSGIILKALGLPESMFTVIFAVARTVGWISQWKEMTEETNKKISRPRQLYMGNKHRKFVDIDKRKNIKQMFPGEIK

SEQ ID NO: 115437 - protein, 251 aa, Unknown
  Bacterial polypetide isolated from the Sargasso Sea
AMCYKHGIGQPFIYPKNKMSLAENFVNMLFGTPCEETSVSPVIAKAMDTLFLLHADHEQNASTSTVRLAGSTGSNPFACLASGIAALWGPAHGGANEAVLDMLNEIGDESRIDEFILKAKDKDDPFRLMGFGHRVYKNYDPRATVIRGICAEVLDELGVDNDPLFKIARKLEKLALEDDYFNERKLFPNVDFYSGIILKAIGIPTSLFTVIFATGRTPGWIAHWNEMLSNPYKIGRPRQLYRGEIKRDYPD

SEQ ID NO: 115438 - protein, 282 aa, Unknown
  Bacterial polypetide isolated from the Sargasso Sea
ACHRLIAKIPTIGAMAYKYSMGQPFIYPKNNLSYTENFLYMTFSLPTKDFHISPKIIRAMDRFFILHADHEQNASTSTVRLAGSSGANPFACIAAGIASLWGPAHGGANEAVIKMLEDIGDVSNIPTFIKKAKDKDDPFRLMGFGHRVYKNYDPRASMMKESAYEVLEELNKLDDPLLKIAIELETIALKDEYFIEKKLFPNVDFYSGIILKSLGFPTSMFTVLFAIGRTVGWISQWKEMIEDPINKIGRPRQLYKGHLDRKFQTEDSREKKSIFNWLWKKN

SEQ ID NO: 115439 - protein, 218 aa, Unknown
  Bacterial polypetide isolated from the Sargasso Sea
LILHADHEQNASTSTVRLAGSSGANPFACIAAGIASLWGPAHGGANEAVIKMLEEIGDIKNIPNYVNKAKDKNDPFRLMGFGHRVYKNYDPRASVMKESAYEVLEELNKLNDPLLKIAIELEKLALNDEYFIEKKLYPNVDFYSGIILKALGFPTSMFTVLFAIGRTVGWISQWKEMIEDPINKIGRPRQLYKGNKSREYQLEEKREKKSIFNWLWSK

SEQ ID NO: 115440 - protein, 113 aa, Unknown
  Bacterial polypetide isolated from the Sargasso Sea
EELNKLDDPLLKIAIELEKIALKDEYFIEKKLFPNVDFYSGIILKALGFPTSMFTVLFAIGRTVGWISQWKEMIEDPINKIGRPRQLYLGKNAREFQNESTREKKSIFKWLWK

SEQ ID NO: 115441 - protein, 255 aa, Unknown
  Bacterial polypetide isolated from the Sargasso Sea
MAYKYSLGQPFNYPQNNLTYAENFLHMCFSVPAEKYKIDPIIAKAMDKILILHADHEQNASTSTVRVAGSSGANPFACIAAGIASLWGPAHGGANEAVLKMLSEIGTIDRIGEFVNKAKDKNDPFRLFGFGHRVYKNYDPRAAVMRVTCHEVLDLLGIKNDPLLEIAMELEKIALNEEYFIEKKLYPNVDFYSGIILKAMGFPTDMFTVLFAVARTVGWVAQWNEMITDPVQRIGRPRQLYTGSTIRDFVELKNR

SEQ ID NO: 115442 - protein, 295 aa, Unknown
  Bacterial polypetide isolated from the Sargasso Sea
CKSKITYIDGEKGVLLHRGYKIEDLAENCDFLEVAFLLLNADLPTPEQKKAFDNKITTHTMIHEQLSMFFRGFRRDAHAMAVMCGVVGALSAFYHDSTDITDPGQRLVASHRLVAKIPTIAAMAYKFSIGQPFIYPRNDLSYSENFLNMMFSVPAEDYKIDPILSKAMDKILILHADHEQNASTSTVRLAGSSGANPFACIAAGIASLWGPAHGGANEAVIHMLKEIQANGNVYDYVKKAKDPNDPFRLMGFGHRVYKNYDPRATVMKKTADAVLSAVGKEDEPMFILARELEKI

SEQ ID NO: 115443 - protein, 253 aa, Unknown
  Bacterial polypetide isolated from the Sargasso Sea
MSKKRKSLKNKQNAQLLINNKSYVLPIYNSTEGESVIDITKLHADAKIFTYDPGFTSTASCESKITFIDGDKGILRYRGYDIEELAKKSDFIEVVNLLIYGDLPNKEQLKKYKKLITRHTLLHEQIINFFQGFRRDAHPMAMMVGVMGALSSFYQDSLDINDAHQRQEATRRIVAKSSTIGAMAYKYSIGQSFVSPKNNLSFSENFLHMCFSNTAEEYKVSPILAKAMDTIFILHADHEQNASTSTVRLAGSS

SEQ ID NO: 115444 - protein, 90 aa, Unknown
  Bacterial polypetide isolated from the Sargasso Sea
EIAKRLEEIALKDEYFIEKKLYPNVDFYSGIILKALGIPTSMFTVIFAIGRTVGWIAHWNEMIGGAYRIGRPRQLYTGETQRDFIPLDKR

SEQ ID NO: 115445 - protein, 215 aa, Unknown
  Bacterial polypetide isolated from the Sargasso Sea
MADYEDKKDKVKPFTLFNNETGQSFEIPVLRGTQGPDVLDIRSLHDKTGMFTYDPGFTSTASCDSSITYIDGHKGILRHRGYDIKDLATNSDFLEVCYLLLHSELPSQEDKNKFEKVIMNHTMLHEQLVHLYRGFRRDAHPMAIMVGVVGALSAFYHDSTDFSDLNQRMVACHRLIAKIPTIGAMAYKYSIGQPFVYPKNNLSYTENFLHMTFSV

SEQ ID NO: 115446 - protein, 160 aa, Unknown
  Bacterial polypetide isolated from the Sargasso Sea
EAVVKMFGEIGSKDNISKYIEKAKDKNDPFRLMGFGHRVYKNYDPRATIIRSQCHKVLESTGNDSNPMFELALELEEIALNDDYFVARNLYPNVDFYSGLIYEAMDIPKEMFTAMFALARTVGWATHWCEMMSNPKQKIGRPRQLYLGDKKRDYVPINDR

SEQ ID NO: 115447 - protein, 268 aa, Unknown
  Bacterial polypetide isolated from the Sargasso Sea
MTDKTAKLTIDGKDIDLPIYEATNGPDVVDVGKLTGQGYFTYDPGFVSTAACDSEITFIDGDQGILLHRGYPIEQLAEKSQHLELCYLLLNGELPSESELNEFIASVKSRAAVDSQFKEFFKGFKTDAHPMAIMCGVTGALAASFHNSLDIDNAEDRKETSLQLIAKIPTMAAMSYKNALGEDFVEPREDLGYAENFLHMMFAKKGEDYKVSPTIAKAMDRIFLLHADHEQNASTSTVRLAGSTGTNPYAAIAAGIAALWGPSHGGAN

SEQ ID NO: 115448 - protein, 270 aa, Unknown
  Bacterial polypetide isolated from the Sargasso Sea
VASYRLIAKMPTIAAMAYKFSIGAPFMYPRNNLKYAENFLYMMFSNPCEDYEVNPILSKAMDRILILHADHEQNASTSTVRLAGSSGANPFACISAGIASLWGPAHGGANEAVLNMLEEIEHPKNITKFVEKAKDKDDPFRLMGFGHRVYKNFDPRAKVMHQTCHEVLGELGITNEPLLDIAVELERLALEDDYFVEKKLYPNVDFYSGIIFKAMGIPTSLFTVLFAVARTVGWVAQWNEMVEDPSQKIGRPRQLYTGETTREFVPLGQR

SEQ ID NO: 115449 - protein, 267 aa, Unknown
  Bacterial polypetide isolated from the Sargasso Sea
LWAYKYSVGQPFVYPKNNLSYAENFLHMTFSVPTEDYKINPKIAKAMDRFFILHADHEQNASTSTVRLAGSSGANPFACIAAGIASLWGPAHGGANEAVIKMLEEIGSEKNISNYINKAKDKNDPFRLMGFGHRVYKNYDPRASVMKQSAHEVLEELNLKDPLLDIALKLEKIALEDKYFIDKKLYPNVDFYSGIMLKALGFPKSMFTVLFAIGRTVGWISQWKEMIEDPINKIGRPRQLFIGNKAREFQIIDIREKKSIFNWLWKK

SEQ ID NO: 115450 - protein, 163 aa, Unknown
  Bacterial polypetide isolated from the Sargasso Sea
EIGDIKNIPEFINKAKDKNDPFRLMGFGHRVYKNYDPRASVMKESAHEVLEELNKLDDQLLKIAIELEKIALKDEYFIKKKLFPNVDFYSGIILKALGFPTSMFTVLFAIGRTVGWISQWKEMIEDPINKIGRPRQLYLGKSAREFQKESTREKKSIFKWLWK

SEQ ID NO: 115451 - protein, 233 aa, Unknown
  Bacterial polypetide isolated from the Sargasso Sea
MCFSNTAEEYKISPVISKAMDTIFILHADHEQNASTSTVRLAGSSGANPFACIAAGVSSLWGPAHGGANQAALEMLEEIGSTKNIRKYLNKAKSKKDPFKLMGFGHRVYKNYDPRAKILKKICKKVLSHVGIKNDPILELAMELEKIALNEKYFIEKKLYPNVDFYSGIILRAIGFPPEMFTVIFAIARTAGWTAQWTEMIEDPIQKIGRPRQLYTGNKYLKYGVKRSKKSTR

SEQ ID NO: 115452 - protein, 294 aa, Unknown
  Bacterial polypetide isolated from the Sargasso Sea
TFIDGNKGILRYRGYDIEELANKSDFIEVVNLLIYGDLPNKEQLKKYKKLITRHTLLHEQIINFFQGFRRDAHPMAMMVGVMGALSSFYQDTLDINDAHQRQEATRRIIAKSSTIGAMAYKYSIGQSFVSPKNNLSFSENFLHMCFSNTAEEYRISPIISKAMDTIFILHADHEQNASTSTVRLAGSSGANPFACIAAGVSSLWGPAHGGANQAALEMLEEIGSTKNIRKYLNKAKSKKDPFKLMGFGHRVYKNYDPRAKILKKICKKVLAHVGIKNDPILKLAMELEKIALNE

SEQ ID NO: 115453 - protein, 245 aa, Unknown
  Bacterial polypetide isolated from the Sargasso Sea
NFLYMTFSVPSEDFKISPKIVKAMDRFFMLHADHEQNASTSTVRLAGSSGANPFACIAAGIASLWGPAHGGANEAVIKMLEEIGDVSNIQKFVDKAKDKNDSFRLMGFGHRVYKNYDPRATVMKESAHEVLQELNKTDDPLLKIAIELEKIALKDDYFIQKKLFPNVDFYSGIILKALGFPTSMFTVLFAIGRTVGWISQWKEMIEDPINKIGRPRQLYTGYNSREYEIEDSREKKSIFNWLWKK

SEQ ID NO: 115454 - protein, 214 aa, Unknown
  Bacterial polypetide isolated from the Sargasso Sea
NVIQRHTMVHEQLVNLYRGFRRDAHPMSIMVGVVGALSAFYHDSTDFSDINQRMIACHRLIAKIATIGAMAYKYSIGQPFVYPKNNLSYCENFLHMTFSVPTEDYVINPKISKAMDRFFILHADHEQNASTSTVRLAGSSGANPFACIAAGIASLWGPAHGGANEAVIKMLEEIGDISRIPEYINRAKDKNDDFRLMGFGHRVYKNYDPRADVM

SEQ ID NO: 115455 - protein, 286 aa, Unknown
  Bacterial polypetide isolated from the Sargasso Sea
MTGSVGPDVIDVRQLYGATDCFTYDPGYTSTGSCSSKITYIDGENGILLYRGYPIDQLAENSDFMEVCYLLLYGELPSEEQKSTFEDGITYHTMLNEQLNYFFRGFRRDAHPMAVMCGIVGALSAFYHDSLDISDPKHRMVASYRLIAKMPTIAAMAYKFSVGAPFMYPRNDLKYAENFLQMMFSNPCEDYSVNPILAKAMDRILILHADHEQNASTSTVRLAGSSGANPFACISAGIASLWGPAHGGANEAVLNMLEEIEHPKNIAKFVEKAKDKDDPFRLMGFG

SEQ ID NO: 115456 - protein, 229 aa, Unknown
  Bacterial polypetide isolated from the Sargasso Sea
RKAPRTTLSMSENFFHMCFGEVPPKEVIKAFDISLILYAEHSFNASTFTTRVITSSRSDIYSAVTGGIGSLKGPLHGGANEAVMHNLLEIRTPARAEKWLRDKQKNKELVMGFGHRVYKQGDSRVPTMRAALEDLAAWKGDTKWLEISDILQDIMINEKAIHPNLDFPAGPAYYLMGFDIDMYTPIFVMSRITGWAAHILEQNASNSLIRPLSAYGGRAQRKVKLISKR

SEQ ID NO: 115457 - protein, 178 aa, Unknown
  Bacterial polypetide isolated from the Sargasso Sea
VFSRNSFFMGPAHGGANEAVLKMLNEIQDEKNISKYLKKARDKNDPFRLFGFGHRVYKNYDPRAKVMQKTCHEVLDLLGIKNNPLLSLAMKLEKIALEDEYFIKRKLYPNVDFYSGIILQAIGFPTSMFTVLFAVARTVGWVAQWNEMIEDPNQRIGRPRQLYTGPNKRNYVKLNKRG

SEQ ID NO: 115458 - protein, 191 aa, Unknown
  Bacterial polypetide isolated from the Sargasso Sea
SGANPFACIAAGIASLWGPAHGGANEAVIKMLEEIGNISKINEYINRAKDKNDDFRLMGFGHRVYKNYDPRADVMKNTAHEVLKELNMEDDKLLKIAIELEKIALKDSYFIEKKLYPNVDFYSGIILKALGFPTSMFTVLFAIGRTVGWISQWKEMIEDPINKIGRPRQLYRGKNTRQYEIVESREKRSIF

SEQ ID NO: 115459 - protein, 233 aa, Unknown
  Bacterial polypetide isolated from the Sargasso Sea
NFLRMCFAVPAESYEVNPILSRAMDRIFTLHADHEQNASTSTVRLASSSGANPFACIAAGIACLWGPAHGGANQACLEMLREIGTADRIPEFIKRAKDKDDPFRLMGFGHRVYKNTDPRAKVLKRSADEVLDLLGVNNNPLLQVAKQLEEVALDDEYFADKKLFPNVDFYSGIILEAMGFPTSMFTPIFALSRTVGWISQWKEMIADPQVKIGRPRQLYLGEIPRDYTDIEKR

SEQ ID NO: 115460 - protein, 279 aa, Unknown
  Bacterial polypetide isolated from the Sargasso Sea
YNIHDLASKSEFLEVCYLLLHGDLPSPEDKQKFIDVITNHTMIHEQLVHLYRGFRRDAHPMAIMVGVVGALSAFYHDSTDFSDINQRMIACHRLIAKMPTIGAMAYKYSIGQPFVYPRNDLSYSENFLYMTFSVPTEDFKISPKIVKAMDRFFILHADHEQNASTSTVRLAGSSGANPFACIASGIASLWGPAHGGANEAVIKMLEEIGDVKNIPEYIKKAKDKNDSFRLMGFGHRVYKNYDPRATVMKESAHEVLEELNKHDDPLLKIALELERIALE

SEQ ID NO: 115461 - protein, 323 aa, Unknown
  Bacterial polypetide isolated from the Sargasso Sea
LLLYRGYPVEELAKSSTFIEVAYLLLYGELPNKAMLEDFSDSINHHTMLNEGMLRLFNGFRYDAHPMAMVSAIVGSMSAYYHDTMDINSARAREIFAHRIIAKIPTIAAAAYKHSVGQPFIYPLNTLNYCENLLHMFFSVPAEQRDIDPIAAEALDLLFILHADHEQNCSTSTVRMAGSSGANPYSAIAAGISALWGPAHGGANEAVLRMLVEIGSKKNIEKYIDKAKDKDDPFRLMGFGHRVYKNYDPRAKIIRKMCHKVLNQKGSADSPLLELAIELEDIALKDDYFREKNLYPNVDFYSGIIYQALGIPTSMFTVMFAIG

SEQ ID NO: 115462 - protein, 202 aa, Unknown
  Bacterial polypetide isolated from the Sargasso Sea
LAGSSGANPFACIAAGIASLWGPAHGGANEAVIKMLEEIGDVSNIQKFIDKAKDKNDSFRLMGFGHRVYKNYDPRATVMKESAHEVLEELNMQDDPLLKIAIELEKIALKDEYFISKKLFPNVDFYSGIILKALGFPTSMFTVLFAIGRTVGWISQWKEMIEDPINKIGRPRQLYTGYKARPYQVESSREKKSIFNWLWKKD

SEQ ID NO: 115463 - protein, 228 aa, Unknown
  Bacterial polypetide isolated from the Sargasso Sea
FLSMMFAVPCEEYKVNPIVERAMDRIFILHADHEQNASTSTVRLAGSSGANPFACIAAGIASLWGPAHGGANEACLQMLEEIGSVDRIPEFIARAKDKNDPFRLMGFGHRVYKNFDPRAKVMRETCHEVLKELKVQDPLLDVAMELERIALEDEYFISKKLYPNVDFYSGIIMKAIGIPTSMFTVLFALARTVGWIAHWKEMLDQPGHKISRPRQLYTGETARDFVDL

SEQ ID NO: 115464 - protein, 305 aa, Unknown
  Bacterial polypetide isolated from the Sargasso Sea
FTYDPGFTSTASCDSSITFIDGNKGILRHRGYDIHELASNSDFLEVCYLLLHGDLPSPEDKKKFKDVITNHTMLHEQLVHLYRGFRRDAHPMAIMVGVVGALSAFYHDSTDFSDINQRMVACHRLIAKIPTIGAMAYKYSIGQPFVYPRNDLSYAENFLYMTFSVPTQEFKISPKIAKAMDRFFVLHADHEQNASTSTVRLAGSSGANPFACIAAGIASLWGPAHGGANEAVIKMLEEIGDVENIPEFINKAKDKNDSFRLMGFGHRVYKNYDPRASVMKESTHEVLEELNKLDDPLLKIAIELE

SEQ ID NO: 115465 - protein, 248 aa, Unknown
  Bacterial polypetide isolated from the Sargasso Sea
ASKRILLYILGKMPILVANVFNHNQKDANVDYDESLSYSENILRLFFGWKDGYEIDPILSKALDILLILHADHEQNCSTSSVRLTGSSGTNPYAAIAAGVAALWGPAHGGANEAVVRMFDEIGSKDNISQYIEKAKDKNDPFRLMGFGHRVYKNYDPRATIIRSQCHKVLESTGNDSNPMFELALELEEIALNDDYFVQRNLYPNVDFYSGLIYQAMDIPKEMFTAMFALARTVGWATHWCEMMSNPK

SEQ ID NO: 115466 - protein, 242 aa, Unknown
  Bacterial polypetide isolated from the Sargasso Sea
VIFRKFFLHMCFSNTAEKYKVSPVLAKAMDIIFIIHADHEQNASTSTVRLAGSSGANPFACIAAGVSSLWGPAHGGANQAALEMLEEIGSSKNIKKYIAKAKNKRDAFKLMGFGHRVYKNYDPRAKILKSICEKVLKHIGVKNDPILKLAIDLEKIALNDKYFKEKRLYPNVDFYSGIILRAIGFPPEMFTVIFAIARTAGWTAQWTEMIEDPIQKIGRPRQLYTGKGITKYGVERSRKNTR

SEQ ID NO: 115467 - protein, 246 aa, Unknown
  Bacterial polypetide isolated from the Sargasso Sea
YIDGDQGILLHRGYPIEQLAVDSDYLDLCYLLLYGELPTKEQYAEFVHTVKTHTMVHEQIAFFFRGFRRDAHPMAMLCGVTGALSAFYQDSLDVNDPRHREIAAYRLVSKMPTIAAMCYKYSSGQPFVYPRNDLSYAGNFLSMMFAVPCEEYKVNPIVERAMDRIFILHADHEQNASTSTVRLAGSSGANPFACIAAGIASLWGPAHGGANEACLQMLEEIGSVDRIPEFIARAKRQNDPFRLMGF

SEQ ID NO: 115468 - protein, 207 aa, Unknown
  Bacterial polypetide isolated from the Sargasso Sea
AFLLHADHEQNCSTSTVRMAGSSGANPYSAIAAGISALWGPAHGGANEAVLRMLVEIGSKKNIEKYIDKAKDKDDPFRLMGFGHRVYKHYDPRAKIIRKMCHKVLNQKGSADSPLLELAIELEEIALKDDYFREKSLYPNVDFYSGIIYQALGIPTSMFTVMFAIGRTVGWVSHWREMITDPNSKISRPRQLYTGPEKRNYISIDKR

SEQ ID NO: 115469 - protein, 287 aa, Unknown
  Bacterial polypetide isolated from the Sargasso Sea
VDLEIKDASEGPSVIDLKSLYSDTGYFTFDPSYSTTASCESKITYIDGAKGILEYRGYPIEQLAEQSTYLEVAYLLFNGELPSSNISLDEFRSQVKKNMTLPEGMSAIFTGFGNDAHPMAMLTTAVAALSGSYHQGINVRDKEHQKEFFFNILGKMPILVANVFNHNQEGANVEYDESLSYSENILRLFFGWKDGYEINPIFSKALDILLILHADHEQNCSTSSVRLTGSSGTNPYAAIAAGVAALWGPAHGGANEAVVKMFGEIGSKDNISKYIDKAKDKNDPFRL

SEQ ID NO: 115470 - protein, 278 aa, Unknown
  Bacterial polypetide isolated from the Sargasso Sea
ELPTKSEWNEFSSAIKNHTMVHEQIRVFYNGFRRGAHPMAIMVASVAALSAFYPDSINIKDPEQRRISARRMVAKIPTLAAMAYKYSLGQPFVYPDNSLPYSENFMQMCFAVPAEKYQINKVFANALDKIFILHADHEQNASTSTVRLAASSGANPFASISTGFTSLWGPLHGGANEAALNMLKEIGDVKNIPKYIKKAKDKKDPFKLMGFGHRVYKNYDPRAKVMQKTCHEVLNEIGNTDNKLLEVAKELEKIALNDEYFIEKKLYPNIDFYSGITL

SEQ ID NO: 115471 - protein, 279 aa, Unknown
  Bacterial polypetide isolated from the Sargasso Sea
LPRLTGYQRSASSRISAIRLIAKMPTLAAMVYKYSMGQPMMYPRNDLSYSENFLHMMFNTPCEEKKISPVLAKAMDRIFVLHADHEQNASTSTVRLAGSSGANPFACIAAGIAALWGPAHGGANEAVLRMLDEIGDVSNIEKFVAKAKDKDDPFKLMGFGHRVYKNFDPRAKVMKETCDEVLAELGINDPQLELAMKLEEIARNDPYFKERNLYPNVDFYSGIILKAIGIPTEMFTVIFATGRTPGWIAHWNEMISGPYKIGRPRQLYTGSTQRDYPSK

SEQ ID NO: 115472 - protein, 277 aa, Unknown
  Bacterial polypetide isolated from the Sargasso Sea
VRDKEDQKEFFFNILGKMPILVANVFNHNQEDSNVEYDETLSYSENILRLFFGWKDGYEINPIFSKALDILLILHADHEQNCSTSSVRLTGSSGTNPYAAIAAGVAALWGPAHGGANEAVVKMFGEIGSKDNISKFIDKAKDKNDPFRLMGFGHRVYKNYDPRATIIRSQCHKVLESTSNESNPMFELALELEEIALNDEYFVQRNLYPNVDFYSGLIYEAMDIPKEMFTAMFALARTVGWATHWCEMMSNPKHKIGRPRQLYLGEKKRDYVPINDR

SEQ ID NO: 115473 - protein, 143 aa, Unknown
  Bacterial polypetide isolated from the Sargasso Sea
QYIEKAKDKNDPFRLMGFGHRVYKNYDPRATIIRNQCHKVLESTGNESNPMFELALELEEIALNDDYFVERNLYPNVDFYSGLIYEAMDIPKEMFTAMFALARTVGWATHWCEMMSNPKHKIGRPRQLYLGEKKRDYVPISDR

SEQ ID NO: 115474 - protein, 176 aa, Unknown
  Bacterial polypetide isolated from the Sargasso Sea
PFASMAAGIAALWGPSHGGANEAVLTMLDEIGSVENIPAYIKKAKDKDDPFRIMGFGHRVYKNYDPRAKVMQQTCHEVLEELGVEDDPVLAMAKELERIALEDDYFVEKRLYPNVDFYSGIILKAIGIPVEMFTVIFATGRTPGWIAHWCEMISGGYKIGRPRQLYKGSIKRDYPG

SEQ ID NO: 115475 - protein, 155 aa, Unknown
  Bacterial polypetide isolated from the Sargasso Sea
MLKEIGSVDRIPDFIKRAKDKNDPFRLMGFGHRVYKNFDPRAKVMKESADEVLELLGISNNRTLQVAKELEKIALEDEYFIEKKLYPNVDFYSGIILEAMGFPTSMFTPIFALARTVGWISHWIEMHSDPDKKIGRPRQLYKGNLERPFVLIKDR

SEQ ID NO: 115476 - protein, 254 aa, Unknown
  Bacterial polypetide isolated from the Sargasso Sea
KSTSKTKTAKLTINNNTYELPIYKSTEGESVIDITKLHSQAKLFTYDPGFTSTASCESKITFIDGDKGILRYRGYDIEELANKSDFIEVVNLLIYGDLPNKEQLKKYKKLITRHTLLHEQIINFFQGFRRDAHPMAMMVGVMGALSSFYQDSLDINDAHQRQEATRRIIAKSSTIGAMAYKYSIGQAFVSPKNNLSFSENFLHMCFSNTAEEYKVSPVLSKAMDTIFILHADHEQNASTSTVRLAGSSGANPFA

SEQ ID NO: 115477 - protein, 247 aa, Unknown
  Bacterial polypetide isolated from the Sargasso Sea
SVIDVRTLYGETDHFTFDPGYTSTGSCESALTYIDGDKGILLHRGYPIEQLAEHSNFLEVAHLLLYGDLPNQQANEKFVTDITYHTMLHDQLMNFYRGFRRDAHPMAIMCGVVGALSAFYHDSTDINDPHARMVASYRLIAKVPTIAAMAFKYSLGQPFNFPQNKLTYAENFLQMLFGVPSEDYEINPVLARAMDRLLILHADHEQNASTSTVRLAGSSGANPFACIAAGIASLWGPAHGGANEAVL

SEQ ID NO: 115478 - protein, 143 aa, Unknown
  Bacterial polypetide isolated from the Sargasso Sea
FRLMGFGHRVYKNYDPRAKVMKESAHEVLEELNKLDDPLLKIAIELEKIALKDEYFIQKKLFPNVDFYSGIILKALGFPTSMFTVLFAIGRTVGWISQWKEMIEDPVNKIGRPRQLYTGYKEREYQIEASREKKSIFNWLWKK

SEQ ID NO: 115479 - protein, 304 aa, Unknown
  Bacterial polypetide isolated from the Sargasso Sea
DAHPMAIMVGVVGALSAFYHDSTDFSDINQRMIACHRLIAKIPTIGAMAYKYSIGQPFVYPRNDLSYAENFLYMTFSVPSEDYKVSPKIVRAMDRFFTLHADHEQNASTSTVRLAGSSGANPFACIAAGIASLWGPAHGGANEAVIKMLEEIGDVSNIQKFIDKAKDKNDSFRLMGFGHRVYKNYDPRATVMKESAHEVLEELNMQDDPLLKIAIELEKIALKDEYFISKKLFPNVDFYSGIILKALGFPTSMFTVLFAIGRTVGWISQWKEMIEDPVNKIGRPRQLYTGYKARPYQAESSREK

SEQ ID NO: 115480 - protein, 154 aa, Unknown
  Bacterial polypetide isolated from the Sargasso Sea
MKYKNERNISKYLKKARDKNDPFRLFGFGHRVYKNYDPRAKVMQKTCHEVLDLLGIKNNPLLSLAMKLEKIALEDEYFIKRKLYPNVDFYSGIILQAIGFPTSMFTVLFAVARTVGWVAQWNEMIEDPNQRIGRPRQLYTGPNKRNYVKLNKRG

SEQ ID NO: 115481 - protein, 262 aa, Unknown
  Bacterial polypetide isolated from the Sargasso Sea
FYQDTLNINDSHQRQEATRRIIAKSATIGAMAYKYSLGQAFVSPRNNLTFSENFLYMCFSNTAENYKVSPVLAKAMDTILILHADHEQNASTSTVRLAGSSGANPFACIAAGVSSLWGPAHGGANQAALEMLEEIGSSKNIKKYIAKAKNKKDPFKLMGFGHRVYKNYDPRAKILKSICQKVLKHVGVKNDPILKLAMDLEKIALNDKYFREKRLYPNVDFYSGIILRAIGFPPEMFTVIFAIARTAGWTAQWTEMMKIQSR

SEQ ID NO: 115482 - protein, 233 aa, Unknown
  Bacterial polypetide isolated from the Sargasso Sea
NFLRMCFAVPAEEYEVNPILSEAMDRIFILHADHEQNASTSTVRLASSSGANPFACIAAGIACLWGPAHGGANEACLQMLRQIQTVDRIPEFIKRAKDNQDPFRLMGFGHRVYKNFDPRSSVMKESADEVLNLLGVENNPTLQVAKELERIALEDEYFIEKKLYPNVDFYSGIILDAMGFPTSMFTPIFALARTVGWISQWKEMISHPDNKIGRPRQLYLGSGYRPFKPLNQR

SEQ ID NO: 115483 - protein, 335 aa, Unknown
  Bacterial polypetide isolated from the Sargasso Sea
STHWTRRVGCGSLTSQNWFTYDPAFVSTASCESQITYIDGEQGILLHRGYPIDQLAESSNYLETCYLLLYGELPNNEQYEQFVSVIQNHTMVHEQIRTFFNGFRRDAHPMAVMCGVVGALSAFYHDSLDISNERHREIAAYRLVAKIPTIAAMCFKFSTGQPFMYPDNRLNYSENFLHMMFGTPCEPSKISPTLAKAMDRIFLLHADHEQNASTSTVRLAGSSGANPFACIAAGIVALWGPSHGGANEAVLEMLQEIGDVSRIDEYVARAKDKEDPFRLMGFGHRVYKNFDPRAKVMKEAADEVLQELGIENDPLLAIAKRLEEIALEDDYFISK

SEQ ID NO: 115484 - protein, 283 aa, Unknown
  Bacterial polypetide isolated from the Sargasso Sea
FRRDAHPMAIMCGVVGALSAFYHDQMDVSDPKQREITGHRLIAKMPTIAAWCYKYSMGQPFMYPRNDLSYAENFLHMMFGTPCEEYKPNPVLANAMDKIFILHADHEQNASTSTVRLAGSTGANPYACIASGIAALWGPAHGGANEAVLDMLAEIGDESNIEKFIAKAKDKDDPFRLMGFGHRVYKNFDPRAKVMAQTAHEVLSELGLENDPLLKIAQRLEKIALEDEYFVQRQLYPNVDFYSGIILKAIGIPTSMFTVIFAMSRTIGWFSHWNEMVSGANRI

SEQ ID NO: 115485 - protein, 181 aa, Unknown
  Bacterial polypetide isolated from the Sargasso Sea
VAAGVSSLWGPAHGGANQAALEMLETIASSKNIKKYLNKAKNKKDPFKLMGFGHRVYKNYDPRAKILKKICDKVLNHVGIKNDPILKLAKDLEGIALKDKYFIEKKLYPNVDFYSGIILRAIGFPPEMFTVIFAIARTAGWAAQWTEMIEDPIQKIGRPRQLYTGNKIQKYGIKRSKKNTR

SEQ ID NO: 115486 - protein, 178 aa, Unknown
  Bacterial polypetide isolated from the Sargasso Sea
CIASGIACLWGPAHGGANEACIRMLEEIDNVNNIPEYVKKAKDKNDPFRLMGFGHRVYKNFDPRAKVMQKICHEVLDHLGIKDDPLLAIAVELEKIALEDEYFVEKKLYPNIDFYSGIVMKALGYPMDMFTVLFAVGRTVGWVSQWNEMIEDKSQRIGRPRQLYVGNDHRQYVGIQKR

SEQ ID NO: 115487 - protein, 251 aa, Unknown
  Bacterial polypetide isolated from the Sargasso Sea
FYDPGFLSTASCDSEITYIDGAAGILMYRGYPIEQLAEHSNHLEVSHLLLNGELPSSAEYDNMVKTINVNQDVDEKYQQLFTGFKQGAHPMAMVGAAVSGLAALYHEDTDITVHEDRVTTAHRLIAKIPTIAAMAFRHGAGKTFIAPDPSLGYAENFLNMCFGDEREISPTIAKAMDRIFILHADHEQNASTSTVRMAGSTDCNPYAAIAAGISALWGPAHGGANEAVLDMLNEIGDESKVEEYVAKAKDK

SEQ ID NO: 115488 - protein, 245 aa, Unknown
  Bacterial polypetide isolated from the Sargasso Sea
FNYPRNNLNYSENFLHMCFSVPAEKYTLDPIISKALDRILILHADHEQNASTSTVRIAGSSGANPFACIASGIASLWGPAHGGANEAVLNMLAEIGSKENISKFISKAKDKEDPFRLFGFGHRVYKNYDPRAAVMRETCHEVLSLMGVKDEPLLDIAMELEKIALNDEYFIEKKLYPNVDFYSGIILKAMGFPTEMFTVLFAVARTVGWVAQWNEMITDPVQRIGRPRQLYTGKTHRNFLDLDKR

SEQ ID NO: 115489 - protein, 296 aa, Unknown
  Bacterial polypetide isolated from the Sargasso Sea
MPNAKQKEEFNHVVTNHTMVHEQMQFFLRGFRRDAHPMAVLTGLVGAMSAFYPDAANINDPREREISQIRLIAKLPTLVAMAYKYNIGQPLIYPQNNLSYTGNFMRMMFATPCEDYKVNPVLEKALDRIFILHADHEQNASTSTVRLAGSSGTNPIAAIAAGIACLWGPAHGGANEAALNMLEEIGTVDKVPEFIKQVKDKNSGVRLMGFGHRVYKNYDPRAKLMRETCHEVLNELGLHNDPLFKLAMELEKIALEDEYFVSRKLYPNVDFYSGIVQRALGIPTSMFTCIFALARS

SEQ ID NO: 115490 - protein, 257 aa, Unknown
  Bacterial polypetide isolated from the Sargasso Sea
FVYPRNDLSYVENFLNMTFSVPTEKFNINPKIVKAMDRFFILHADHEQNASTSTVRLAGSSGANPFACIAAGIASLWGPAHGGANEAVIKMLEEIEDVENIQTYIERAKDKNDPFRLMGFGHRVYKNYDPRATVMKESAHEVLNELNKSNDPLMKIAIELEKIALNDPYFIEKKLYPNVDFYSGIILNALGFPKSMFTVLFAIGRTVGWISQWKEMIEDPVNKIGRPRQLYKGEEVRKYQLEDNREKKSIFNWLWKK

SEQ ID NO: 115491 - protein, 271 aa, Unknown
  Bacterial polypetide isolated from the Sargasso Sea
TARLMAKIRTIAAFSFKKSIGQPFIYPQDKLAYCANFLNMMFAVPAEPYEVDPEIVQALDLLLILHADHEQNCSASTVRVVGSSMANVYASVASGILALWGPLHGGANQQVLRMLEQIHADGDDLDKYVRLAKDPDSDFRLMGFGHRVYKNFDPRATIIKGACDRVLNLLGVDDPLLDLARRLEEVALSDEYFVERKLYPNVDFYSGIIYRAIGIPENMFTVMFALGRLPGWIAQWKEMHQDPKTKIARPRQIYNGETARDYVPIEKRVTG

SEQ ID NO: 115492 - protein, 336 aa, Unknown
  Bacterial polypetide isolated from the Sargasso Sea
NGELPSKEEKAKFVSTIKNHTMVHEQLKTFFNGFRRDAHPMAIMCGVVGALSAFYHDSLDINNPQHREVSAMRLVAKMPTIAAMTYKYSMGQPMMYPRNDLNYAENFLHMMFNTPCEIKPISPVLAKAMDKIFILHADHEQNASTSTVRLAGSSGANPFACIAAGIAALWGPAHGGANEAVLAMLDEIGDVSNIDKFIAKAKDKNDPFKLMGFGHRVYKNRDPRATVMKQTCDEVLGELGITNDPQLELAMRLEEIALTDPYFKERNLYPNVDFYSGIILKAIGIPTSMFTVIFALARTVGWISHWKEMLSGPYKIGRPRQLYTGYEQRDLPTNRD

SEQ ID NO: 115493 - protein, 298 aa, Unknown
  Bacterial polypetide isolated from the Sargasso Sea
VGVMGALSSFYQDTLDINDAHQRQEATRRIIAKSSTIGAMAYKYSIGQAFVSPKNNLSFSENFLHMCFSNTAEEYKISPVISKAMDTIFILHADHEQNASTSTVRLAGSSGANPFACIAAGVSSLWGPAHGGANQAALEMLEEIGSTKNIRKYLNKAKSKKDPFKLMGFGHRVYKNYDPRAKILKKICKNVLAHIGIKNDPILKLAMELEKIALNEKYFIEKKLYPNVDFYSGIILRAIGFPPEMFTVIFAIARTAGWTAQWTEMIEDPIQKIGRPRQYYTGNKSLKYGAKRSRKNTR

SEQ ID NO: 115494 - protein, 447 aa, Unknown
  Bacterial polypetide isolated from the Sargasso Sea
MTEKEDNKKKPFTLFNNETGQSIKLPVLTGTDGPDVLDIRNLYKDTGLFTYDPGYTSTASCNSAITFIDGNKGILRHRGYDINDLANKSDFLEVCYLLLHGDLPSPEDKKKFENVIQRHTMVHEQLVNLYRGFRRDAHPMSIMVGVVGALSAFYHDSTDFSDINQRMIACHRLIAKIATIGAMAYKYSIGQPFVYPKNNLSYCENFLHMTFSVPTEDYIINPKISKAMDRFFILHADHEQNASTSTVRLAGSSGANPFACIAAGIASLWGPAHGGANEAVIKMLEEIGDISKIPEYINKAKDKNDDFRLMGFGHRVYKNYDPRADVMKKSAHEVLKELNMEDDKLLKIAIELEKIALKDPYFIEKKLYPNVDFYSGIILKALGFPTSMFTVLFAIGRTVGWISQWKEMIEDPINKIGRPRQLYSGQNARQYQIVESREKKSIFQWLW

SEQ ID NO: 115495 - protein, 307 aa, Unknown
  Bacterial polypetide isolated from the Sargasso Sea
MFFHGFRNDAHPMAMLCGTVGAMSSFYHSDLDVSNEEQRVRSAHRLIAKMPTLVAMCYKYNIGQPFVYPRNDLSYAANFLNMMFSVPAEEFQISPAVERAMDRIFTLHADHEQNASTSTVRLAGSSGANPYACIAAGVASLWGPAHGGANEACLNMLEEIGTVDRIPEFIARAKDKNDPFRLMGFGHRVYKNHDPRATVMRESCHEVLSELNVKDPLLEVAMELEKIALSDPYFAEKKLFPNVDFYSGIVLKAIGIPTNMFTCIFALSRTVGWISHWHEMMSDPKQKIGRPRQLYTGHNQRKYTPIK

SEQ ID NO: 115496 - protein, 351 aa, Unknown
  Bacterial polypetide isolated from the Sargasso Sea
MAQPQIFKGLAGVVADTTSISKVMPETNSLTYRGYAVQDLAAQCSFEEVAYLILQGELPTRSQLNAFKKKERALRKISKSHADVIAKFPRRAHPMDTIQVAVAYLGTTEVAWGAEPLEADMERAMSLLAKIPTMIATDFRLRQGKRRIAPRTDLSMAENFFNMCFGRIPPKTVIKAFDVSLILYAEHSFNASTFTGRVITSTRSDIYSATTGAIGALKGPLHGGANEAVMEMMKKVGRPSNAEKWLRDAMANKDLVMGFGHRVYKQGDSRVPTMKACLEDLTEWSGDTKWLEIYNTMADIMVSEKGIHPNLDFPSGPAYYLMGFPINLYTPHFCHGPDNRLVGALLRAKRE

SEQ ID NO: 115497 - protein, 428 aa, Unknown
  Bacterial polypetide isolated from the Sargasso Sea
MAGKITLKKDTQSVDLEIKSASVGPSVIDLKSLYNDTGYFTFDPSYSTTASCESKITYIDGAKGILEYRGYPIEQLAEQSTYLEVAYLLFNGELPTSNIALDEFRSQVKKNMTLPNHMSGLLTGFGKDAHPMAMLTTSVAALSGSYHNGINIRNKKHQKEFFFNILGKMPILVASVFNHKKNDANVEYDESLSYSENILKLFFGWKDGYEINPIFSKALDILLILHADHEQNCSTSSVRLTGSSGTNPYAAISAGVAALWGPAHGGANEAVVRMFGEIGSKNNISKYIDKAKDKNDPFRLMGFGHRVYKNYDPRATIIRSQCHKVLKSTGNNTNPMFELALQLEEIALSDDYFVDRNLYPNVDFYSGLIYEAMDIPKEMFTAMFALARTVGWATHWCEMMSNPKHKIGRPRQLYLGEKKRDYVPISDR

SEQ ID NO: 115498 - protein, 267 aa, Unknown
  Bacterial polypetide isolated from the Sargasso Sea
TIKIFCRLIAQVPILAAYFYRHSQGLEIVQPDNSLSYSQNFLNMLFKGDDKKLNPDLVDAMDTLLILHADHEQNCSASVMRGTGSSESDPYSSVAAAAAALYGPLHGGANEAVLEMLSKEIKTVENIPSFLESVQKKEALLMGFGHRVYKSYDPRAKYLKIAADKVFEITGTNPLLDIALKLESIALSEDYFQARNLYPNVDFYSGLIYESMGIPTPMFTVLFAVGRTPGWLAQWKEFLNDKDQKIARPRQVYTGYDSRDYLPLESR

SEQ ID NO: 115499 - protein, 228 aa, Unknown
  Bacterial polypetide isolated from the Sargasso Sea
MNSKTHATLSFSDSDQTIDLPVYQGTLGPDVIDIRKLYAQTGKFTYDPGFMSTAACNSEITYIDGDKGELLYRGYPIDNLAQNADFLETCYLLLKGELPNAQQKEEFVTTVTQHTMVHEQMHFFFRGFRRDAHPMAILVAAVGALSAFYHDSLDINDPQHRDVSAIRMIAKLPTLVAMAYKYTVGQPFVYPQNDLSYSANFMRMMFANPAEEYQVNDVLVRALDRILI

SEQ ID NO: 115500 - protein, 348 aa, Unknown
  Bacterial polypetide isolated from the Sargasso Sea
MKKKKTHKIKKTAKITIDNDTYTLPIFESSVGENVVDISKLHSLSNYFTYDPGFTSTASCESKITYIDGENGILRYRGYDIQELAKKSDFIEVANLLIYGDLPNKDQLLKYKKLITRHTLLHDQIINFFEGFRRDAHPMAMMVGVMGALSSFYQDSLDIHDPHQRQESTRRIIAKASTIGAMAYKYSIGQTFVSPKNKLTFSENFLHMCFSTTAENYRVSPILAKAMDTIFILHADHEQNASTSTVRLAGSSGANPFACIAAGVASLWGPAHGGANQAALEMLEEIKYKKNIRKYINKAKNPKDKFKLMGFGHRVYKNYDPRAKILKETCRKVLKHVGIKNDPILELA

SEQ ID NO: 115501 - protein, 289 aa, Unknown
  Bacterial polypetide isolated from the Sargasso Sea
MRAFTFYPDFSATDTEAVDLAIWRLMGKLPTIAAWSYKKNIGQPFVFPVNEYSYPKNFLHMLFSLPTTSYEVPPEFVEALNVLFILHADHEQNCSTSTVRLVGSSRANLFASISTGIAALWGPLHGGANQAVLEMLQQIYIDGGDVQKFVKLSKDKDSSFRLMGFGHRVYKNFDPRATILKGYCDKILKLLGTQDPLLDIAKQLEEAALTDEYFIDRNLYPNVDFYSGIIYKALGFPTDMFTVLFSLGRLPGWIAHWLEMHNSTSKIGRPRQIYTGHTVREYVSLSKRN

SEQ ID NO: 115502 - protein, 247 aa, Unknown
  Bacterial polypetide isolated from the Sargasso Sea
MRKIKGLPLNFSNNKLSYTENIAYMMFALPNREYIQNDVVINALNTLLILHADHEQNCSTSTVRIVGSSYAGLYASISAGIGALWGRLHGGANQAVIEMLELIKNDDSDIDKYISKAKDKSDPFRLMGFGHRVYKNFDPRAKIIKKAADQVLNDLGINDPVLDIAKSIEEKALNDEYFIEKKLYPNVDFYSGIIYRALGIPTEMFTVMFALGRIPGWIAQWKEMRDSNNPIGRPRQIYNGPTHRTIS

SEQ ID NO: 115503 - protein, 389 aa, Unknown
  Bacterial polypetide isolated from the Sargasso Sea
FTFDPSYSTTASCESKITYIDGAKGILEYRGYPIEQLAEKSTYLEVAYLLFNGELPSSTISLDEFRSQVKKNMTLPENMNGIFTGFGKGAHPMAMLTTAVAALSGFYHEGINVRDKEHQREFFFNILGKMPILVANVFNHNQEDANVEYDESLSYSENILRLFFGWKDGYEINPIFSKALDILLILHADHEQNCSTSSVRLTGSSGTNPYAAIAAGVAALWGPAHGGANEAVVKMFGEIGSKDNISKYIDKAKDKNDPFRLMGFGHRVYKNYDPRATIIRSQCHKVLESTGNDSNPMFELALELEEIALNDDYFVARNLYPNVDFYSGLIYEAMDIPKEMFTAMFALARTVGWATHWCEMMSNPKHKIGRPRQLYLGEKKRDYVPINDR

SEQ ID NO: 115504 - protein, 297 aa, Unknown
  Bacterial polypetide isolated from the Sargasso Sea
MAILSSIVCALSTFYPDFSATDRDAVDLAILRLLGKLPTIAAWSYKKNIGQPFVFPVNDYSYAKNFLHMLFSVPTTSYEVPPEFVEALNVLFILHADHEQNCSTSTVRLVGSSRANLFASISTGIAALWGPLHGGANQAVLEMLQQIHLDGGDVKKFVKLAKDKDSLFRLMGFGHRVYKNFDPRATILKEYCDKILKMLGTPDPLLDIAKQLEEAALTDQYFIDRNLYPNVDFYSGIIYKALGFPTDMFTVLFSLGRLPGWIAHWLEMHNSASKIGRPRQIYTGHTEREYVDISKRN

SEQ ID NO: 115505 - protein, 369 aa, Unknown
  Bacterial polypetide isolated from the Sargasso Sea
MVKKELFYIEDTLSINLLSIGNYLETCFLLLNGELPNQDEYNKFEETINEYTLVNEQLNRFFTGFRPDAHPMAIMCGVVGALSAFYHDSLDINDPEQRRIACHRLIAKMPTLAAMAYKHSLGQPFMYPKNDLDYAANFLNMCFGLPTEDKNVDSTLAKAMDKILILHADHEQNASTSTVRLAGSSGANPFACIASGIACLWGPAHGGANEACIRMLEEINSVDNIPEYVKKAKDKNDPFRLMGFGHRVYKNFDPRAKVMQKICHEVLDHLGIKDDPLLAIAVELEKIALEDDYFVEKKLYPNIDFYSGIVMKSLGFPMDMFTVLFAVGRTVGWVSQWNEMIEDTSQRIGRPRQLYVGSEHRQYVGIHKR

SEQ ID NO: 115506 - protein, 369 aa, Unknown
  Bacterial polypetide isolated from the Sargasso Sea
MLLNGALPTVKQLDDFNDHLSKHSLIHEDMKHFFEGFSTTAHPMVILSSMVSSLSAYYSEASGAASVNQLEVNTARLMAKIRTIAAFSYKKSIGQPFIYPQDKLAYCANFLNMMFAVPAEPYEVDPEIVKALDLLLILHADHEQNCSASTVRVVGSSMANVYASVASGILALWGPLHGGANQQVLRMLERIHADGDDLDKYVRLAKDPDSDFRLMGFGHRVYKNFDPRATIIKGACDRVLNLLGVDDPLLDLARRLEEVALSDEYFVERKLYPNVDFYSGIIYRAIGIPENMFTVMFALGRLPGWIAQWKEMHQDPKTKIARPRQIYNGETARDYVPIEKPDRRVEHNLHGTARLVLRHRSEAFYDFSE

SEQ ID NO: 115507 - protein, 425 aa, Unknown
  Bacterial polypetide isolated from the Sargasso Sea
MSEILTINDSRTNKEYKIEIHDGNIRAKDLRQIKVNEDEFGMMSYDPSFENTASCKSSVTYIDGDEGILRYRGYPIEQLAESSSQLEVSKLLIDGELPNNEELKKWIADVKEHNSVPTDINNIIKAFPQNSHAMGALTSLEAALSTFYPESKNIDDADENYRSMCRLIAQVPILAANFYRHSQGLDFINPDDSLDYAENFLNMMFHGDEKKMHPDLVSAMDTLLILHADHEQNCSASVMRNVGSSEPDPFSAVSAATAALYGPLHGGANEAVLQMLTEIGSVDNIPAFIEKVKKKEVKLMGFGHRVYKAYDPRAKYLKEAADKVFSVTGTNPLLDIALELESIALSEDYFVDRNLYPNVDFYSGLIYESMGIPKDMFTVLFTIGRTPGWLAQWKELLEDKDQKIARPRQVYTGYDSRDYIKVDKR

SEQ ID NO: 115508 - protein, 276 aa, Unknown
  Bacterial polypetide isolated from the Sargasso Sea
DQKGVDLAIWRLMGKMPTIAGWAFKKNIGQPFIYPDNNLSYCANFLSMMFQVPAVDYEPAEEFVKALNVLFILHADHEQNCSTSTVRLVGSSQANLFASIASGIAALWGPLHGGANQAVLEMLLRIHNDGGNIDKYVDMAKDKDSGFRLMGFGHRVYKNFDPRALIIKNYCDQILEKVGLHDPLLDIAKQLEQVALEDDFFKERKLYPNVDFYSGIIYKALGFPIDMFTVLFALGRLPGWIAHWVEMSQSPPKIGRPRQIYTGASERPFLPLEARG

SEQ ID NO: 115509 - protein, 325 aa, Unknown
  Bacterial polypetide isolated from the Sargasso Sea
MADKVTLQTNKQTVELEIKDASVGPGVVDLKNLYQDTGYFTFDPSYSTTASCESYITYIDGAKGILEYRGYPIEQLAEQSTYLEVAYLLFNGELPTSNVSLDEFRSDVKHNMTLPENMDLIFSGFGRDAHPMAMLTTAVAALSGSYHDGINIRDKEDQKEFFFNILGKMPILVANVFNHNQKDANIDYDESLSYSENILRLFFGWKGGYEINPVLSKALDILLILHADHEQNCSTSSVRLTGSSGTNPYAAIAAGVAALWGPAHGGANEAVVRMFDEIGSKDNIPQYIDKAKDKNDPFRLMGFGHRVYKNYDPRATIIRKQCHKV

SEQ ID NO: 115510 - protein, 242 aa, Unknown
  Bacterial polypetide isolated from the Sargasso Sea
YPRNDLSYAGNFLSMMFAVPCEEYKVNPIVERAMDRIFILHADHEQNASTSTVRLAGSSGANPFACIAAGIASLWGPAHGGANEACLQMLEEIGSVDRIPEFIARAKDKNDPFRLMGFGHRVYKNFDPRAKVMRETCHEVLKELKVQDPLLDVAMELERIALEDEYFISKKLYPNVDFYSGIIMKAIGIPTSMFTVLFALARTVGWIAHWKEMLDQPGHKISRPRQLYTGETARDFVDLDKR

SEQ ID NO: 115511 - protein, 422 aa, Unknown
  Bacterial polypetide isolated from the Sargasso Sea
MSDSITITDNRSGESVEIPIVDGGVDSGPWTNLLPGLWFKDEGFAATAVTNSSITFIDGAAGRLEYRGYPIEDLANHSSFLEVAFLLLNGELPNQKQLTSWEETIAEASDLDPNHHDLLLQAFQKDSHPMGMLTSALAALSSMYPDSRNVEDPQIRSKHTVNLIAKIPSIAAAAENFRNGRPSQPFRQDLSYTENFLAAIYGNGDVEYTPDPIFTKALEQLFILHADHEQNCSTTAVRVVGSAHADPYSAIAAGSAALSGPRHGGANEAVINMLDEIETLENVDAFVDSVKNGDDLLWGFGHRVYKNYDPRAQIIKDTAHQIFEVTGKNPKLDIALKLEETALADEYFISRKLYPNVDFYSGLIYQAMGFPVKMFTVLFAIARTSGWLSHWNEMLERNTRIARPRQLYVGNTTRDFSPIQDR

SEQ ID NO: 115512 - protein, 166 aa, Unknown
  Bacterial polypetide isolated from the Sargasso Sea
WGPAHGGANEACLNMLEEIGTVDRIPEFIARAKDKNDPFRLMGFGHRVYKNHDPRATVMRESCHEVLSELNVKDPLLEVAMELEKIALSDPYFAEKKLFPNVDFYSGIVLKAIGIPTNMFTCIFALSRTVGWISHWHEMMSDPKQKIGRPRQLYTGHNQRKYTPIK

SEQ ID NO: 115513 - protein, 231 aa, Unknown
  Bacterial polypetide isolated from the Sargasso Sea
MADQKAILKAGGKEIELPILSGTEGQDVIDVRTLGQHGYFTYDPGFMATGSCESSITYIDGAQGVLLHRGFPIEELARDADYLEVCHMLLHGDAPTKEQYEEFKETITRHTMVHEQINMFFHGFRNDAHPMAMLCGTVGAMSSFYHSDLDVSNEEQRIRSAHRLIAKMPTLVAMCYKYNVGQPFVYPRNDLSYAANFLNMMFSVPAEEYQISPAVERAMDRIFTLHADHET

SEQ ID NO: 115514 - protein, 293 aa, Unknown
  Bacterial polypetide isolated from the Sargasso Sea
MLDAGLDNRHRPHPKLAKALDVMFLLHAEHEMNCSTAACRHLASSGVDVFCAVAGAVGALYGPLHGGANEAVLKMLERIGNVENIPNFLAGVKEKRYVMFGFGHRVYKNFDPRAKIIRKIANDVFELVGRDPLIDVAIELEKQARADEYFVKRKLYPNVDFYSGLVYRAMGFPPEFFTVLFAIPRATGYLSHWRESLNDPDQKIMRPQQVYQGEWLRDYVPIASRSRSLTDAMEDIQPSNAARRRMAGDPSDAHPWFGNGMEMSTPAWQSGTTVGDATSGVENCLVKNVAAGK

SEQ ID NO: 115515 - protein, 432 aa, Unknown
  Bacterial polypetide isolated from the Sargasso Sea
MANKKIIKNKKIAKLTIADNTYEFPIYSSTEGESVIDISKLHSEANIFTYDPGFTSTASCESKITYIDGNNGILRYRGYDIEDLAEKSDFIEVVNLLIYGDLPNKEQLKKYRRLISRHTLLHEQIINFFQGFRRDAHPMAMMVGVMGALSSFYQDTLDISDSHQRQEATRRIVAKSATIGAMAYKYSIGQSFVSPKNNLSFSENFLHMCFSNTAEEYKISPILSKAMDTIFILHADHEQNASTSTVRLAGSSGANPFACIAAGVSSLWGPAHGGANQAALEMLEEIGSTKNINKYIKKAKNKKDPFKLMGFGHRVYKNYDPRAKILKGICQKVLKHVGIKNDPILKLAMDLEKIALKDKYFVEKKLYPNVDFYSGIILRAIGFPPEMFTVIFAISRTAGWTAQWTEMIEDPIQKIGRPRQLYTGSKSLKYGK

SEQ ID NO: 115516 - protein, 430 aa, Unknown
  Bacterial polypetide isolated from the Sargasso Sea
DTATLQLPGQESVELPVITGSEGEKAIDVSKLRAKTGYITLDPGYVNTGSCSSSVTFLDGEKGILRYRGYPIEQLAENSSFVEVAYLLLNGALPTLKQLDEFNDHLSKHSLIHEDMKHFFEGFSTTAHPMVILSSMVSSLSAYYSEASGAASVHQLEVNTARLMAKIRTIAAFSYKKSIGQPFIYPQDKLAYCANFLNMMFAVPAEPYEVDPEIVQALDLLLILHADHEQNCSASTVRVVGSSMANVYASVASGILALWGPLHGGANQQVLRMLEQIHADGDDLDKYVRLAKDPDSDFRLMGFGHRVYKNFDPRATIIKGACDRVLNLLGVDDPLLDLARRLEEVALSDEYFVERKLYPNVDFYSGIIYRAIGIPENMFTVMFALGRLPGWIAQWKEMHQDPKTKIARPRQIYNGETARDYVPIEKRVTG

SEQ ID NO: 115517 - protein, 458 aa, Unknown
  Bacterial polypetide isolated from the Sargasso Sea
MADYEDKKVNDKQFTLFNNESGKSYQIPLIESKDGPNVLDIRKLYQETGLFTFDPGFTSTASCESGITYIDGEKGILRHRGYDIHDLASKSEFLEVCYLLLHGELPSPEDKQKFKDVITNHTMLHEQLVNLYRGFRRDAHPMAIMVGVVGALSAFYHDSTDFSDINQRMIACHRLIAKIPTIGAMAYKYSIGQPFVYPRNDLSYAENFLYMTFSVPSEDYKVSPKIVRAMDRFFTLHADHEQNASTSTVRLAGSSGANPFACIAAGIASLWGPAHGGANEAVIKMLEEIGDISNIQKFIDKAKDKNDSFRLMGFGHRVYKNYDPRATVMKESAHEVLEELNMQDDPLLKIAIELEKIALKDEYFISKKLFPNVDFYSGIILKALGFPTSMFTVLFAIGRTVGWISQWKEMIEDPINKIGRPRQLYTGYKARPYQVESSREKKSIFNWLWKKGLINLLY

SEQ ID NO: 115518 - protein, 337 aa, Unknown
  Bacterial polypetide isolated from the Sargasso Sea
MADKKAVVQIEGQAPFELPIYSGTAGTDVIDVRALGQQGYFTFDPGFMATGSCESKITYIDGDNGVLLHRGYPIEQLAEHSDYLETCYLLLEGELPGKEKYDEFVHTITRHTMVHEKIASFFQGFRVDAHPMAMLCGVVGALSSFYHSDLDINDPEQRKRSAHRLIAKLPTISAMAYKYTVGQPFVYPRNDLTYAENFLHMMFSVPAEEYKVSPILAKAMDRIFMLHADHEQNASTSTVRLAGSSGANPYACIAAGVASLWGPAHGGANEACLKMLQEIGSVERIPEFVARAKDKNDSFRLMGFGHRVYKNFDPRAKVMRETCHEVLKELNIKDPLL

SEQ ID NO: 115519 - protein, 273 aa, Unknown
  Bacterial polypetide isolated from the Sargasso Sea
MADKKATVHIDGLDPIELPIYQGTAGQDVIDVRTLGSHGHFTYDPGFMSTGSCESAITYIDGGKGVLLHRGYPIEQLAEESDYIELCYLLLNGELPSKEQYDAFAEKITRSTMLDQKIANFFQGFRFDAHPMAMLCGVVGALSSFYHEDLDITDAEQRKTSAIRLVAKLPTIAAMAYKTNIGQPFVYPRNDLSYAENFLHMMFSVPAEEYKVNPITAKAMDKIFMLHADHEQNASTSTVRLAGSSGANPYACISAGIASLWGPAHGGANEACL

SEQ ID NO: 115520 - protein, 433 aa, Unknown
  Bacterial polypetide isolated from the Sargasso Sea
MTPSDVKATLSFSDNSPSVELPIYKGTMGPDVIDIRKLYGQTGKFTYDPGFMSTAACNSAITYIDGDKGELLYRGYPIDNLAQNADFLESCYLLLKGELPNAAQKKEFVDTVTKHTMVHEQMHFFFRGFRRDAHPMAILVAAVGALSAFYHDSLDINDPRHREVSAIRMIAKLPTLVAMAYKYSIGQPFVYPKNSLSYSANFMHMMFSNPCEEYKVNDVLVRALDRILILHADHEQNASTSTVRLAGSSGANPFACIAAGIACLWGPAHGGANEAALNMLEQIGSPDNIPEFIKQVKDKNSGVKLMGFGHRVYKNYDPRAKLMRETCYEVLNELGLHDDPLFKLAMQLEKIALEDEYFVSRKLYPNVDFYSGIVQRALGIPTSMFTCIFAMARTVGWIAQWNEMIGDPEQKIGRPRQLFIGDTPREAKPLDAR

SEQ ID NO: 115521 - protein, 321 aa, Unknown
  Bacterial polypetide isolated from the Sargasso Sea
MSDKVKLQTNTQTVELETKDASVGPDVIDLKNLYHDTGYFTFDPSYSTTASCESSITYIDGAKGILEYRGYPIEQLAEKSTYLEVSYLLFNGELPTSNTALDNFRSDVKQNMILPKNMDLIFSGFGIDAHPMAMLTTAVAALSGSYHEGINIRDREHQKEFFFNILGKMPILVANVFNHNQKDANTDYDESLSYSENILRLFFGWNDSFEIDPVLSKALDILLILHADHEQNCSTSSVRLTGSSGTNPYAAIAAGVAALWGPAHGGANEAVVRMFDEIGSKDNIPKYIEKAKDKNDPFRLMGFGHRVYKKNDPRATIIRSQ

SEQ ID NO: 115522 - protein, 428 aa, Unknown
  Bacterial polypetide isolated from the Sargasso Sea
MAEKVTLQKNTQTVELETKDASVGPSVIDLKNLYHDTGYFTFDPSYSTTASCESYITYIDGAKGILEYRGYPIEQLAEQSTYLEVAYLLFNGELPSSNIALDEFRSDVKHNMTLPENMDLIFSGFGRDAHPMAMLTTAVAALSGSYHHGINVRDKEHQKEFFFNILGKMPILVANVFNHNQKDANVDYDESLSYSENILRLFFGWKDSYEIDPILSKALDILLILHADHEQNCSTSSVRLTGSSGTNPYAAIAAGVAALWGPAHGGANEAVVRMFDEIGSKDNISQYIEKAKDKNDPFRLMGFGHRVYKNYDPRATIIRSQCHKVLESTGNDSNPMFELALELEEIALNDDYFVQRNLYPNVDFYSGLIYQAMDIPKEMFTAMFALARTVGWATHWCEMMSNPKHRIGRPRQLYLGEKKRDYVPLSDR

SEQ ID NO: 115523 - protein, 442 aa, Unknown
  Bacterial polypetide isolated from the Sargasso Sea
MNVLLFVKRNQFEMPDNKIKIIHNSEEVELPILDSTIGPSVIDIRALEAKFGYLSHDPGFISTSSCESKITFIDGKEGKLWYRGYPIEQLAENSTFEETAYLLLSGELPKKNEYDKFCFKLKEKYTVGPDYEKIIKSFNVSDHPMSILMALLSRMAAEYHNEINIKNNDYQLDSSINLVAKVPILSSLILNFVLKKDLQKPDSSLSVAQNFIKMSFPEMNDSRFEKSAKAIDLIMLLHADHEQNASTSTVRLSGSSETSPYAAIVAGISTLWGPTHGGANEAVINMLEEIKNSGNSIDSYIDMAKDKDNSFKLMGFGHRIYKNYDPRAKIIQKIVHDYLAEISAEENKPLLDIAMQLEKIALEDEYFVKRKLYPNVDFYSGILLKAMGIPQSMYTVIFALSRTVGWMSHWLEMVNDKNFKIGRPRQLYTGKDSRKYLDISSR

SEQ ID NO: 115524 - protein, 222 aa, Unknown
  Bacterial polypetide isolated from the Sargasso Sea
MTDKIKEKANLKLNGDLYDFDVHEGTIGPDVLDISKLYAQSGKFTYDPGFTSTANCKSTITYIDGEEGTLLYRGYPIDQLAEKGNYIETCYLLLNGELPDQDEFNKFEKSITEHTLVNEQLNRFFTGFRPDAHPMAIMCGVVGALSAFYHDSLDINDPEQRRIACHRLIAKMPTLAAMAYKHSLGQPFMYPKNDLDYASNFLNMCFGLPTENKNVDATLAKA

SEQ ID NO: 115525 - protein, 218 aa, Unknown
  Bacterial polypetide isolated from the Sargasso Sea
TLHADHEQNASTSTVRLAGSSGANPFACIAAGIASLWGPAHGGANEAVIKMLEEIGDVSNIQKFIDKAKDKNDSFRLMGFGHRVYKNYDPRATVMKESAHEVLEELNMQDDPLLKIAIELEKIALKDEYFISKKLFPNVDFYSGIILKALGFPTSMFTVLFAIGRTVGWISQWKEMIEDPINKIGRPRQLYTGYKARPYQVESSREKKSIFNWLWKKD

SEQ ID NO: 115526 - protein, 428 aa, Unknown
  Bacterial polypetide isolated from the Sargasso Sea
MADLKAKLELPGNDSIELPVKQGSAGFDVIDISKLGSKGYFTFDPGFLATASCESAITYIDGDQGILLHRGYPIEQLAVDSDYLDLCYLLLYGELPTKEQYAEFVHTVKTHTMVHEQLAFFFRGFRRDAHPMAMLCGVTGALSAFYQDSLDVNDPRHREIAAYRLVSKMPTIAAMCYKYSSGQPFVYPRNDLSYAGNFLSMMFAVPCEEYKVNPIVERAMDRIFILHADHEQNASTSTVRLAGSSGANPFACIAAGIASLWGPAHGGANEACLQMLEEIGSVDRIPEFIARAKDKNDPFRLMGFGHRVYKNFDPRAKVMRETCHEVLKELKVQDPLLDVAMELERIALEDEYFISKKLYPNVDFYSGIIMKAIGIPTSMFTVLFALARTVGWIAHWKEMLDQPGHKISRPRQLYTGETSRDFVSQDKR

SEQ ID NO: 115527 - protein, 341 aa, Unknown
  Bacterial polypetide isolated from the Sargasso Sea
LYHDTGYFTFDPSYSTTASCESSITYIDGAKGILEYRGYPIEQLAEKSTYLEVAYLLFNGELPASNVYLDEFRSDVKHKMTLPENMDLIFSGFGRDAHPMAMLTTAVAALSGSYHDGINVRDKEHQKEFFFNILGKMPILVANVFNHNQKDANIDYDESLSYSENILRLFFGWRGDYEIDPVLSKALDILLILHADHEQNCSTSSVRLTGSSGTNPYAAIAAGVAALWGPAHGGANEAVVRMFDEIGSKDDIPQYIEKAKDKNDPFRLMGFGHRVYKNYDPRATIIRNQCHKVLESTGNDSNPMFELALELEEIALNDDYFVQRNLYPNVDFYSGLIYQAN

SEQ ID NO: 115528 - protein, 309 aa, Unknown
  Bacterial polypetide isolated from the Sargasso Sea
DSQFKEFFKGFKTDAHPMAIMCGVTGALAASFHNSLDIDNAEDRKETSLQLIAKIPTMAAMSYKNALGEDFVEPREDLGYAENFLHMMFAKNGEDYKVSPTIAKAMDRIFLLHADHEQNASTSTVRLAGSTGTNPYAAIAAGIAALWGPSHGGANEAVLNMIDEIGSVDNIPEYINKAKDKDDPFRIMGFGHRVYKNYDPRAKVMQQTCHEVLAELGVEDNPTLAMAKELERIALEDEYFVEKRLYPNVDFYSGIILKAIGIPVEMFTVIFTTGRTPGWIAHWNEMVSTAYKIGRPRQLYKGYTKRDYS

SEQ ID NO: 115529 - protein, 452 aa, Unknown
  Bacterial polypetide isolated from the Sargasso Sea
MADYEDKKINDKQFTLFNNESGKSYQIPLIESKDGPNVLDIRKLYQETGLFTFDPGFTSTASCESGITYIDGDKGILRHRGYDIHDLASKSEFLEVCYLLLHGELPSPEDKQKFKDVITNHTMLHEQLVNLYRGFRRDAHPMAIMVGVVGALSAFYHDSTDFSDINQRMIACHRLIAKIPTIGAMAYKYSIGQPFVYPRNDLSYAENFLYMTFSVPSEDFKVSPKIVKAMDRFFILHADHEQNASTSTVRLAGSSGANPFACIAAGIASLWGPAHGGANEAVIKMLEEIGDVSNIQKFIDKAKDKNDSFRLMGFGHRVYKNYDPRATVMKESAHEVLEELNMQDDPLLKIAIELEKIALKDEYFISKKLFPNVDFYSGIILKALGFPTSMFTVLFAIGRTVGWISQWKEMIEDPINKIGRPRQLYTGYKARPYQVESSREKKSIFNWLWKKD

SEQ ID NO: 115530 - protein, 427 aa, Unknown
  Bacterial polypetide isolated from the Sargasso Sea
KATLSFSDNSPSVEMPIYKGTLGPDVIDIRKLYGQTGKFTYDPGFMSTAACNSAITYIDGDKGELLYRGYPIDNLAQNADFLETCYLLLKGELPNAQQKDEFVNTVTKHTMVHEQMHFFFRGFRRDAHPMAILVAAVGALSAFYHDSLDINNPRHREVSAIRMIAKLPTLVAMAYKYSIGQPFAYPKNDLSYSANFMHMMFSNPCEEYKVNDVLVRALDRILILHADHEQNASTSTVRLAGSSGANPFACIAAGIACLWGPAHGGANEAALNMLEEIGSVDNIPEFIKQVKDKNSGVKLMGFGHRVYKNYDPRAKLMRETCHEVLEELGLHDDPLFKLAMALEKIALEDEYFVSRKLYPNVDFYSGIVQRALGIPTSMFTCIFAMARTVGWIAQWNEMIADPEQKIGRPRQLFIGDTQREAKPIAQR

SEQ ID NO: 115531 - protein, 209 aa, Unknown
  Bacterial polypetide isolated from the Sargasso Sea
MIKIFKKLIYKTESAKLQKHSISNVISDFELGKNKNLVFLAKKRFEWMNDFIKSKDIGLEVGAGAAFSKKVLNSRSIHTSDFSNDAHLDFKNINAEKTKFKNSSYDFVIASNMIHHVPHPVLFLKEMHRILKKGGRLIIFEPHVSIFYQLITLITKHEGFDFTVDVWDKSKSVKINNNPWNSNQAVAYLLFKNKDFFEKKMEGSFKIIY

SEQ ID NO: 115532 - protein, 224 aa, Unknown
  Bacterial polypetide isolated from the Sargasso Sea
MSKEKIHIFDTTLRDGAQTQGVDFSIDDKLKIAKALDDLGVDYIEGGWPGANPTDTEFFQKKIKLNNSILTAFGMTKRSGRSAENDPGLSSILNSNTPAVCLVGKSWDFHVDVALGISNEENLENISESAKLFVKEKKEFMFDAEHFFDGFKNNKEYALSCIKSAYDNGARWVVLCDTNGGTLPNEITDIVNEVTKAVPGKNIGIHAHNDTGNAVANSLAAVYQ

SEQ ID NO: 115533 - protein, 323 aa, Unknown
  Bacterial polypetide isolated from the Sargasso Sea
KVVPGKNLGIHAHNDTGNAVANSLAAVLSGVRQIQGTINGLGERCGNANLMSLIPTFFLKNGFSSQFEIGVKSKNIKNLTDCSRLLDEILNRKPNQHLPYVGAAAFSHKGGLHVSAVQKDPKTYEHINPEEVGNTRNIVVSDQSGKSNIISRLKSIKIDIKENDPKIKKLLDEVKDREFIGYSYDGADASFELLARRIIGEIPRYISINEYDVSVKKNNSGEIVSSAKAQLEVDGEKIMCEGEGNGPVNALDNAIRQNVDKLAKYSRYLKDLKLVDYKVRILNTGTEAVTRVSIESTDSQGKNWFTIGVSTNIIEASFKALID

SEQ ID NO: 115534 - protein, 55 aa, Unknown
  Bacterial polypetide isolated from the Sargasso Sea
MSDKNRIIIFDTTMRDGEQSPGASMSLEEKLQISRVFDELGVDIIEAGFPIASPG

SEQ ID NO: 115535 - protein, 84 aa, Unknown
  Bacterial polypetide isolated from the Sargasso Sea
KVLNELIEFSVKSVTEGIDALGEVTIRIRRDNKIYSGHSADTDVVVAAANAYVNALNRLVFSEKKNSIHPQFDNLENSDSTISI

SEQ ID NO: 115536 - protein, 239 aa, Unknown
  Bacterial polypetide isolated from the Sargasso Sea
EGGWPGANPTDDAFFGDPPKTAKARMVAFGMTRRGGRSTANDPGLNAVLDAEVPATCLVGKTWDFHVETAINTTLDENLEMIRQSVAAAAERGRESMFDCEHFFDGYKNNPDYALDCVRAAHEGGASWVVLCDTNGGALPNEVFEIVSAVHAALPEVRLGIHCHNDAGVAVANSLAAIRAGARQVQGTINGLGERCGNADLITLIPTLVLKLGYETGISEESLPKLMGLSRMLDERLNR

SEQ ID NO: 115537 - protein, 330 aa, Unknown
  Bacterial polypetide isolated from the Sargasso Sea
QGQTPEYALACIKAAYDNGAKWIVLCDTNGGTLPHEVSDIVKEVSEHIPGESLGIHAHNDTGNAVANSIAAVLSGARQIQGTINGLGERCGNANLMSIIPTFHLKKELSDKFEISIKEKNIKNITQCSRLLDEILNRKPNKHLPYVGAAAFSHKGGLHVSAVQKDPKTYEHINPEDVGNNRNIVVSDQSGKSNILSRLKTIGIDIKENDPKIKKLLEEVKDREFIGYSYDGADASFELLARRVMGEIPRYISIKEYDVSVSKNNQDKIVSRARAKLEVDGEQIVCEGEGNGPVHALDNAIRNNIKKLEKYSKYLKDLKLVDYKVRILNTG

SEQ ID NO: 115538 - protein, 240 aa, Unknown
  Bacterial polypetide isolated from the Sargasso Sea
SRLVSSITGMHVPRNKAIVGDNAFAHEAGIHQHGMLRDSSTYEIMKPQDVGIARSNLVLGKHSGRHAFLDRINELGFALEKDEIDPAFQEFKKLADRKKEIFDTDIEAIVLNADIANMSRWSLMDLETTSGSSWGSTASLKLKDSGEEIIERDNNSNPASGPIEAVFNIISDITGYKLELTNFEIHSVSVGDDAQGEVTVTVSYNGQNYRGHGISTDIIESGALAYLEVINRIERNQAKH

SEQ ID NO: 115539 - protein, 201 aa, Unknown
  Bacterial polypetide isolated from the Sargasso Sea
HHWEVPYLPIDPSDIGRTYEAIIRVNSQSGKAGSAWLLEQEHNINIPRGAQIQFSEAVQNIADQTGKEITSDMIWGIFEQEFLGKGTFSLLKFKSKKISKDDNSEFVEATIDHNGEKIKISSTGNGPISAFVNAMRDTFKLTFMLNDFGQNTRSSGSSAEAAAYIEIKVPDENGKSVFGVGIDTSITLAPIKAVLSAINRI

SEQ ID NO: 115540 - protein, 139 aa, Unknown
  Bacterial polypetide isolated from the Sargasso Sea
MSEFDPKNKYTPFERINLKDRKWPNQIINSAPTWCSVDLRDGNQSLIEPMDTPKKLKLFKTLVSIGFKEIEIGFPAASETDYNFCRYLIENNLIPNDVTIQVLTQAREHLIDNTFEALIGCNSAIVHLYNSVSTLQRRV

SEQ ID NO: 115541 - protein, 308 aa, Unknown
  Bacterial polypetide isolated from the Sargasso Sea
YRVFQKKHNFKNSKLTSFGMTKRSGRSAENDTGLSALMNSNTQAVCLVGKSWDFHVEVALGITNEENLENISESAKHFIKAKKEFMFDAEHFFDGYKTNPKYAISCLKAAYDQGARWIVLCDTNGGTLPHEVSKIVSEVSKVVPGENLGIHAHNDTGNAVANSLAAVLSGVRQIQGTINGLGERCGNANLMSLIPTFFLKKDFSSKFETGIKSKDIKNLTECSRLLDEILNRKPNQHLPYVGAAAFSHKGGLHVSAVQKDPKTYEHIKPEDVGNTRNIVVSDQSGKSNIISRLKSIKIDIKENDPKIK

SEQ ID NO: 115542 - protein, 285 aa, Unknown
  Bacterial polypetide isolated from the Sargasso Sea
IILCDTNGGTLPHEITRIVEDVSKYIPGKNLGIHAHNDTENAVANSLAAVQAGVRQVQGTLNGLGERCGNANLVSLIPTFFLKKDFFENYELNIKRENLKNLTQCSRLLDELLNRKPNKHLPYVGASAFSHKGGMHVSAVQKNPKTYEHVNPVEVGNSRNIVVSDQSGQSNIMSRLNLIGINVEKSDPKIKKLLDEVKDREFIGYSYDGADASFELLARRLMGEIPRYISINEYDVSVKKDKSGEIISHAKAQLEVDGKKILCEGQGNGPVNALDNAIRKNVNKL

SEQ ID NO: 115543 - protein, 266 aa, Unknown
  Bacterial polypetide isolated from the Sargasso Sea
MSKERLYLFDTTLRDGAQTQGVDFSIEDKEKIAKALDTLGVDYIEGGWPGANPTDTEFFQKKHIFKNSKLTCFGMTKKTGHSAENDTGLSALLNSNTPAVCLVGKSWDFHVDVALGISNEENLTNISESAKHFVKAKKEFMFDAEHFFDGYKANPNYAIECINAAYKQGARWVVLCDTNGGTLPHEISKIVTEVTKIIPGKNLGIHAHNDTGNAVANSIAAVLSGVRQVQGTINGLGERCGNANLMSLIPTFFLKSDFSSKFETRN

SEQ ID NO: 115544 - protein, 276 aa, Unknown
  Bacterial polypetide isolated from the Sargasso Sea
GYAMSCLKAAFDNGARWIILCDTNGGTLPHEITEIVYKVSKQIPGKNLGIHAHNDTENAVANSLAAVQAGVRQVQGTINGLGERCGNANLMSLIPSFFLKKDFSEKFELSIKRENLKNLTQCSRLLDEILNRKPNKHLPYVGASAFSHKGGMHVSAVQKNPKTYEHINPEEVGNSRNIVISDQSGQSNIMSRLNSIGIKVEKSNPKIKKLLDEVKDREFIGYSYDGADASFELLARRLMGEIPRYISINEYDVSVKKDNAGEIVSYAKAQLEVEET

SEQ ID NO: 115545 - protein, 190 aa, Unknown
  Bacterial polypetide isolated from the Sargasso Sea
VQSNLVLGKHSGRHAFTQKLNELGFKLGDNAVEDAFKRFKELADKKKDVYDEDLVPLVDEEARSNDRIKFISLRVVAGSEGPQSAEIQIEIDGDLKRNKSDGDGPVDATFNSVKALFPHKAKLLLYQVHAVTEGTDAQAEVTVRLEENGKTVNGQGADTDTLVASARAYINALNKLLVKRQKAAPEALTA

SEQ ID NO: 115546 - protein, 219 aa, Unknown
  Bacterial polypetide isolated from the Sargasso Sea
MLKNRETYEIMTPESVGVKKTSLVMGKHSGRHAFKDKLSDLGYSDLTDDIIQAAFGKFKVLADKKKHIYDEDIVALVDDSLIVDNKINAINLKSLKVFAGTGEPQKAEMTLDVYGDIKNTTETGDGPVDAIFKCIKKLFPHDVKLSLYQVHAVTEGTDAQATVSVKIEENDRTTVGQSADTDTLVASANAYLNALNKMLIKREKKAPSQNIKHQKVKGI

SEQ ID NO: 115547 - protein, 141 aa, Unknown
  Bacterial polypetide isolated from the Sargasso Sea
KNFKFLEFLTNLSVDIIEAGFPIASPGDFEAVTEISKSLKKSIPAGLARATKKDIDACHDSLKYAKNFRIHTFISTSPLHMKHKLNKSPEDVLSAIKESVSYARKFTDDVEWSCEDGTRTDMDYMCKTVELAIKSGAKTIN

SEQ ID NO: 115548 - protein, 284 aa, Unknown
  Bacterial polypetide isolated from the Sargasso Sea
VVPGKNLGIHAHNDTGNAVANSLAAVLSGVRQIQGTINGLGERCGNANLMSLIPTFFLKKDFSSQFEISIKSENIKNLTECSRLLDEILNRKPNQHSPYVGAAAFSHKGGLHVSAVQKDPKTYEHINPEEVGNTRNIVVSDQSGKSNIISRLKSIKINIEESDPKIKKLLDEVKDREFIGYSYDGADASFELLARRIIGEIPRYISINEYDVSVKKNKSGEIVSSAKAQLEVDGEKIMCEGEGNGPVNALDNAIRQNVDRLAKYSKYLKDLKLVDYKVRILNTG

SEQ ID NO: 115549 - protein, 254 aa, Unknown
  Bacterial polypetide isolated from the Sargasso Sea
MLQVFPSNIIKLLVGKNAFAHEAGIHQDGMLKNRQTYEIMTPESVGVKQTSLVMGKHSGRHAFKDKLTSLGYPDLTDDVVDNAFAKFKILADKKKHVYDEDIIALIDDSLITDNKVSAINLKSLKVFAGTGEPQRAEMTLDVFGEVKKASETGDGPVDAIFKCIKKLYPHEVNLQLYQVHAVTEGTDAQATVSVKIEENGKTTVGQAADTDTLVASANAYINSLNKMIIKRDKTAPGHNIEKSNFEKSKMKRNI

SEQ ID NO: 115550 - protein, 298 aa, Unknown
  Bacterial polypetide isolated from the Sargasso Sea
YDQGARWIVLCDTNGGTLPHEVSKIVSEIAKHIPGENLGIHAHNDTENAVANSLAAVQAGVRQIQGTINGLGERCGNANLMSLIPTLFLKKDFSEKFEIKIKRENLQNLTQCSRLLDELLNRKPNKHLPYVGASAFSHKGGMHVSAVQKNPKTYEHIDPEEVGNSRNIVVSDQAGQSNIMSRLKSIGIQVEKNDPKIKKLLEEVKDREFIGYSYDGADASFELLARRLMGEIPRYILINEYDVSVKKDNAGEIISHAKANLVVDGEKILCEGQGNGPVNALDNEIRKNVNKLAKYSEY

SEQ ID NO: 115551 - protein, 97 aa, Unknown
  Bacterial polypetide isolated from the Sargasso Sea
GPVDAVCRALNTLAGIPNDLIEFSVKSVTEGIDAMGEVTIRLRRDGSLYSGHAADTDVVVAAAMAFVNALNRLVAGEAKQSLHPQKDAVVPPSRPTL

SEQ ID NO: 115552 - protein, 233 aa, Unknown
  Bacterial polypetide isolated from the Sargasso Sea
GKNAFAHEAGIHQDGMLKNRQTYEIMTPESVGVKQTSLVMGKHSGKHAFKDKLNSLGYPDLTDDVVGNAFAKFKVLADKKKHVYDEDIIALIDDSLIIDNKVNAISLKSLKVFAGTGEPQRAEMTLDVYGDVKKASETGDGPVDAIFRCIKTLFPHDVNLQLYQVHAVTEGTDAQATVSVKIEEKGKTTVGQAADTDTLVASANAYINSLNKMIIKRNKTAPMEQESQKVRGI

SEQ ID NO: 115553 - protein, 224 aa, Unknown
  Bacterial polypetide isolated from the Sargasso Sea
MSKEKLYIFDTTLRDGAQTQGVDFSIDDKLKIAKALDDLGVDYIEGGWPGANPTDTEFFQKNIKLNNSIMTAFGMTKKTGRSADNDPGLSSILNSNTKAVCLVGKSWDFHVDVALGITNEENLENISESTKLFIKEKKEFMFDAEHFFDGFKNNKEYALSCIKSAYDNGARWIVLCDTNGGTLPNEVSEIVKEVTKTVPGKNLGIHAHNDTGNAVANSLAAVLS

SEQ ID NO: 115554 - protein, 171 aa, Unknown
  Bacterial polypetide isolated from the Sargasso Sea
METYEIMKTGLCFIPQDRSLFNTLTVAENLAMAGYTINDKQDLRGRIDEALDTFPRLKERLTQYAGTMSGGEQQQLIFARAIILKPRVILIDEPSLGLAPAIVEQAFQHIENIASQGVSILLVEQNARRGLSSSNFGTVMDLGEIVFEKPANQVLSDDRIQELYLGKRKKK

SEQ ID NO: 115555 - protein, 231 aa, Unknown
  Bacterial polypetide isolated from the Sargasso Sea
MHVPRNKAIVGDNAFAHEAGIHQHGMLRDSSTYEIMKPQDVGIARSNLVLGKHSGRHAFLDRINELGFALEKDEIDPAFQEFKKLADRKKEIFDTDIEAIVLNADIANMSRWSLMDLETTSGSSWGSTASLKLKDSGEEIIERDNNSNPASGPIEAVFNIISDITGYKLELTNFEIHSVSVGDDAQGEVTVTVSYNGQNYRGHGISTDIIESGALAYLEVINRIERNQAKH

SEQ ID NO: 115556 - protein, 309 aa, Unknown
  Bacterial polypetide isolated from the Sargasso Sea
MTKKSGRSAENDTGLSAIMNSNTSAVCLVGKSWDFHVDVALGITNEENLDNISESAKHFVKAKKEFMFDAEHFFDGYKANSNYALSCIKAAYDQGARWIILCDTNGGTLPHEVTKIVSEVTKVVPGKNLGIHAHNDTGNAVANSLAAVLSGVRQIQGTINGLGERCGNANLMSLIPTFFLKKDFSSQFEIGIKSENIKNLTDCSRLLDEILNRKPNQHLPYVGAAAFSHKGGLHVSAVQKNPKTYEHINPEEVGNARNIVVSDQSGKSNIISRLKSIRIDIQENDPKIKKLLDEVKDREFIGYSYDGAG

SEQ ID NO: 115557 - protein, 90 aa, Unknown
  Bacterial polypetide isolated from the Sargasso Sea
MKDLIKKYKPFEPIPLKGRQWPNTVIQTAPRWCSVDLRDGNQALIEPMGHERKKRMFKLLCDLGFKEIEVGFTAASETDFEFVRWLMKKS

SEQ ID NO: 115558 - protein, 299 aa, Unknown
  Bacterial polypetide isolated from the Sargasso Sea
SAENDPGLSAIINSNTESVCLVGKTWDFHVDVALGISNEENIENIKETTKHFVKNDKEFMFDAEHFFDGYKSNPKYALECIKAAYDNGAKWIVLCDTNGGTLPHEVTKIVKEVSEHIPGENLGIHAHNDTGNAVANSIAAVMSGARQIQGTINGLGERCGNANLMSIIPTFHLKKELSDKYEINIKEKNIKHITQCSRLLDEILNRKPNKHLPYVGAAAFSHKGGLHVSAVQKDPKTYEHINPEEVGNNRNIVVSDQSGKSNILSRLKTIGIEIEENDPKVKKLLEEVKDREFIGYSYD

SEQ ID NO: 115559 - protein, 226 aa, Unknown
  Bacterial polypetide isolated from the Sargasso Sea
DFSIDDKIKIAKALDGLGVDYIEGGWPGANPTDTEFFQKKIKLNNSIMTAFGMTKRTGRSADNDPGLSSILNSNTKAVCLVGKTWDFHVDVALGISNQENLENISESAKLFVKEKKEFMFDAEHFFDGFKNNKEYALSCIKSAYDNGARWIVLCDTNGGTLPNEVSEIVNEVTKSVPGKNLGIHAHNDTGNAVANSLAAVLSGARQIQGTINGLGERCGNANLMSV

SEQ ID NO: 115560 - protein, 269 aa, Unknown
  Bacterial polypetide isolated from the Sargasso Sea
EQNLINISESTKHIVKSGKEFMFDAEHFFDGYKSNPEYAMSCLKASYDNGARWIVLCDTNGGTLPHEITKIIMEVKKHIPGENLGIHAHNDTENAVANSLAAVQAGVRQVQGTINGLGERCGNANLMSLIPSFFLKKDFSNKFDLSIKRENLKNLTQCSRLLDEILNRKPNKHLPYVGASAFSHKGGMHVSAVQKDPKTYEHINPDEVGNSRNIVVSDQSGQSNIMSRLNLIGIKVEKSDPKIKKLLEEVKDREFIGYSYDGADASFEL

SEQ ID NO: 115561 - protein, 235 aa, Unknown
  Bacterial polypetide isolated from the Sargasso Sea
SITGMHVPRNKAIVGDNAFAHEAGIHQHGMLRDSSTYEIMKPQDVGIARSNLVLGKHSGRHAFLDRINDLGFKLEKDEIDPAFREFKKLADKKKEIFDTDIEAIVLNADIANMSRWSLEDLETNSGSSWGSTASLKLVDSDENIIERDNKENPASGPIEAVFNIISDITGYQLELTNFEIHSVSVGDDAQGEVTVTVSYDGQNYRGHGISTDIIESGALAYLEVINRIERNQAKH

SEQ ID NO: 115562 - protein, 295 aa, Unknown
  Bacterial polypetide isolated from the Sargasso Sea
MFDSTLRDGAQTQGVYFTVADKMAIARALDGLGTDYVEGGWPGANPTDDAFFREAPKLLRSKFTAFGMTRRPGRSVENDPGIAALLDVKPAAVCMVGKTWDYHVDVALEIPREENVEMISDSIAHVKAKVAEALFDAEHFFDGYKANSEYALTCVKAAYEAGARWIVLCDTNGGTLPHEVDDIVRRVSEIVPGSYLGIHCHNDTENAVANSLAAVNAGARQIQGTLNGLGERCGNANLTAIIPSLMLKMGFETALGDDDLRGLTRVSRMLDERLNRVPSRNAAYVGGSAFAHKGG

SEQ ID NO: 115563 - protein, 281 aa, Unknown
  Bacterial polypetide isolated from the Sargasso Sea
ANPSDTEFFQKGLDLKNSTFTALGMTKKAGRSAENDPGLSAILNSNTKSVCLVGKSWDFHVDVALGITNEENLENIKETTKHFVKNNKEFMFDAEHFFDGYKANPKYALACIKAAYDNGAKWIVLCDTNGGTLPHEVTKIVKEVSEHIPGENLGIHAHNDTGNAVANSIAAVLSGARQIQGTINGLGERCGNANLMSIIPTFHLKKELSDKFEISIKEKNIKHITQCSRLLDEILNRKPNKHLPYVGAAAFSHKGGLHVSAVQKDPKTYEHINPEDVGNNR

SEQ ID NO: 115564 - protein, 310 aa, Unknown
  Bacterial polypetide isolated from the Sargasso Sea
VDYIEGGWPGANPTDTEFFNKNHNFRNAKLTAFGMTKKSEHSANNDPMLSSLINSKSSSVCLFGKSWDFQVDVALGISNEQNIKNISESAKHIIASGKEFMFDAEHFFDGYKSNKEYAISCIKAAFDQGARWIVLCDTNGGTLPHEVSKIVYDVTNHIPGSNLGIHAHNDTENAVANSLAAVQSGVRQIQGTINGLGERCGNANLMSLIPTFFLKKDFSEKYELNIKHENLKNLTQCSRLLDEILNRKPNKHLPYVGASAFSHKGGMHVSAVQKNPKTYEHINPEEVGNVRNIVVSDQSGQSNIISRLNS

SEQ ID NO: 115565 - protein, 171 aa, Unknown
  Bacterial polypetide isolated from the Sargasso Sea
MQIKKGFKAIKQSNDPKWQVPYLPIDPADLGRSYEAVVRINSQSGKGGVAFLLEKDHGVSLPRRLQISLSQKIQKLAEDTGKEISSSQIWDIFEKNYLKPINNFSYIEHSSTSNGDAHFLELTMNMENEEIKIKGNGNGPIDSFINGLSEKLGMQIKVADYHQSAILLDLM

SEQ ID NO: 115566 - protein, 329 aa, Unknown
  Bacterial polypetide isolated from the Sargasso Sea
NIGVDYIEGGWPGANPIDTEFFNKSPKFNNSIFTAFGMTKKSGRSAENDPGLSSLLNANSQAVCVVGKSWDFHVKIALGIKNQENLENIRETAKHFVKNKKEFLFDAEHFFDGFKNNPQYALDCLKQAYDEGARWVVLCDTNGGTLPHEVSEIVSKVTKIIPGKNIGIHAHNDTENAVANSLAAVLAGARQIQGTINGLGERCGNANLSSIIPTLFLKKTFNEKFDLNIKKENLSSLTECSRFLDEILNKKPNKNMAYVGASAFSHKGGLHVSAVKKDPRTYEHIDPKLVGNHRNIIVSNQSGRSNILSRLENYGVKIDSKDPKVQKIS

SEQ ID NO: 115567 - protein, 57 aa, Unknown
  Bacterial polypetide isolated from the Sargasso Sea
MKNIKFQDTSLRDGEQTPGVAYNLQDKIRITEQLIKLNVDSIEVGFPAASKDEAAIV

SEQ ID NO: 115568 - protein, 274 aa, Unknown
  Bacterial polypetide isolated from the Sargasso Sea
SADNDPGLSSILHSNTLAVCLVGKSWDFHVDVALGISNDENLENISESAKLFVKEKKEFMFDAEHFFDGFKNNKDYALACIKSAFDNGARWIVLCDTNGGTLPHEVSEIVGEVVKSIPGKNLGIHAHNDTGNAVANSLAAVLSGVRQIQGTINGLGERCGNANLMSIIPTLHLKETYSKNFEINIKKENINKLTQCSRLLDEILNRKPNQHLPYVGAAAFSHKGGLHVSAVQKDPKTYEHINPETVGNVRNIVVSDQSGKSNIVSRLKSIGVKL

SEQ ID NO: 115569 - protein, 291 aa, Unknown
  Bacterial polypetide isolated from the Sargasso Sea
MNKDKIYLFDTTLRDGAQTEGVDFSIEDKNKIANVLSDIGIDYIEGGWPGANPIDTKFFSKPPKTKKSIFTAFGMTKKTGRSADNDPGLASLINADTSAVCVVGKTWDFHVKVALGINNEDNLENIRETTKHFVKHKKEFLFDAEHFFDGYKANSNYALDCLKNAYDSGARWIVLCDTNGGTLPNEVREIVKKVTKVIPGKNLGIHAHNDTENAVANSLAAVESGVRQIQGTINGLGERCGNANLMSIIPTLFLKKSFNERFDINIKKEKLSSLTDCSRLLDEILNRKPNK

SEQ ID NO: 115570 - protein, 76 aa, Unknown
  Bacterial polypetide isolated from the Sargasso Sea
RVLGESVTEGIDAMGEVTIRLRRDGCLYSGHAADTDVVVAAAMAFVNALNRLVAGEAKQSLHPQKDAVVPPSRPTL

SEQ ID NO: 115571 - protein, 204 aa, Unknown
  Bacterial polypetide isolated from the Sargasso Sea
PSNKWAVPYLPIDPADMGRTYEAIIRVNSQSGKGGTAWLLESDYQIRLPKGAEVELSSKVQKIADETGNEITSDVIWRTFVENFILQKPFQLIDFKVEGANRENNLEIINAKISYNEKVHQFSSQGNGPISAFVNGIRENFDLQFTLEDFGQNTRSASSKAESAAYVKLKINDSDDSVYGCGINTSITVAPILAVLSAINKIKI

SEQ ID NO: 115572 - protein, 192 aa, Unknown
  Bacterial polypetide isolated from the Sargasso Sea
PKDVGRSYEAVIRINSQSGKGGVAYLLEKDHGLSMPRRLQIEFSQVIQKIADDTGKEISPSDIWDNFQDTYLNESGTYEFNNHSISSTANKDGNQSDDIEIGLIKDAKEITLKGSGNGPIDAMIDAIKRDLNLDLKISDYHQHAISSGSDAKAVAYSEIIMGEQSVWGVGIHQNTVIAGLKSIISGLNRLSK

SEQ ID NO: 115573 - protein, 227 aa, Unknown
  Bacterial polypetide isolated from the Sargasso Sea
LNIVSEVTNYIPGQNLGIHAHNDTDNAVANSLAAVQAGVRQVQGTLNGLGERCGNANLTSLIPTFFLKKDFYENYELNIKRENLKKLTQCSRLLDELLNRKPNKHMPYVGASAFSHKGGMHVSAVQKNPKTYEHINPEEVGNSRNIVVSDQSGQSNIMSRLNSIGIKVEKSDPKIKKLLDEVKDREFIGYSYDGADASFELLARRLLGEIPRYISRNEYDVSVKKDK

SEQ ID NO: 115574 - protein, 261 aa, Unknown
  Bacterial polypetide isolated from the Sargasso Sea
YIPGKNLGIHAHNDTENAVANSLAAVQSGARQIQGTINGLGERCGNANLMSLIPTFFLKKDFSDLFELNIKRENLKNLTQCSRLLDEILNRKPNKHLPYVGASAFSHKGGMHVSAVQKDPKTYEHINPEEVGNVRNIVVSDQSGQSNIMSRLNSIGIEIKKNDPKIKKLLHEVKDREFIGYSYDGADASFELLARRLMGEIPRYISINEYDVSVKKDKTGEIISLAKAQLEVDGKKIICEGQGNGPVHALDNAIRKNVNKL

SEQ ID NO: 115575 - protein, 320 aa, Unknown
  Bacterial polypetide isolated from the Sargasso Sea
HAHNDTENAVANSLAAVLSGVRQIQGTINGLGERCGNANLMSIIPTLHLKKTYTNNYEINIKKENINKLTQCSRLLDEILNRKPNQHLPYVGAAAFSHKGGLHVSAVQKDPKTYEHINPQEVGNVRNIVVSDQSGKSNIVSRLNSIGIDFKQDDPKIKKLLEEVKDREFIGYSYDGADASFELLARRVMGEIPRYISIKEYDVSVKKNNLGEIISSAKAQLEVDKKLILCEGEGNGPVHALDNAIRDNVEKLAKYSQYLKDLKLVDYKVRILNTGTEAVTRVSIESTDSKGKNWFTIGVSANIIDASFKALVDSLDYKLL

SEQ ID NO: 115576 - protein, 287 aa, Unknown
  Bacterial polypetide isolated from the Sargasso Sea
KISSIVAENDPMLSSLINSKSSSICLFGKSWDFQVKVALGISNEQNLTNIGESTKHVVKSGKEFMFDAEHFFDGYKSNPEYALSCLKAAYDNGARWIILCDTNGGTLPNEISKIITEVSKYIPGENLGIHAHNDTENAVANSLAAVQAGVRQVQGTINGLGERCGNANLMSLIPSFFLKKDFSDKFELSIKREKLKNLTQCSRLLDEILNRKPNKHLPYVGASAFSHKGGMHVSAVQKDPKTYEHINPEEVGNSRNIIVSDQSGQSNIMSRLNLIGINIEKSDPKIK

SEQ ID NO: 115577 - protein, 309 aa, Unknown
  Bacterial polypetide isolated from the Sargasso Sea
GKILGIHAHNDTGNAVANSLAAVLSGVRQIQGTINGLGERCGNANLMSLIPTFFLKKDFSSQFEIGIKSKNIKNLTECSRLLDEILNRKPNQHLPYVGAAAFSHKGGLHVSAVQKDPKTYEHINPEEVGNTRNIVVSDQSGKSNIISRLKSIKIEIEENDPKIKKLLDEVKDREFIGYSYDGADASFELLARRIIGEIPRYISINEYDVSVKKNKSGEIVSSAKAQLEVDGEKIMCEGEGNGPVNALDNAIRQNVDRLAKYSKYLKDLKLVDYKVRILNTGTEAVTRVSIESTDSKGKNWFTIGVSTNI

SEQ ID NO: 115578 - protein, 284 aa, Unknown
  Bacterial polypetide isolated from the Sargasso Sea
LFDAEHFFDGYKANPNYALSCLKQAYDSGARWLVLCDTNGGTLPNEIKEIVSKVSKEIPGKNLGIHAHNDTENAVANSLAAVEAGARHIQGTINGLGERCGNANLMSIIPTLCLKKSFKDKFDVGIKKEKLSSLTECSRLLDEILNRKPNKNMAYVGASAFSHKGGLHVSAVKKDPKTYEHVDPKMVGNHRNIIVSNQAGRSNILSRLEKYGVKIDSQDPKVQKILDEVKDREFSGYSYDGADASFELLANRLLGKVPEYLKVKSYNVSVAKSDTIKTKANVVF

SEQ ID NO: 115579 - protein, 203 aa, Unknown
  Bacterial polypetide isolated from the Sargasso Sea
MNCKGSPPSCKGRSTSALFDCDSDEVSHRNTSAAREGLVWDYLNSTFCLVPADGRQASSRLFAAVASGCVPVIFGDFESVYPTLPFKATIDWSQMAIFAGSLECHSTAPPIPDPQGFVLPSKDMARWLESLGESAERLASRVGCLSSYGREAAKGSLSYTSDGIVTALLREAVAPRPSQPERDQANVPPPAPQLGRLPADATS

SEQ ID NO: 115580 - protein, 235 aa, Unknown
  Bacterial polypetide isolated from the Sargasso Sea
MSKEKLYIFDTTLRDGAQTEGVDFSIDDKNKISKILSNIGVDYIEGGWPGANPIDTEFFNSAPKLSKSIFTAFGMTKKSGRSAENDPGLSSLLNANSQAVCVVGKSWDFHVKVALGIKNDENLENIKETAKHFVKNKKEFLFDAEHFFDGFKNNPQYALDCLKQAYDEGARWVVLCDTNGGTLPHEVSEIVEKVTKTIPGKNIGIHAHNDTENAVANSLAAVLAGAQTIQEHIMG

SEQ ID NO: 115581 - protein, 292 aa, Unknown
  Bacterial polypetide isolated from the Sargasso Sea
KNLGIHAHNDTENAVANSLAAVESGVRQIQGTINGLGERCGNANLMSIIPTLCLKKTFSEKFDVNIKKDKLSSLTDCSRLLDEILNRKPNKSLPYVGASAFSHKGGLHVSAVKKDPKTYEHINPELIGNHRNIIVSNQAGRSNILSRLEKYGVKIDSNNPKVQKILDEVKDREFSGYSYDGADASFELLAKRLLGKLPEYLKVKSYKVSVSKSEKILTKANVVFLIDGKEISCDGEGNGPVNALDNAIRSNFKKVKKYYNFFNDLKLLDYKVRILNTGTEATTRVLIESTDK

SEQ ID NO: 115582 - protein, 201 aa, Unknown
  Bacterial polypetide isolated from the Sargasso Sea
DPQWEVPYLPVDPADLGRTYEAVVRINSQSGKGGVAFLLEKDHGVSLPRRLQISMSQKIQKIADETGKEISTSEIWEIFHTNFVMPKSGHSFKNYSLKTSDATDLSDHIKAEIEIDGKNHEIYGSGNGPIDAFVNALNQKLSIDIKVSDYHQSAISSGSDAQAAAYIELQKGDKTSWGVGINPNTTKASFEAIIVGVAKLI

SEQ ID NO: 115583 - protein, 192 aa, Unknown
  Bacterial polypetide isolated from the Sargasso Sea
MDLKNSSFTAFGMTKKTGRSAENDPGLSAILNSNTKSVCLVGKSWDFHVDIALGISNEENLENIKETTKHFVKNNKEFMFDAEHFFDGYKANPKYALACIKAAYDNGAKWIVLCDTNGGTLPHEVTKIVKEVSEHIPGKNLGIHAHNDTGNAVANSIAAVLSGVRQIQGTINGLGERCGNANLMSIIPTFHL

SEQ ID NO: 115584 - protein, 188 aa, Unknown
  Bacterial polypetide isolated from the Sargasso Sea
MSFDHRKYRRAPVINLAARQWPNRVLERAPLWCAVDLRDGNQALVEPMTVAQKLQMWALMVHIGFKHIEVGFPAASQPDFDFVRELIDRNLIPDDVTIQVLVQAREDLIARTFEALKGAKRAIVHVYNSVNPTQRNYVFNSGREGVKAIAVQGARWVREYAARNPGTEWSFQYSPESFSSTEVEFAVE

SEQ ID NO: 115585 - protein, 181 aa, Unknown
  Bacterial polypetide isolated from the Sargasso Sea
LSGRNAFKQRLQELGVQLDSETEINVAFAKFKELADRKSEIFDEDILALVSDESVTAEKEQYGFVSLFQQSETGEQPRARIVFTVDGQEVRGEAEGNGPVDASLKAIESHVKSGAEMVLYSVNAISGSTESQGEVTVRLQNSGRVVNGVGADPDIVVASAKAYLSALNKLQSKADRVAAQG

SEQ ID NO: 115586 - protein, 286 aa, Unknown
  Bacterial polypetide isolated from the Sargasso Sea
ANPLDTEFFQKGLSLKNSKFTAFGMTKKSGRSAENDPGLSSIMNSNTNSVCLVGKTWDFHVDVALEISNEENLENIKETTKHFVKKDKEFMFDAEHFFDGYKSNPKYALDCIKAAYDNGAKWIVLCDTNGGTLPHEVTKIVKEVSKHIPGENLGIHAHNDTGNAVANSIAAVLSGVRQIQGTINGLGERCGNANLMSIIPTLKLKKELSDKYELNIKKKNIKYITQCSRLLDEILNRKPNKHLPYVGAAAFSHKGGLHVSAVQKNPKTYEHINPEEVGNSRNIVVS

SEQ ID NO: 115587 - protein, 198 aa, Unknown
  Bacterial polypetide isolated from the Sargasso Sea
ITQIVSEVIKVVPGKNLGIHAHNDTGNAVANSLAAVLSGVRQIQGTINGLGERCGNANLMSLIPTFFLKNDFSSQFEIGVKSKNIKNLTDCSRLLDEILNRKPNQHLPYVGAAAFSHKGGLHVSAVQKDPKTYEHINPEEVGNTRNIVVSDQSGKSNIISRLKSIKIDIQENDPKIKKLLDEVKDREFIGYSYDGADA

SEQ ID NO: 115588 - protein, 210 aa, Unknown
  Bacterial polypetide isolated from the Sargasso Sea
GTYEIMTPESIGLNKSSLVLGKHSGKHAFSEKLKELGYEVGDNALMELFGRFKDLADKKKEIFEEDLIALAEDRTSSYDEHIKFVSLEVNAGSVEKAEAKLKIEINDKVENTKINGNGPVDATFNAIKKLTNTEFKLKLYQVNAITAGTDAQGEVTVRLEDDNLSSQAKGSDPDIIVASAKAYINALNRLIFKKTKSIKENSASLKIEGV

SEQ ID NO: 115589 - protein, 267 aa, Unknown
  Bacterial polypetide isolated from the Sargasso Sea
EIREIVTKVSKSIPGKNLGIHAHNDTENAVANSLAAVECGARQIQGTINGLGERCGNANLMSIIPTLSLKKSFSDKFEINIKREKLNSLTECSRLLDELLNRKPNKNLPYVGASAFSHKGGLHVSAVKKDPKTYEHVDPKAVGNHRNIIISNQAGRSNILSRLEAYGVKINSKDTKVQKILDKVKEREFSGYSYDGADASFELLANRLLGKVPEYLKVESYDVNVSKSKKISTKANVVFLIDGKKIKCSGEGNGPVNALDNAIRSNF

SEQ ID NO: 115590 - protein, 277 aa, Unknown
  Bacterial polypetide isolated from the Sargasso Sea
GFKNNKEYALSCIKSAYDNGARWIVLCDTNGGTLPNEVSEIVDEVAKFVPGKHLGIHAHNDTGNAVANSLAAVLSGARQIQGTINGLGERCGNANLMSLIPTLHLKKTYSENYEINIKKENIGKLTQCSRLLDEILNRKPNQHLPYVGAAAFSHKGGLHVSAVQKDPKTYEHINPEDVGNVRNIVVSDQSGKSNIVSRLKSIGIDFQQDDPKIKKLLEEVKDREFIGYSYDGADASFELLARRIMGEIPRYILIKEYDVSVKKNNSGVIISSAKAQL

SEQ ID NO: 115591 - protein, 287 aa, Unknown
  Bacterial polypetide isolated from the Sargasso Sea
EHNFKNSKLTSFGMTKKSGRSAENDTGLSAIMNSSTSAVCLVGKSWDFHVDIALGVTNEENLNNIAESAKHFVKAKKEFMFDAEHFFDGYKANPKYAVSCLKAAYDHGARWVILCDTNGGTLPHEVTRIVSEVTKIIPGKNLGIHAHNDTGNAVANSLAAVLSGVRQIQGTINGLGERCGNANLISLIPTFFLKKDFSSQFEIGIKSENIKNLTDCSRLLDEILNRKPNQHLPYVGAAAFSHKGGLHVSAVQKDPKTYEHINPEEVGNTRNIVVSDQSGKSNIISRL

SEQ ID NO: 115592 - protein, 291 aa, Unknown
  Bacterial polypetide isolated from the Sargasso Sea
NDTKFFSKPPKLKKSIFTAFGMTKKTGRSADNDPGLASLMNANSPAVCVVGKTWDFHVKVALGINNEENLENIKETAKHFVKNKKEFLFDAEHFFDGYKANPNYALNCLKQAYDSGARWLVLCDTNGGTLPNEIKEIVSKVSKEIPGKNLGIHAHNDTENAVANSLAAVEAGVRHIQGTINGLGERCGNANLMSIIPTLCLKKSFKDKFDVGIKEEKLSSLTECSRLLDEILNRKPNKNMAYVGASAFSHKGGLHVSAVKKDPKTYEHVDPKMVGNHRNIIVSNQAGRSNI

SEQ ID NO: 115593 - protein, 277 aa, Unknown
  Bacterial polypetide isolated from the Sargasso Sea
FHVDLALGISNDENLVNIAESVNFLSSSKKEVHFDAEHFFDGYKANPQYAIKCLKAAQDNGAKWMVLCDTNGGTLPHEVEQIVSEVVKDIPGDQLGIHAHNDTGNAVANSLAAVHAGVRQVQGTINGLGERCGNANLITLLPTFALKNEYIDKFDLSIDTKNLGLLTELSRLLDEILNRVPNRTAPYVGSAAFAHKGGLHVSAVNKDPKTYEHIDPELVGNHRQIIISEQSGKSNILARLKSTRIQINEDDQTIQKILDRVKEREFIGYSYDGADAS

SEQ ID NO: 115594 - protein, 48 aa, Unknown
  Bacterial polypetide isolated from the Sargasso Sea
MTDKNRVYIFDTTMRDGEQSPGASMSLEEKIQIARVFDELGVDIIEAG

SEQ ID NO: 115595 - protein, 304 aa, Unknown
  Bacterial polypetide isolated from the Sargasso Sea
SDNRIWLFDTTLRDGGQTRGVDFSKADKMAIAAALDEIGIDYIEGGWPGANPTDDAFFAAPPQTRNARMVAFGMTRRGGRSAANDPGLNAVLDAEVPATCLVGKTWDFHVETAIKTSLEENLDMIRSSVAAAADKGRESMFDCEHFFDGYKTNPDYALDCVRAAHEGGAAWVVLCDTNGGTLPSEVFEIVSTVRKAVPDAKLGIHCHNDAGVAVANSLAAIRAGARQVQGTINGLGERCGNADLITLIPTLVLKLGYETSIAEKSLPKLMQLSRMLDERLNRAPNAQAPYVGEAAFAHKGGLHA

SEQ ID NO: 115596 - protein, 266 aa, Unknown
  Bacterial polypetide isolated from the Sargasso Sea
IPGENLGIHAHNDTGNAVANSIAAVLSGARQIQGTINGLGERCGNANLMSIIPTFHLKKELSDKFEISVKEKNIKHITQCSRLLDEILNRKPNKHLPYVGAAAFSHKGGLHVSAVQKDPKTYEHINPEDVGNNRNIVVSDQSGKSNILSRLKTIGIEIEENDPKVKKLLEEVKDREFIGYSYDGADASFELLARRVMGEIPRYISIKEYDVSVSKNDQDKIISRAKAKLEVDGEQIVCEGEGNGPVHALDNAIRKNVTKLEKYYEY

SEQ ID NO: 115597 - protein, 108 aa, Unknown
  Bacterial polypetide isolated from the Sargasso Sea
MSEFDPKNKYTPFERINLKDRKWPNQIINNAPTWCSVDLRDGNQSLIEPMDTPKKLKLFKTLVSIGFKEIEIGFPAASETDYNFCRYLIENKLIPNDVTIQVLTQARE

SEQ ID NO: 115598 - protein, 277 aa, Unknown
  Bacterial polypetide isolated from the Sargasso Sea
AISCIRSAYDNGARWVILCDTNGGTLPHEVSEIVSEVSKHVPGKNLGIHAHNDTGNAVANSLAAVLSGVRQVQGTINGLGERCGNANLMSIIPTIHLKEDFYKKFETNIKSEDTKKLTQSSRLLDEILNRKPNKHLPYVGAAAFSHKGGLHVSAVQKDPKTYEHIDPELVGNSRNIVVSDQAGKSNIVSRLKSIGVNFQENDPKIKKLLEEVKDREFIGYSYDGADASFELLARRIMGEIPRYILIKEYDVSVKKDSSGNIVSSAKAKLQVDNKLIL

SEQ ID NO: 115599 - protein, 251 aa, Unknown
  Bacterial polypetide isolated from the Sargasso Sea
MNECFVVIAGGGTAGHVHPGLAVANALARDGHRKEEILFVGSDRGIEQDLVPSEGFELVTISGAGIPRRNPIAALRAIYLLIRGIVEALRLLGRRKPKVVLALGGFACFPCAFASLVLKIPVIAHEQNAVPGLANKIISRWARLCAVSYKGTSLRNAVHTGNPVRQSIIEARQIEPASIREKLKVPRENLFIVATGGSLGAKTINLALRDAIPLLNKGVGLTVYHIIGRRDWEELARSEEELRSYVDYRPN

SEQ ID NO: 115600 - protein, 456 aa, Unknown
  Bacterial polypetide isolated from the Sargasso Sea
STSLDALGVDYIEGGWPGANPTDTEFFNKDQGFKNAKLTAFGMTKKSEHSAENDPMLASLINSKSSSVCLFGKSWDFQVDVALGITNEQNLENISESAKHIVSSGKEFMFDAEHCFDGYKANPEYTLSCLKAAYDQGARWIVLCDTNGGTLPHEVSKIVSEIAKHIPGENLGIHAHNDTENAVANSLAAVQAGVRQIQGTINGLGERCGNANLMSLIPTLFLKKDFSEKFEINIKRENLQNLTQCSRLLDELLNRKPNKHLPYVGASAFSHKGGMHVSAVQKNPKTYEHIDPEEVGNSRNIVVSDQAGQSNIMSRLKSIGIQVEKNDPKIKKLLEEVKDREFIGYSYDGADASFELLARRLMGEIPRYILINEYDVSVKKDNTGEIISHAKANLVVDGEKILCEGQGNGPVNALDNAIRKNVNKLAKYSEYLKDLKLVDNKVRILNTGTEAVTRVQ

SEQ ID NO: 115601 - protein, 327 aa, Unknown
  Bacterial polypetide isolated from the Sargasso Sea
EKLGIHAHNDTENAVANSLAAVRAGVRQIQGTINGLGERCGNANLVSLIPSIILKTDFDTSIPKKKLSALKKTSLLLDEILNRLPNTQQAYVGENAFSHKGGLHVSAINKDPKTYEHVDPEIVGNTRKIVISDQSGRSNIISLLNTVGINPDDHSDKLDFLLQKVKEREFKGYAYDQAIASFEILARQTLFGIPEYFELKRFKVIDDRRWNAKGELVTESEATVRIEVEKKEYMNVEVGNGPVNALDKALRKSLMDFYPSLEDLELTDFKVRILSSEKGTDAIVRVLIETKDQKGSIWTTVGVSTNIIDASYNALRESLIYKLIKFS

SEQ ID NO: 115602 - protein, 424 aa, Unknown
  Bacterial polypetide isolated from the Sargasso Sea
GWPGANPVDTKFFSSPPKMSKTLFTAFGMTKKTGRSADNDPGMASLINANTPAVCVVGKSWDFHVKVALGIKNDENLENIRETAKHFVKNKKEFLFDAEHFFDGFKSNPEYAVNCLKEAYDNGARWVVLCDTNGGTLPNEVREIVSKVSKIIPGKNLGIHAHNDTENAVANSLAAVECGVRQIQGTINGLGERCGNANLMSIIPSICLKKSFSDKYELNIKKEKLSSLTECSRLLDEILNRKPNKNMAYVGASAFSHKGGLHVSAVKKDPKTYEHIDPKEIGNHRNIIISNQSGRSNILSRLEKYGVKIDAKDPKVQKILDEVKEREFSGYSYDGADASFELLANRLLGKVPEYLNVKSYDVNVSKSEKIQTKAKVVFLIDGREIVCHGEGNGPVNALDNAIRSNFKKVTKYYNFFSDLKLLDY

SEQ ID NO: 115603 - protein, 322 aa, Unknown
  Bacterial polypetide isolated from the Sargasso Sea
MKDRHGLLSAPIGRVLLNMSLPNLIGIMTILGFSLADTFFISQLGTEALAAISFTFPVTLIISSIAIGIGAGVSTNLGRLIGSGNAPRAKVFLHDALLLTFILIASLSAPPESVGVKQTSLVMGKHSGRHAFKDKLTSLGYVDVTDDVIENAFGKFKVLADKKKHVYDEDILALVDDSLITDNKINALSLKSLKVFAGTGEPQKSEMTLEVFGEVKKATETGDGPVDAIFKCIKKLYPHDVNLQLYQVHAVTEGTDAQATVSVRIEENGKTTVGQAADTDTLVASANAYINALNKMIIKRNKTAPENLSSQKNYENQKMKGI

SEQ ID NO: 115604 - protein, 178 aa, Unknown
  Bacterial polypetide isolated from the Sargasso Sea
MGYTSEDYNLDEIYKAFVTLADQKGRVFDYDLEALVFFQNLQDTNEPYKLEFLSSSTHTGHVASATVGISINGETHTEAATGNGPVEASFQAIQRIVGSDVKMVDFNLQAKGSGEDALGQVDIIAEHQGRRYHGAGLATDIVRSSVLAYVHVLNLIERSKQVDAAKQARRLSESQTEK

SEQ ID NO: 115605 - protein, 448 aa, Unknown
  Bacterial polypetide isolated from the Sargasso Sea
DTGFISTHEFNTSAVCLVGKSWDFHVDVALGITNEENLDNISESAKHFIKAKKEFMFDAEHFFDGYKANPKYALSCIKAAYDQGARWIILCDTNGGTLPHEVSLIVKEVSKVVPGKNLGIHAHNDTGNAVANSLAAVLSGVRQIQGTINGLGERCGNANLMSLIPTFFLKKDFSSQFEISIKSENIKNLTECSRLLDEILNRKPNQHLPYVGAAAFSHKGGLHVSAVQKDPKTYEHINPEEVGNTRNIVVSDQSGKSNIISRLKSIKIYIEESDPKIKKLLDEVKDREFIGYSYDGADASFELLARRIIGEIPRYISINEYDVSVKKNKSGKIVSSAKAQLEVDGEKIMCEGEGNGPVNALDNAIRQNVDKLAKYSQYLKDLKLVDYKVRILNTGTEAVTRVSIESTDSNGKNWFTIGVSTNIIDASFKALIDSLDYKLFKDNAPASK

SEQ ID NO: 115606 - protein, 395 aa, Unknown
  Bacterial polypetide isolated from the Sargasso Sea
LGVDYIEGGWPGANPTDTEFFQKKIKFNNSILTAFGMTKRAGRSAENDPGLSSILNSNTPAVCLVGKSWDFHVDVALGISNEENLENISESAKLFVKEKKEFMFDAEHFFDGFKNNKEYALSCIKSAYDNGARWVVLCDTNGGTLPNEVTDIVNEVTKSVPGKNIGIHAHNDTGNAVANSLAAVLSGARQIQGTINGLGERCGNANLMSVIPTLQLKETYSNSYEINIKKENIGKLTQCSRLLDEILNRKPNQHLPYVGAAAFSHKGGLHVSAVQKDPKTYEHINPEDVGNVRNIVVSDQSGKSNIVSRLKSIGINFKQDDPKIKKLLEEVKDREFIGYSYDGADASFELLARRIMGEIPRYISIKEYDVSVKKNSSGEIISSAKAQLEVDKKLI

SEQ ID NO: 115607 - protein, 342 aa, Unknown
  Bacterial polypetide isolated from the Sargasso Sea
EVETIVQEVTKYIPGEKLGIHAHNDTENAVANSLAAVRAGVRQIQGTINGLGERCGNANLVSLIPSIILKTKFETSIPKEKLTALKKTSLLLDEILNRMPNTQQAYVGENAFSHKGGLHVSAINKDPKTYEHIDPEIVGNTRKVVISDQSGRSNIISLLNTVGINPDDHSDKLDFLLQKVKEREFKGYAYDQAIASFEILARQTLFGIPEYFELKRFKVIDDRRWNAKGELVTESEATVRIEVEKKEYMNVEVGNGPVNALDKALRKSLMGFYPTLEDLELTDFKVRILSSEKGTDAIVRVLIETKDQKGSIWTTVGVSTNIIDASYNALRESLIYKLIKSS

SEQ ID NO: 115608 - protein, 472 aa, Unknown
  Bacterial polypetide isolated from the Sargasso Sea
MAKVYLYDTTLRDGAQQEGISLSLDDKLKITKKLDEAGISYIEGGWPGSNPKDEEYFKEVTKLKLNNSIVTSFGSTRKVNSLAHNDPNLLSLVESKTKVATIVGKTWDLHVTDILNANLEEGLNMISDSIAFLKSKGQRVFLDAEHFFDGFKSNKDFTLQCLKIAAESGVECIVLCDTNGGSMPFEIQQIIQEVRNNIDTELGIHTHNDCELAVANSLIAVDAGVTQVQGTLNGYGERCGNANILSIAANLSLKLDIAVLNQTELSRLTELHKFASEIINIPPNNFQPYVGANAFNHKGGLHASAVMKLADSYQHIKPELVGNNTGMTISELSGRGNITFKLKELGFPSSKISENVAELSKEIKFRESKGHQYEGAEASFELLAHRKINDVTPMFELIDYRVIVESKSSLTEDTLTEATVKLRIGSEIRHTASVGNGPVNAIDLALRKALLQDYPTLDSVRLTDYKVRVIDQ

SEQ ID NO: 115609 - protein, 483 aa, Unknown
  Bacterial polypetide isolated from the Sargasso Sea
LRDGAQTEGVDFSIEDKNKIANVLSDIGIDYVEGGWPGANPVDTKFFSSPPKMKKTIFTAFGMTKKTGRSADNDPGLASLINANTPAVCVVGKSWDFHVKAALGIKNEENLENISETTKHFVKKNKEFLFDAEHFFDGYKSNPNYALDCIKQAYDNGARWIVLCDTNGGTLPNEIREIVSKVSKTIPGKNLGIHAHNDTENAVANSLAAVECGVRQIQGTINGLGERCGNANLMSIIPNLCLKKTFSDKFELNIKKEKLSSLTECSRLLDEILNRKPNKNMAYVGASAFSHKGGLHVSAVKKDPKTYEHIDPKIIGNHRNIIISNQSGRSNILSRLEKYGVKIDSKDSKVQKILDEVKDREFSGYSYDGADASFELLANRLLGKVPEYLKVKSYDVNVSKENKIETKASVVFLIDGKEIECHGEGNGPVNALDNAIRSNFKKVTKYYNYFSDLKLLDYKVRILNTGTEATTRVLIESTDKTGV

SEQ ID NO: 115610 - protein, 220 aa, Unknown
  Bacterial polypetide isolated from the Sargasso Sea
KNRETYEIMTPESVGVKQTSLVMGKHSGRHAFKDKLVSLGYVDVTDDVIENAFGKFKILADKKKHVYDEDIIALVDDSLIIDNKINAINLKSLKVFAGTGEPQRAEMTLDVFGEVKKASETGDGPVDAIFKCIKKLYPHDVNLQLYQVHAVTEGTDAQATVSVRIEENGKTTVGQAADTDTLVASANAYINALNKMIIKRDKTAPGYSPEQKKEEKMKGI

SEQ ID NO: 115611 - protein, 147 aa, Unknown
  Bacterial polypetide isolated from the Sargasso Sea
MLLDIVFREIEVGFPSASQTDFDFVRTIINENLIPEHVTIQALTQARPELIKRTYEALEGAPRAIVHVYNSTSTLQRRVVFNSDEKGIKKIATDGAKQVRDYAEKYPNTDWMFEYSPESFTGTELPYAVEVCNAVNEIWEPTKEKKL

SEQ ID NO: 115612 - protein, 364 aa, Unknown
  Bacterial polypetide isolated from the Sargasso Sea
AKWIVLCDTNGGTLPHEVTKIVKEVSEHIPGENLGIHAHNDTGNAVANSIAAVLSGARQIQGTINGLGERCGNANLMSIIPTFHLKQELSDKFEINIKEKNIKHITQCSRLLDEILNRKPNKHLPYVGAAAFSHKGGLHVSAVQKDPKTYEHIDPEDVGNNRNIVVSDQSGKSNILSRLKTIGIVIEENDPKIKKLLEEVKDREFIGYSYDGADASFELLARRVMGEIPRYISIKEYDVSVSKNKQEQIISKAKAKLEVDGEQIICEGEGNGPVHALDNAIRKNVTKLEKYSKYLKDLKLVDYKVRILNTGTEATTRVSIESTDSQGKNWFTIGVSPNIIDASFKALIDSLDFKLFKDKAPASK

SEQ ID NO: 115613 - protein, 350 aa, Unknown
  Bacterial polypetide isolated from the Sargasso Sea
TQGVHFSIDEKTKIAHALDNLGVDYIEGGWPGANPSDTEFFQKGLDLKNSKFTAFGMTKKSGRSAENDPGLSAIMNSNTESVCLVGKTWDFHVDIALDISNQENLENIKETTKHFVKNDKEFMFDAEHFFDGYKSNPKYALECIEAAYDNGAKWIVLCDTNGGTLPHEVTKIVKEVSEHIPGENLGIHAHNDTGNAVANSIAAVLSGARQIQGTINGLGERCGNANLMSIIPTFHLKKELSDKYEINIKEKNIKHITQCSRLLDEILNRKPNKHLPYVGAAAFSHKGGLHVSAVQKNPKTYEHINPEKVGNNRNIVVSDQSGKSNILSRLKTIGIEIEENDPKVKNYLMK

SEQ ID NO: 115614 - protein, 156 aa, Unknown
  Bacterial polypetide isolated from the Sargasso Sea
MSFDHRKYRRAPVINLAARQWPNRVLERAPLWCAVDLRDGNQALVEPMTVAQKLQMWALMVHIGFKHIEVGFPAASQPDFDFVRELIDRNLIPDDVTIQVLVQAREDLIARTFEALKGAKRAIVHVYNSVNPTQRNYVFNSRREGVKAIAVQGARW

SEQ ID NO: 115615 - protein, 423 aa, Unknown
  Bacterial polypetide isolated from the Sargasso Sea
VDVALGISNEENLENIKETTKHFVKNNKEFMFDAEHFFDGYKTNPKYALACVKAAYENGAKWIVLCDTNGGTLPHEVTRIVKEVSEHIPGENLGIHAHNDTGNAVANSIAAVLSGARQIQGTINGLGERCGNANLMSIIPTFHLKKELSDKFEINIKEKNIKHITQCSRLLDEILNRKPNKHLPYVGAAAFSHKGGLHVSAVQKDPKTYEHIDPEDVGNNRNIVVSDQSGKSNILSRLKTIGIEIEENDPKIKKLLEEVKDREFIGYSYDGADASFELLARRVMGEIPRYISIKEYDVSVSKNNQEQIISKAKAKLEVDGEQIICEGEGNGPVHALDNAIRKNVTKLEKYSKYLKDLKLVDYKVRILNTGTEATTRVSIESTDSQGKNWFTIGVSPNIIDASFKALIDSLDFKLFKDKAPASK

SEQ ID NO: 115616 - protein, 519 aa, Unknown
  Bacterial polypetide isolated from the Sargasso Sea
DGAQTQGVDFSLEDKEKIALALDNLGVDYIEAGWPGANPTDTEFFQKKYDFKNSKLTSFGMTKRSGRSAENDTGLSAIMNSNTSAVCLVGKSWDFHVDVALGITNEENLDNISESAKHFVKVNKEFMFDAEHFFDGYKANPKYALSCIKAAYDQGARWVILCDTNGGTLPHEVTQIISEVIKVVPGKNLGIHAHNDTGNAVANSLAAVLSGVRQIQGTINGLGERCGNANLMSLIPTFFLKKDFSSQFEIGIKSKNIKNLTDCSRLLDEILNRKPNQHLPYVGAAAFSHKGGLHVSAVQKDPKTYEHINPEEVGNTRNIVVSDQSGKSNIISRLKSIKIDIQENDPKIKKLLDEVKDREFIGYSYDGADASFELLARRIIGEIPRYISINEYDVSVKKNNSGEIVSSAKAQLEVDGEKIICVGEGNGPVNALDNAIRQNVDRLAKYSKYLKDLKLVDYKVRILNTGTEAVTRVSIESTDSQGKNWFTIGVSTNIIEASFKALIDSLDYKLFKDNAPASK

SEQ ID NO: 115617 - protein, 235 aa, Unknown
  Bacterial polypetide isolated from the Sargasso Sea
MSKEQLYIFDTTLRDGAQTQGIDFSIDDKEKISSALDLLGVDYVEGGWPGANPTDTEFFNKDHNFKSAKLTAFGMTKKSEHSAENDPMLSSLINSKSSSVCLFGKSWDFQVKVALGITNDQNLINISESTKHIVKSGKEFMFDAEHFFDGYKSNPEYALSCLKAAYDNGARWIVLCDTNGGTLPHEISRIVTEVTKHIPGKNLGIHAHNDTENAVANSLAAVQAGVRQVQGTING

SEQ ID NO: 115618 - protein, 354 aa, Unknown
  Bacterial polypetide isolated from the Sargasso Sea
AENDTGLSALMNSNTPAVCLVGKAWDFHVDVALGISNDENLENISESAKHFVKAKKEFMFDAEHFFDGYKANPKYAISCIKAAYDQGARWVILCDTNGGTLPHEVSKIVSDVSKVVPGKNLGIHAHNDTGNAVANSLAAVLSGVRQIQGTINGLGERCGNANLMSLIPTFFLKKDFSSKFEIGIKSNNIKNLTECSRLLDEILNRKPNQHLPYVGAAAFSHKGGLHVSAVQKDPKTYEHINPEDVGNSRNIVVSDQSGKSNIVSRLKSIKIDIKENDPKIKKLLEEVKDREFIGYSYDGADASFELLARRIIGEIPRYISINEYDVSVKKNKSGEIISSAKAQLEVDGEKIICE

SEQ ID NO: 115619 - protein, 491 aa, Unknown
  Bacterial polypetide isolated from the Sargasso Sea
YIEGGWPGANPSDTEFFQKGLDLKNSTFTAFGMTKKVGRSAENDPGLSAILNSNTKSVCLVGKSWDFHVDVALGITNEENLENIKETTKHFVKNNKEFMFDAEHFFDGYKSNPKYALACIKAAYDNGAKWIVLCDTNGGTLPHEVTEIVKEVSKHIPGENLGIHAHNDTGNAVANSIAAVLSGARQIQGTINGLGERCGNANLMSIIPTFHLKKELSDKFEISIKEKNIKHITQCSRLLDEILNRKPNKHLPYVGAAAFSHKGGLHVSAVQKDPKTYEHINPEDVGNNRNIVVSDQSGKSNILSRLKTIGIEIEENDPKVKKLLEEVKDREFIGYSYDGADASFELLARRVMGEIPRYISIKEYDVSVSKNSQDKIISRAKAKLEVDGEQIVCEGEGNGPVHALDNAIRKNVTKLEKYSEYLKDLKLVDYKVRILNTGTEATTRVSIESTDSQGKNWFTIGVSPNIIDASFKALIDSLDFKLFKDKAPASK

SEQ ID NO: 115620 - protein, 253 aa, Unknown
  Bacterial polypetide isolated from the Sargasso Sea
MSKEQLYIFDTTLRDGAQTQGVDFSIDDKEKISSALDKLGVDYVEGGWPGANPTDTEFFNKDHNFKSTKLTAFGMTKKSEHSAENDPMLSSLINSKSTSVCLFGKSWDFQVDVALGISKEQNLMNISESTKHIVKSGKEFMFDAEHFFDGYKANPEYAIACLKAAFDNGARWIILCDTNGGTLPHEVTKIVHEVTKHIPGENLGIHAHNDTENAVANSLAAVQAGVRQVQGTINGLGERCGNANLMSLIPSFF

SEQ ID NO: 115621 - protein, 260 aa, Unknown
  Bacterial polypetide isolated from the Sargasso Sea
MSKEQLYIFDTTLRDGAQTQGVDFSIDDKEKISSALDLLGVDYVEGGWPGANPTDTEFFNKDHNFKSTKLTAFGMTKKSEHSAENDPMLSSLINSKSSSVCLFGKSWDFQVKVALGITNDENLTNISESTKHIVKSGKEFMFDAEHFFDGYKSNPEYALSCLKVSYDNGARWIVLCDTNGGTLPHEIYKIVTEVSKHIPGENLGIHAHNDTENAVANSLAAVQAGARQVQGTINGLGERCGNANLMSLIPSFFLKKDFSD

SEQ ID NO: 115622 - protein, 273 aa, Unknown
  Bacterial polypetide isolated from the Sargasso Sea
MSKEKIYIFDTTLRDGAQTQGVDFSIDDKLKIAEALGSLGVDYIEGGWPGANPTDTEFFQKKINIKSSILTAFGMTKKTGRSAENDPGLSALLNSKASAICLVGKSWDFHVDVALGISNEENLENISESAKHFVKEKKEFMFDAEHFFDGFKNNKEYAISCIKSAYENGARWIVLCDTNGGTFPDEVEKIVTEVTKHVPGKNLGIHAHNDTGNAVANSLAAVLAGARQIQGTINGLGERCGNANLMSIIPTIHLKDNFSKKFTTNIKSENISK

SEQ ID NO: 115623 - protein, 96 aa, Unknown
  Bacterial polypetide isolated from the Sargasso Sea
MADKDKVFIFDTTMRDGEQSPGASMSVEEKIQISRVFDEMGIDIIEAGFPISSPGDFEAVSAISKSVKNSIPCGLARATKKDIDACHESLKFAKRF

SEQ ID NO: 115624 - protein, 71 aa, Unknown
  Bacterial polypetide isolated from the Sargasso Sea
MSDKEKVYIFDTTMRDGEQSPGASMSVEEKIQISRVFDEMGIDIIEAGFPISSPGDFEAVSEISKSVKNSI

SEQ ID NO: 115625 - protein, 145 aa, Unknown
  Bacterial polypetide isolated from the Sargasso Sea
MTKIINKSVSKYKPFEPINLENRAWPTKSIKEAPMWCSVDLRDGNQALIEPMGEERKLRMFKMLLEIGFKEIEVGFPSASQTDFDFVRKIINENLIPEDVSIQALTQARPELIKRTFEALEGSPRAIVHVYNSTSTLQRRVVFKS

SEQ ID NO: 115626 - protein, 82 aa, Unknown
  Bacterial polypetide isolated from the Sargasso Sea
MSDKNRIIIFDTTMRDGEQSPGATMSLEEKIQIARCFDELGIDVIEAGFPIASPGDFEAVTEISKVLKKSIPAGLSRATKKI

SEQ ID NO: 115627 - protein, 120 aa, Unknown
  Bacterial polypetide isolated from the Sargasso Sea
MSDKNRIIIFDTTMRDGEQSPGASMSLEEKLQISRVFDELGVDIIEAGFPIASPGDYEAVTEISKTLKRSIPAGLARATKKDIDACHESLRHAKNFRIHTFISTSPLHMKHKLNKSPEEV

SEQ ID NO: 115628 - protein, 266 aa, Unknown
  Bacterial polypetide isolated from the Sargasso Sea
YFGFESDIDTEQLYPSSKLLSQITGIDVQPNKAIVGANAFAHEAGIHQHGVLKNPLTYEIMTPQSVGIKSSNLVMGKHSGRFALGQRIQELGFDLNDIDLNNIFKEFKRLADLKKQVFDEDIEALVTHGIGRNSDKFILKDLIVTSGTNAIPTATITMKIDDKVFKKAGFGDGPVDAALNTIKEITGIDCTLTSYVVKAITGGTDAQGEVSVGVEKDGIRITGRGAHTDIVVASALAFLNALNRLEIRTKGLSLATPSQKAALGGV

SEQ ID NO: 115629 - protein, 256 aa, Unknown
  Bacterial polypetide isolated from the Sargasso Sea
MSKERLYIFDTTLRDGAQTQGVHFSIDEKTKIAHALDDLGVDYIEGGWPGANPSDTEFFQKGLDLKNSTFTAFGMTKKAGRSAENDPGLSAILNSNTKSVCLVGKSWDFHVDVALGITNEENLENIKETTKHFVKNNKEFMFDAEHFFDGYKANPKYALACIKAAYDNGAKWVVLCDTNGGTLPHEVTKIVKEVSEHIPGENLGIHAHNDTGNAVANSIAAVLSGARQIQGTINGLGERCGNANLMSIIPTFHLKK

SEQ ID NO: 115630 - protein, 114 aa, Unknown
  Bacterial polypetide isolated from the Sargasso Sea
SLEEKLQISRVFDELGVDVIEAGFPIASPGDFEAVTEISKTLKRSIPAGLARARKKDIDACHQALKYAKNFRIHTFISTSPLHMKHKLNKSPEEVLESIKESVKYARNFTDDIE

SEQ ID NO: 115631 - protein, 72 aa, Unknown
  Bacterial polypetide isolated from the Sargasso Sea
MTIFDTTLRDGEQSPGATLTGDEKVEIGKQLARLGVDVCEAGFPIASQGDFEAVKRVAETAGQMTEGRLSGQ

SEQ ID NO: 115632 - protein, 94 aa, Unknown
  Bacterial polypetide isolated from the Sargasso Sea
MYDAWAKNNFMTDNNRVFIFDTTMRDGEQSPGASMSLEEKIQIARVFDELGIDIIEAGFPIASPGDFEAVTEVSKILKNSIPAGLSRHSKKDID

SEQ ID NO: 115633 - protein, 30 aa, Unknown
  Bacterial polypetide isolated from the Sargasso Sea
MQDKLIIFDTTLRDGEQSPGASMTKDEKLR

SEQ ID NO: 115634 - protein, 101 aa, Unknown
  Bacterial polypetide isolated from the Sargasso Sea
MPDNNRVYIFDTTMRDGEQSPGASMSLEEKIQIARVFDELGIDIIEAGFPIASPGDFEAVTEVSKILKNSIPAGLSRHSKKDIDRCYEALKHAPRFRIHTF

SEQ ID NO: 115635 - protein, 93 aa, Unknown
  Bacterial polypetide isolated from the Sargasso Sea
MSNKDKVFIFDTTMRDGEQSPGASMSVEEKIQISRVFDEMGIDIIEAGFPISSPGDFEAVSAISKGLKNSIPCGLSRALKKDIDACHESLKFA

SEQ ID NO: 115636 - protein, 141 aa, Unknown
  Bacterial polypetide isolated from the Sargasso Sea
MTKIINDSASKYRPFKSIDIDNRTWPSNTITQSPMWCSVDLRDGNQALIEPMGEERKLRMFSLLIEIGFKEIEVGFPSASQTDFDFVRKIITENLIPNDVTIQALTQARPELIKKTFEALEGAKKAIVHVYNSTSTLQRKV

SEQ ID NO: 115637 - protein, 76 aa, Unknown
  Bacterial polypetide isolated from the Sargasso Sea
MSERVYIFDTTLRDGEQSPGASMNLDEKMQIAQILEEMEVDIIEAGFPIASNGDFEAVSEISKNIKNSTIAGFIKS

SEQ ID NO: 115638 - protein, 61 aa, Unknown
  Bacterial polypetide isolated from the Sargasso Sea
MSDKDRVFIFDTTMRDGEQSPGASMSLEEKIQIARVFDELGIDIIEAGFPIASPGDFEAVS

SEQ ID NO: 115639 - protein, 199 aa, Unknown
  Bacterial polypetide isolated from the Sargasso Sea
GKLSGRSAVRARLEEMGYDLSREDLNDAFSRFKDLADRKREITDRDLEAIVSEQVQLPEAKFQLSLVQVSCGNASKPTATITLLNTEDNTEDTSVSIGTGPVDAVCEALNKLARVPNELIEFSVKSVTEGIDALGEVTIRIRRDNKIYSGHSADTDVVVAAANAYVNALNRLVFSEKKSSIHPQFDNLENSEKTFLSNP

SEQ ID NO: 115640 - protein, 245 aa, Unknown
  Bacterial polypetide isolated from the Sargasso Sea
MSKERIHIFDTTLRDGAQTQGVDFSIDDKLKIANALDELGVDYIEGGWPGANPTDTEFFQKKLKLKNSVLTAFGMTKRSGRSADNDPGLSSILNSNTAAVCLVGKSWDFHVDVALEISNEENLDNIAESAKLFVKEKREFMFDAEHFFDGFKNNKEYALSCIKSAYDNGARWIVLCDTNGGTLPNEVSEIVGEVSKVIPGKNLGIHAHNDTGNAVANSLAAIHSGARQIQGTINGLGERCGNANL

SEQ ID NO: 115641 - protein, 99 aa, Unknown
  Bacterial polypetide isolated from the Sargasso Sea
MADKNRIIIFDTTMRDGEQSPGASMSLEEKLQISRVFDELGVDVIEAGFPIASPGDFEAVTEISKTLKRSIPAGLARATKKDIDACHQALKHAKNFRIH

SEQ ID NO: 115642 - protein, 37 aa, Unknown
  Bacterial polypetide isolated from the Sargasso Sea
MEKIQIFDTTLRDGEQSPGCSMSAGEKLLLARQLEKL

SEQ ID NO: 115643 - protein, 269 aa, Unknown
  Bacterial polypetide isolated from the Sargasso Sea
MTKDKIFIFDTTLRDGAQTEGVDFSIEDKNKMANVLSDIGIDYIEGGWPGANPIDTKFFSNPPKTNKSIFTAFGMTKKAGRSADNDPGLASLINANSPAVCVVGKTWDFHVKVALGIKNEENLENIKETAKHFVKNKKEFLFDAEHFFDGYKANPSYALDCLKQAFDSGARWLVLCDTNGGTLPNEIREIVSKVSKIIPGKNLGIHAHNDTENAVANSLAAVEAGARQIQGTINGLGERCGNANLMSIIPTLTLKKSFCDRYEINIKKD

SEQ ID NO: 115644 - protein, 125 aa, Unknown
  Bacterial polypetide isolated from the Sargasso Sea
MEDKNRIIIFDTTMRDGEQSPGASMSLEEKIQISRVFDELGIDIIEAGFPIASPGDFEAVTAISKILKKSIPAGLARHTKKDIDACHQALKSAKRFRIHTFISTSSLHMKHKLNKTPEQVIESIK

SEQ ID NO: 115645 - protein, 75 aa, Unknown
  Bacterial polypetide isolated from the Sargasso Sea
MSNETAKEKVVIFDTTLRDGEQSPGISLDVGEKLEIAGQLARLGVDYIEAGFPIASQGDFDAVHAIASNVSGPVI

SEQ ID NO: 115646 - protein, 105 aa, Unknown
  Bacterial polypetide isolated from the Sargasso Sea
MSDKNRVYIFDTTMRDGEQSPGASMSLEEKIQIARVFDELGIDIIEAGFPIASPGDFEAVTEVSKILKNSIPAGLSRHSKKDIDRCYEALKHAPRFRIHTFISTS

SEQ ID NO: 115647 - protein, 120 aa, Unknown
  Bacterial polypetide isolated from the Sargasso Sea
MSDKNRIIIFDTTMRDGEQSPGATMSLEEKIQIARCFDDLGIDVIEAGFPIASPGDFEAVTEISKVLKKSIPAGLSRATKKDIDACKDSLSHAKRFRIHTFISTSPLHMKHKLNKSPEEV

SEQ ID NO: 115648 - protein, 73 aa, Unknown
  Bacterial polypetide isolated from the Sargasso Sea
MSNKDRVFIFDTTMRDGEQSPGASMSLEEKIQIARVFDELGIDIIEAGFPIASPGDFEAVSEVSKILKNSIPA

SEQ ID NO: 115649 - protein, 107 aa, Unknown
  Bacterial polypetide isolated from the Sargasso Sea
MTDNNRVYIFDTTMRDGEQSPGASMSLEEKIQIARVFDELGIDIIEAGFPIASPGDFEAVTEVSKILKKSIPAGLARHSKKDIDRCYEALKHAPRFRIHTFISTSPL

SEQ ID NO: 115650 - protein, 84 aa, Unknown
  Bacterial polypetide isolated from the Sargasso Sea
MSNKDRVFIFDTTMRDGEQSPGASMSLEEKIQIARVFDELGIDIIEAGFPIASPGDFEAVSEVSKILKNSIPAGLSRHSVKDMI

SEQ ID NO: 115651 - protein, 47 aa, Unknown
  Bacterial polypetide isolated from the Sargasso Sea
MQKDTVKIFDTTLRDGEQVPGCKLETKQKLVIAERLDYLGVDIIEAG

SEQ ID NO: 115652 - protein, 116 aa, Unknown
  Bacterial polypetide isolated from the Sargasso Sea
MSNKDRVFIFDTTMRDGEQSPGASMSLEEKIQIARVFDELGIDIIEAGFPIASPGDFEAVSEVSKILKNSIPAGLSRHSVKDIDRAYEALKHAPRFRIHTFISTSPLHMKHKINMS

SEQ ID NO: 115653 - protein, 263 aa, Unknown
  Bacterial polypetide isolated from the Sargasso Sea
PFHTDIQTNLIMKASRLVSSITGFPVQPNKAIVGANAFAHEAGIHQDGMLKHSGTYEIMTPESVGLNKSSLVLGKHSGKHAFSEKLKELGYEPGDNALMELFGRFKDLADKKKEIFEEDLIALAEDRSASYDEHIKFISLEVNAGSVEKHEANLKIEMNDEIKTIKNSGNGPVDATFNAIKKLTLTDFKLKLYQVNAITAGTDAQGEVTVRLESDDLFSQAKGSDPDIIVASAKAYISALNRMLFKKTKSIVKKSAEIKIEGV

SEQ ID NO: 115654 - protein, 90 aa, Unknown
  Bacterial polypetide isolated from the Sargasso Sea
MDNPTDKYSAYMPVDLVNREWPSNTIKKAPIWCSVDLRDGNQALIEPMGSERKNRMFSLLCKLGFKEIEVGFPSASKTDYDFVRDLIENK

SEQ ID NO: 115655 - protein, 152 aa, Unknown
  Bacterial polypetide isolated from the Sargasso Sea
MSDKNRVFIFDTTMRDGEQSPGASMSLEEKIQIARVFDELGVDIIEAGFPIASPGDFEAVSEVSKILKNSIPAGLARHSKKDIDRCNEALKHAPRFRIHTFISTSPLHMKHKLNKTAEEVYNSIKEHVTYARNFTDDVEWSCEDGTRTDMDY

SEQ ID NO: 115656 - protein, 133 aa, Unknown
  Bacterial polypetide isolated from the Sargasso Sea
MTKIINKSVSKYKPFELIQLEDRNWPTKSIKKAPIWCSVDLRDGNQALIEPMGEERKLRMFKMLLDIGFREIEVGFPSASQTDFDFVRKIINENLIPAHVTIQALTQARPELIKRTYEALEGAPRAIVHVYNS

SEQ ID NO: 115657 - protein, 120 aa, Unknown
  Bacterial polypetide isolated from the Sargasso Sea
MSEKNKVFIFDTTMRDGEQSPGASMSLEEKIQIARVFDELGVDIIEAGFPIASPGDFEAVTEVSKILKNSIPAGLARHSKKDIDRCYEALKHAPRFRIHTFISTSPLHMKHKLNKTPEQV

SEQ ID NO: 115658 - protein, 96 aa, Unknown
  Bacterial polypetide isolated from the Sargasso Sea
MSTKDRVIIFDTTMRDGEQSPGASMSLEEKIQIARVFDELGIDVIEAGFPIASPGDFEAVTEVSKILKKSIPAGLSRHSKKDIDRAYEALKHAPKV

SEQ ID NO: 115659 - protein, 321 aa, Unknown
  Bacterial polypetide isolated from the Sargasso Sea
YIFDTTLRDGAQTQGVIFSIDDKLKIAKALDDLGVDYIEGGWPGANPTDTEFFQKKINLNNSVLTAFGMTKRTGRSADNDPGLSSILNSNTPAVCLVGKSWDFHVDVALGISNEENLENISESAKLFVKEKKEFMFDAEHFFDGFKNNKDYALSCIKSAYENGARWVVLCDTNGGTLPHEVSEIVNEVVKSVPGKNLGIHAHNDTGNAVANSLAAVLSGARQIQGTINGLGERCGNANLMSIIPTLHLKETYLKNFEINIKKENISKLTQCSRLLDEILNRKPNQHLPYVGAAAFSHKGGLHVSAVQKDPKTYEHINPESV

SEQ ID NO: 115660 - protein, 227 aa, Unknown
  Bacterial polypetide isolated from the Sargasso Sea
VHTAFSGSHQDAINKGMKAMETANSPLFEVPYLPIDPKDIGRDYEAIIRVNSQSGKGGVSYILENDYSIRLPKPAQAQFSQVIQKITDETSQEITPEEIWKAFQSTFIEQTGPFKLISFSSEAASRSNDLERMTAKVAFKGAEYEIKGTGNGPIAAFIQGIRDTFDLKFRLKDYTEHTRTAGSASEAAAYIELKVPDENGASVFGVGIDTSITLAPIKAVISALNRI

SEQ ID NO: 115661 - protein, 98 aa, Unknown
  Bacterial polypetide isolated from the Sargasso Sea
MTDKNRIIIFDTTMRDGEQSPGASMSLEEKLQISRVFDELGVDVIEAGFPIASPGDFEAVTEISKTLKNSIPAGLARATKKDIDACHQALKHAKNFRI

SEQ ID NO: 115662 - protein, 209 aa, Unknown
  Bacterial polypetide isolated from the Sargasso Sea
ADTVGCLTPTNIKGFVIQMVSELDIPIHVHCHNDFGMATANALSALEAGAQCVDVAINGLGERCGLPPLAEVVIALTNIYKVNGNWNLGLIPELSELVKAFSKLDSNANQPIIGKNAFTHKSGLHVKAVVKEPESYEAISPESVHRKRHFVIDKYTGNFALNNKLIHMGISVTPKELDTILIEIKSHPEKLNWDDKDLISLTNSMGIKS

SEQ ID NO: 115663 - protein, 108 aa, Unknown
  Bacterial polypetide isolated from the Sargasso Sea
MDNPTDKYSAYKPVDLFNREWPSNTIKKAPIWCSVDLRDGNQALIEPMGSERKNRMFSLLCKLGFKEIEVGFPSASKTDYDFVRDLIENKKIPSDVNIQVLTQAREEL

SEQ ID NO: 115664 - protein, 312 aa, Unknown
  Bacterial polypetide isolated from the Sargasso Sea
KIYIFDTTLRDGAQTEGVDFSLEDKNKIANVLADIGIDYIEGGWPGANPVDTKFFSNPPKIDKSKFTAFGMTKKTGRSADNDPGLADLMNASSSAVCVVGKSWDFHVKTALGIKNEENLENIKETTKHFVKNGKEFLFDAEHFFDGYKSNPDYAINCLKHAYDNGARWVVLCDTNGGTLPNEIRDIVSSVTKIIPGENLGIHAHNDTENAVANSLAAVECGVRQIQGTINGLGERCGNANLISLIPTLCLKKTFSDKFDVNVKKNKLTSLTECSRLLDEILNRKPNRNMPYVGASAFSHKGGLHVSAVKKNP

SEQ ID NO: 115665 - protein, 290 aa, Unknown
  Bacterial polypetide isolated from the Sargasso Sea
MSKERLYIFDTTLRDGAQTQGVHFSLDEKIKIAHALDNLGVDYIEGGWPGANPTDTQFFQKKLKLKNSSFTAFGMTKKSGRSAENDPGLSAILNSNTNSVCLVGKSWDFHVDVALGISNEENLENISETTMHFVKNKKEFMFDAEHFFDGYKANPKYALKCIKAAYDKGARWIVLCDTNGGTLPHEVSKIVKEVSEHIPGNNLGIHAHNDTGNAVANSIAAVLSGARQVQGTINGLGERCGNANLMSLIPTFYLKKEFNDSFEINIKEKNIKNITQCSRLLDEILNRKPN

SEQ ID NO: 115666 - protein, 273 aa, Unknown
  Bacterial polypetide isolated from the Sargasso Sea
RTGNMDLVTAGMNLYSQGIDPQIDFSRMKEIVALVEEITDIQTHPRHPYAGDLVFSAFSGSHQDAIRKCLARYQEGDIWTAAYLPIDPADVGRRYEEVVRINSQSGKGGVAHVLERDFGIDLPRWLQQELAGVVQGDAEEDGGEITSERVHRRFNSDYLNVPMGWVLRSYDLNRSNEQVQAQISIGDDSQPVTLLSGRGDGAMSALVDALNRRIGGEVKVVSFDEYSLGDNTEANAMACVRVQVGDTTQSAVAMAADTTAAALQAILSAVGRV

SEQ ID NO: 115667 - protein, 68 aa, Unknown
  Bacterial polypetide isolated from the Sargasso Sea
MSERVYIFDTTLRDGEQSPGASMNLDEKMQIAQILEEMKVDIIEAGFPIASNGDFEAVSEISKNIKNS

SEQ ID NO: 115668 - protein, 256 aa, Unknown
  Bacterial polypetide isolated from the Sargasso Sea
IQTEKLTKTSKLFSAVTGFPVQFNKAIVGKNAFAHEAGIHQDGMLKNNKTYEIMTPESVGVSESNLVMGKHSGRHAFKQKIIELGYSINDNVIEEAFENFKNLADKKKNIYDEDIIAIIDDQVIRVNDSILLQDLQVVAGTKGPQKAEISLLIDDEPKKVTSTGDGPVDAIFNGLSQLVPHKGKLLLYQVHAVTEGTDAQAEVSVRLAEDGKTVVGLGAHTDTLVASAKAYINALNKLIIKREKSAPASMSGVTGV

SEQ ID NO: 115669 - protein, 94 aa, Unknown
  Bacterial polypetide isolated from the Sargasso Sea
MTKIINNSTSKYLPFESIDLKDRTWPDNAILTSPLWCSVDLRDGNQALIEPMGEERKLRMFKLLLEIGFKEIEVGFPSASQTDFDFVRKIIEDN

SEQ ID NO: 115670 - protein, 250 aa, Unknown
  Bacterial polypetide isolated from the Sargasso Sea
TQQDFLVQYNKAIVGKNAFAHEAGIHQDGMLKNRQTYEIMTPESVGVKQTSLVMGKHSGRHAFKDKLNSLGYPDLTDDIVSNAFAKFKVLADKKKHVYDEDIIALVDDSLITDNKVNAINLKSLKVYAGTGEPQKAEMTLDVYGEVKQASETGDGPVDAIFKCIKILYPHDVNLQLYQVHAVTEGTDAQATVSVKIEENGKTTVGQAADTDTLVASANAYINALNKMIIKRDKTAPEQQQNYETEKMKGI

SEQ ID NO: 115671 - protein, 244 aa, Unknown
  Bacterial polypetide isolated from the Sargasso Sea
AYNKAIVGKNAFAHEAGIHQDGMLKNRQTYEIMTPESVGVKQTSLVMGKHSGRHAFKDKLISLGYVDVTDDVISNAFGKFKVLADKKKHVYDEDIIALVDDSLIIDNKVNAISLKTLKVFAGTGEPQRADMTLDVFGEVKKASETGDGPVDAIFKCIKKLYPHEVNLQLYQVHAVTEGTDAQATVSVRIEENGKTTVGQAADTDTLVASANAYINALNKMIIKRDKTAPGYSPEQKKEEKVKGI

SEQ ID NO: 115672 - protein, 237 aa, Unknown
  Bacterial polypetide isolated from the Sargasso Sea
MKKCFAHESGIHQDGMLKNRQTYEIMTPESVGVKQTSLVMGKHSGRHAFKDKLNSLGYVDVTDDVIENAFGKFKILADKKKHVYDEDIIALVDDSLIIDNKVNAINLKSLKVFAGTGEPQRAEMTLDVFGEVKKASETGDGPVDAIFKCIKKLYPHDVNLQLYQVHAVTEGTDAQATVSVRIEENGKTTVGQAADTDTLVASANAYINALNKMIIKRDKTAPGYSPEQKKEEKVKGI

SEQ ID NO: 115673 - protein, 94 aa, Unknown
  Bacterial polypetide isolated from the Sargasso Sea
MEDKNRIIIFDTTMRDGEQSPGASMSLEEKIQISRVFDELGIDVIEAGFPIASPGDFEAVTAISKILKKSVPAGLARHTKKDIDACNESLRSAK

SEQ ID NO: 115674 - protein, 139 aa, Unknown
  Bacterial polypetide isolated from the Sargasso Sea
MSNKDRVFIFDTTMRDGEQSPGASMSLEEKIQIARVFDELGIDIIEAGFPIASPGDFEAVSEVSKILKNSIPAGLSRHSVKDIDRAYEALKHAPRFRIHTFISTSPLHMKHKLNMSPEDVYESIGKHVAYARKFTDDVE

SEQ ID NO: 115675 - protein, 112 aa, Unknown
  Bacterial polypetide isolated from the Sargasso Sea
MQNQYMSDKNRIIIFDTTMRDGEQSPGASMSLEEKLQISRVFDELGVDIIEAGFPIASPGDYEAVTEISKTLKNSIPAGLARATKKDIDACHESLKHAKNFRIHTFISTSPL

SEQ ID NO: 115676 - protein, 161 aa, Unknown
  Bacterial polypetide isolated from the Sargasso Sea
MSKTDRVIIFDTTMRDGEQSPGASMSLEEKIQIARVFDELGIDVIEAGFPIASPGDFEAVTEVSKILKNSIPAGLSRHSKKDIDRAYEALKHAPRFRIHTFISTSPLHMKHKLNMSPEDVYESIGQHVSYARKFTDDVEWSCEDGTRTDMDYMCKTVELAI

SEQ ID NO: 115677 - protein, 277 aa, Unknown
  Bacterial polypetide isolated from the Sargasso Sea
MSKEKLYIFDTTLRDGAQTQGVDFSIDDKLKISNALDELGVDYIEGGWPGANPTDTEFFQKKIKLNNSVLTAFGMTKKSGRSADNDPGLSAILNSNTSAVCLVGKSWDFHVDIALGISNEENLENISESAKLFVKEKKEFMFDAEHFFDGFKNNKEYALSCIKSAYDNGARWIVLCDTNGGTLPNEISEIVSEVVKSVPGKNLGIHAHNDTGNAVANSLAAVLSGARQIQGTINGLGERCGNANLMSIIPTLYLKQTYNQNYEIKIRKENINKLTQC

SEQ ID NO: 115678 - protein, 114 aa, Unknown
  Bacterial polypetide isolated from the Sargasso Sea
MTDKNRVYIFDTTMRDGEQSPGASMSLEEKIQIARVFDELGIDIIEAGFPIASPGDFEAVTEVSKILKKSIPAGLARHSKKDIDRCYEALKHASRFRIHTFISTSPLHMKHKLN

SEQ ID NO: 115679 - protein, 296 aa, Unknown
  Bacterial polypetide isolated from the Sargasso Sea
MGGTLPNEISKIVSEVIKYIPGNNLGIHAHNDTENAVANSLAAVQAGARQVQGTINGLGERCGNANLMSLIPSFFLKKDFSDKFELSIKRENLKNLTQCSRLLDEILNRKPNKHLPYVGASAFSHKGGMHVSAVQKDPKTYEHVNPEEVGNSRNIVVSDQSGQSNIMSRLNLIGINVQKSDPKIKKLLDEVKDREFIGYSYDGADASFELLARRLMGEIPRYISINEYDVSVKKDKTGEIISYAKAKLEVDGNEILCEGQGNGPVNALDNAIRKNVKKLAKYSKYLKDLRLVDYKS

SEQ ID NO: 115680 - protein, 52 aa, Unknown
  Bacterial polypetide isolated from the Sargasso Sea
MTEKIYIFDTTLRDGEQSPGASMNLDEKLQIAEVLDAMKVDIIEAGFPIASN

SEQ ID NO: 115681 - protein, 260 aa, Unknown
  Bacterial polypetide isolated from the Sargasso Sea
MSKEQLYIFDTTLRDGAQTQGVDFSIDDKEKISSALDKLGVDYVEGGWPGANPTDTEFFNKDHNFKSTKLTAFGMTKKSEHSAENDPMLSSLINSKSTSVCLFGKSWDFQVDVALGISNEQNLINISESTKHIVKSGKEFMFDAEHFFDGYKANPEYAMSCLKAAFDNGARWIVLCDTNGGTLPHEITEIVSEVCKQIPGKNLGIHAHNDTENAVANSLAAVQAGVRQVQGTINGLGERCGNANLMSLIPSFFFKERFFR

SEQ ID NO: 115682 - protein, 131 aa, Unknown
  Bacterial polypetide isolated from the Sargasso Sea
MEDKNRIVIFDTTMRDGEQSPGASMSLEEKTQISRVFDELGIDVIEAGFPIASPGDFEAVSAISRILKKSIPAGLARHTKKDIDACYESLKSAKRFRIHTFISTSSLHMKHKLNKTPEQVVESIKEHVTYA

SEQ ID NO: 115683 - protein, 148 aa, Unknown
  Bacterial polypetide isolated from the Sargasso Sea
MSKQNNLIKIFDTTMRDGEQSPGASMNIEEKLKIASALEHLGVDIIEAGFPAASKGDFAAVSEISKKIKNTSICALSRASKNDIQSAADALKGAVAPRIHTFISTSELHMKHKLQLDSEEVYQKVIESVSFARNLCDDVEWSCEDGTR

SEQ ID NO: 115684 - protein, 117 aa, Unknown
  Bacterial polypetide isolated from the Sargasso Sea
MTDKNRVYIFDTTMRDGEQSPGASMSLEEKIQIARVFDELGVDIIEAGFPIASPGDFEAVSEISKILKNSIPAGLSRHSKKDIDRCYEALRHAPRFRIHTFISTSPLHMKHKLNKSP

SEQ ID NO: 115685 - protein, 75 aa, Unknown
  Bacterial polypetide isolated from the Sargasso Sea
MTDNNRVYIFDTTMRDGEQSPGASMSLEEKIQIARVFDELGIDIIEAGFPIASPGDFEAVTEVSKILKKSIPAGL

SEQ ID NO: 115686 - protein, 164 aa, Unknown
  Bacterial polypetide isolated from the Sargasso Sea
MSSKDRVIIFDTTMRDGEQSPGASMSLEEKIQIARVFDELGIDIIEAGFPIASPGDFEAVTEVSKILKKSIPAGLSRHSKKDIDRAYEALKHAPRFRIHTFISTSPLHMKHKLNMSPEDVYESIGQHVCYARKFTDDVEWSCEDGTRTDMDFMCKTVELAIKNG

SEQ ID NO: 115687 - protein, 293 aa, Unknown
  Bacterial polypetide isolated from the Sargasso Sea
MIKESLQAASARGREPMFDCEHYFDGFKSNSDFALECVKAAFDGGAHWIILCDTNGGTLTDDVFEIVSKTKSFLPKANIGIHCHNDIGLAVANSIAAIKAGARQVQGTINGLGERCGNADLITLIPTLMLKLGYKTSIPEEKISKLLSLSRMVDDRLNLVPNSHAPYVGSAAFAHKGGLHASAAQKDPRTYEHIPPETVGNERSFVISDQIGRSNVLARFSEVGIEIPADDIRIEKLIREIKEKEYNGWSFDSAEASFELLARKALGQVPDYFRIGRFRVTDERRFNAKGELG

SEQ ID NO: 115688 - protein, 132 aa, Unknown
  Bacterial polypetide isolated from the Sargasso Sea
MTDKNRVYIFDTTMRDGEQSPGASMSLEEKIQISRVFDELGVDIIEAGFPIASPGDFEAVSEISKILKNSIPAGLSRHSKKDIDRCYEALKHASRFRIHTFISTSPLHMKHKLNKSPDEVYESIKEHVTYAR

SEQ ID NO: 115689 - protein, 82 aa, Unknown
  Bacterial polypetide isolated from the Sargasso Sea
MEKIRFLDTTLRDGEQSPGCSMSASEKLTLAKQLERLGVNTIEAGFAASSPGDFDSVRNIGQQIQNSTIVSLCRASKNDIDA

SEQ ID NO: 115690 - protein, 228 aa, Unknown
  Bacterial polypetide isolated from the Sargasso Sea
MGTGVRGPQSGHRVVSFQYSPESFSSTEVEFAVEVCDAVIDEWRPAARPMILNLPATVEVSTPNVFADQVEWFCRHLKARPEVSLSIHTHNDRGCGVAAAELAVLAGADRIEGTLLGNGERTGNMDIVTMAMNLYSQGIDPELNLADMDAIVATVGACTQIALHPRHPYAGELVYTAFSGSHQDAIRKSLAAEKPDHYWDVAYLPIDPADLGRSYEAVIRINSQSGKG

SEQ ID NO: 115691 - protein, 232 aa, Unknown
  Bacterial polypetide isolated from the Sargasso Sea
MSKEKLYIFDTTLRDGAQTQGVDFSIDDKEKISSALDKLGVDYVEGGWPGANPTDTEFFNKDHNFKSTKLTAFGMTKKSEHSAENDPMLSSLINSKSTSICLFGKSWDFQVDVALGISNEENLINISESTKHIVKSGKEFMFDAEHFFDGYKSNPKYAMSCLKAAFDNGARWIVLCDTNGGTLPHEVTKIVSEVGKEIPGKNLGIHAHNDTENAVANSLAAVQAGARQVQGT

SEQ ID NO: 115692 - protein, 106 aa, Unknown
  Bacterial polypetide isolated from the Sargasso Sea
MDNPIDKYSAFIPIELKNRKWPNKLIDKAPIWCSVDLRDGNQALIEPMGSERKNRMFNLLCSLGFKEIEIGFPSASKTDFDFVRDLIENKKIPLDVNIQVLTQARE

SEQ ID NO: 115693 - protein, 103 aa, Unknown
  Bacterial polypetide isolated from the Sargasso Sea
GSAVGTGPVDAVCRALFDLAGVPNELIEFSVKSVTEGIDAMGDVTIRLRRNGALYSGHAADTDVVVAAAMAFVNALNRLVAGEERQSLHPQKDPVVLETRPTL

SEQ ID NO: 115694 - protein, 112 aa, Unknown
  Bacterial polypetide isolated from the Sargasso Sea
MSVNRFDHTKYKPFPQIEIEKRTWPDKVITEAPIWCSVDLRDGNQALIEPMSVGQKKKMFELLVEVGFKEIEVGFPAASQPDFDFVRSLIEEDKVPDDVTIQVLTPARPELI

SEQ ID NO: 115695 - protein, 117 aa, Unknown
  Bacterial polypetide isolated from the Sargasso Sea
LEEVVMALKTRADLYKCQSRIATQRLVPTSRLVANITGIQVPRNKAIVGRNAFAHEAGIHQDGMLKDRSTYEIMRPEDVGLERTDLVLGKHSGRAALADRAAVLGYQLTGEQLQTVF

SEQ ID NO: 115696 - protein, 100 aa, Unknown
  Bacterial polypetide isolated from the Sargasso Sea
VSEISKNIENSTIAGLARAKLPDIDRAWEAVKHAKSPRIHTFIATSPIHMKYKLMKTEEEVLESIKHTVTYARNLCDNIEWSCEDGGRSNLDFLYQCIEL

SEQ ID NO: 115697 - protein, 273 aa, Unknown
  Bacterial polypetide isolated from the Sargasso Sea
MTLKVKKDLMPYHTDIKTESIMKASRLVSSITGFPVQPNKAIVGANAFAHEAGIHQDGMLKHSGTYEIMTPESVGLNKSSLVLGKHSGKHAFSEKLKELGYEPGDNALMELFGRFKDLADKKKEIFEEDLIALAEDRSASYDEHIKFVSLEVNAGSVEKPEANLKIDMENQIKSVKINGNGPVDATFNAIKKLTSTEFKLKLYQVNAITAGTDAQGEVTVRLEDDDLSSQAKGSDPDIIVASAKAYINALNRLIFKKSKSIKENSSNLQIRGV

SEQ ID NO: 115698 - protein, 140 aa, Unknown
  Bacterial polypetide isolated from the Sargasso Sea
ARVFDELGIDIIEAGFPIASPGDFEAVSEVSKILKNSIPAGLSRHSIKDIDRAYEALKHAPRFRIHTFISTSPLHMKHKLNMSPEDVYESIGKHVSYARKFTDDVEWSCEDGTRTDMDYMCKTVELAIKNGATTINIPDT

SEQ ID NO: 115699 - protein, 66 aa, Unknown
  Bacterial polypetide isolated from the Sargasso Sea
MTDKNRVYIFDTTMRDGEQSPGASMSLEEKLQISRVFDELGVDIIEAGFPIASPGDFEAVSEVSKI

SEQ ID NO: 115700 - protein, 143 aa, Unknown
  Bacterial polypetide isolated from the Sargasso Sea
SEQVQLPEALFQLKLVQVSCGTSLMPTATVTVVGEDGEEKTAVSLGTGPVDAVVRALDSLTEEPNELIEFSVKSVTEGIDALGEVTIRIRRDGNLFSGHSADTDVVVAAAQAYINALNRLVAAHGRKSIHPQHDLAKVDKKGI

SEQ ID NO: 115701 - protein, 188 aa, Unknown
  Bacterial polypetide isolated from the Sargasso Sea
MPASWSTRQFSGSHQDAIRKSLAAEKPDHYWDVAYLPIDPADLGRSYEAVIRINSQSGKGGVTYLLERDLGLQLPRWLQIDFSRRVQAEAEASSSEISPEQIRTLFEQHYLEPAHGYRIGRFQLGHDSQESLRLELQTPHGTLQLCGEGEGAITALVNGWQRQTGMHIDVLDYSEHALTAGTEIPRRR

SEQ ID NO: 115702 - protein, 40 aa, Unknown
  Bacterial polypetide isolated from the Sargasso Sea
MNDHLYIFDTTLRDGEQSPGASMTAAEKIRIARQLEKTQV

SEQ ID NO: 115703 - protein, 78 aa, Unknown
  Bacterial polypetide isolated from the Sargasso Sea
MSSKDKVFIFDTTMRDGEQSPGASMSVEEKIQISRVFDEMGIDIIEAGFPISSPGDFEAVSAISKSVKNSIPCGLARA

SEQ ID NO: 115704 - protein, 148 aa, Unknown
  Bacterial polypetide isolated from the Sargasso Sea
MSNKDKVFIFDTTMRDGEQSPGASMSLEEKIQIARVFDELGIDIIEAGFPIASPGDFEAVSEVSKILKNSIPAGLSRHSVKDIDRAYEALKHAPRFRIHTFISTSPLHMKHKLNMSPEDVYESIGKHVAYARKFTDDVEWSCEDGTKT

SEQ ID NO: 115705 - protein, 158 aa, Unknown
  Bacterial polypetide isolated from the Sargasso Sea
DRDLEAIVSEQVQLPEAKFQLSLVQVSCGNASKPTATITLLNTEDNTEDTAVSIGTGPVDAVCETLNKLAKVPNELIEFSVKSVTEGIDALGEVTIRIRKDNKIYSGHSADTDVVVAAANAYVNALNRLIFSEKKNSIHPQFDNLENSEKTFLSNPAN

SEQ ID NO: 115706 - protein, 141 aa, Unknown
  Bacterial polypetide isolated from the Sargasso Sea
MSDNNRVYIFDTTMRDGEQSPGASMSLEEKIQIARVFDELGIDIIEAGFPIASPGDFEAVTEVSKILKNSIPAGLSRHSKKDIDRCYEALKHAPRFRIHTFISTSPLHMKHKLNKSPDEVYEAIKEHVTYARNYTDDVEWS

SEQ ID NO: 115707 - protein, 39 aa, Unknown
  Bacterial polypetide isolated from the Sargasso Sea
MTDKVLIFDTTLRDGEQSPGASMNQEEKLSIARLLEELK

SEQ ID NO: 115708 - protein, 248 aa, Unknown
  Bacterial polypetide isolated from the Sargasso Sea
MSKEQLYIFDTTLRDGAQTQGVDFSIDDKEKISSALDKLGVDYVEGGWPGANPTDTEFFNKDHNFKSTKLTAFGMTKKSEHSAENDPMLSSLINSKSTSVCLFGKSWDFQVNIALGISNEQNLMNISESTKHIVKSGKEFMFDAEHFFDGYKANPEYAMSCLKAAFDNGARWIVLCDTNGGTLPHEITEIVSKVSKQIPGKNLGIHAHNDTENAVANSLAAVQVGVRQVQGTINGLGERCGNANLMSL

SEQ ID NO: 115709 - protein, 136 aa, Unknown
  Bacterial polypetide isolated from the Sargasso Sea
MIDKNKIIIFDTTMRDGEQSPGASMSLEEKLQISRVFDELGVDIIEAGFPIASPGDFEAVTEISKTLKRSIPAGLARATKKDIDACHQALKHAKNFRIHTFISTSPLHMKHKLNKSPEEVLESIKESVAYARKFTD

SEQ ID NO: 115710 - protein, 233 aa, Unknown
  Bacterial polypetide isolated from the Sargasso Sea
FAHESGIHQDGMLKNRNTYEIMTPESVGVKQTSLVMGKHSGRHAFKDKLTSLGYKDVTDDVIESAFGKFKILADKKKHVYDEDIIALVDDSLIIDNKVNAINLKSLKVYAGTGEPQKAEMILDVYGDIKNAAETGDGPVDAIFKCIKKLYPHDVKLQLYQVHAVTEGTDAQATVSVRIEENGKTTVGQAADTDTLVASANAYINALNKMIIKRDKTAPGQTTEQSFEQKVRGI

SEQ ID NO: 115711 - protein, 260 aa, Unknown
  Bacterial polypetide isolated from the Sargasso Sea
MNKEKIYIFDTTLRDGAQTEGVDFTIEDKNKIAKVLSEIGVDYIEGGWPGANPVDTKFFSQPPKMQDTLFTAFGMTKKTGRSADNDPGLASLINANTPAVCVVGKSWDFHVKIALGIKEKENLENIKETTKHFVKNKKEFLFDAEHFFDGYKANSEYALNCLRQAYDNGARWVVLCDTNGGTLPNEIREIVSKVSKIIPGKNLGIHAHNDTENAVANSLAAVECGVRQIQGTINGLGERCGNANLMSIIPQFMSKKIFQR

SEQ ID NO: 115712 - protein, 82 aa, Unknown
  Bacterial polypetide isolated from the Sargasso Sea
MTDNNRVYIFDTTMRDGEQSPGASMSLEEKIQIARVFDELGIDIIEAGFPIASPGDFEAVTEVSKILKKSIPAGLARHQKKI

SEQ ID NO: 115713 - protein, 102 aa, Unknown
  Bacterial polypetide isolated from the Sargasso Sea
MTKNQIIIFDTTLRDGEQSPGASMSLEEKIKIAHAFQDLGVDVMEAGFPAASQGDFEAVTEISKIFKTTTPCGLARALKNDLEKCVESLKHAKNFRIHTFVS

SEQ ID NO: 115714 - protein, 129 aa, Unknown
  Bacterial polypetide isolated from the Sargasso Sea
MDKTNKKYKPYKPVSKENRSWPSKVIENAPIWCSVDLRDGNQALIEPMGDERKKRMFNLLCKIGFKQIEIGFPAASQTDFDFTRYLINEKVIPTDVTIQVLTQARPEIIKRTFEALDGAPNAILHFYNS

SEQ ID NO: 115715 - protein, 170 aa, Unknown
  Bacterial polypetide isolated from the Sargasso Sea
MSSKDRVIIFDTTMRDGEQSPGASMSLEEKIQIARVFDELGIDIIEAGFPIASPGDFEAVTEVSKILKKSIPAGLSRHSKKDIDRAYEALKHASRFRIHTFISTSPLHMKHKLNMSPEDVYESIGQHVAYARKFTDDVEWSCEDGTRTDMDFMCKTVELAIKNGATTINI

SEQ ID NO: 115716 - protein, 43 aa, Unknown
  Bacterial polypetide isolated from the Sargasso Sea
EGIEAAIAAGATTINIPDTVGYTTPSEFGDLIAGINRHVPNIG

SEQ ID NO: 115717 - protein, 304 aa, Unknown
  Bacterial polypetide isolated from the Sargasso Sea
VSEVSKQMSWEKILGIHAHNDTENAVANSLAAVQAGARQVQGTINGLGERCGNANLMSLIPSFFLKKDFSDKFDLSIKRENLKNLTQCSRLLDEILNRKPNKHLPYVGASAFSHKGGMHVSAVQKDPKTYEHVIPEEVGNSRNIVVSDQSGQSNIMSRLNSIGIKVEKSDPKIKKLLDEVKDREFIGYSYDGADASFELLARRLMGEIPRYISINEYDVSVKKDNAGEIISYAKAQLEVDGDKIMCEGQGNGPVNALDNAIRKNVNKLAKYSEYLKDLRLVDYKVRILNTGTEAVTRVSIESTD

SEQ ID NO: 115718 - protein, 76 aa, Unknown
  Bacterial polypetide isolated from the Sargasso Sea
MTEKIYIFDTTLRDGEQSPGASMNLDEKLQIAEVLDSMRVDIIEAGFPIASNGDYEAVCEVSKNVKHSTIAGLARA

SEQ ID NO: 115719 - protein, 303 aa, Unknown
  Bacterial polypetide isolated from the Sargasso Sea
MSKDKIYIFDTTLRDGAQTEGVDFSIEDKNKIANVLSEIGVDYIEGGWPGANPIDTKFFSHPPKMNKSIFTAFGMTKKTGRSAENDPGLASLMNANSPAVCVVGKTWDFHVKIALGIKNEENLENIRETTKHFVKNNKEFLFDAEHFFDGYKANPKYALDCLKHAYDSGARWLVLCDTNGGTLPNEIREIVSKVSKEIPGKNLGIHAHNDTENAVANSLAAVESGVRQIQGTINGLGERCGNANLMSIIPTLCLKKSFNDKFDINMKKEKLSSLTECSRLLDEILNRKPNKNMAYVGASAFSH

SEQ ID NO: 115720 - protein, 63 aa, Unknown
  Bacterial polypetide isolated from the Sargasso Sea
MKDSREIIIFDTTLRDGEQAPGCSMTIGEKLKIAHALKELNVDVIEDGFAAASPGDYEAGMQC

SEQ ID NO: 115721 - protein, 105 aa, Unknown
  Bacterial polypetide isolated from the Sargasso Sea
CRSPHPHKDRGTAGAASEYGTRAGAERVEGTLQGNGERTGKVDKVTIAQKTLTQGIDPKLDFSNINSVMREGEYCNQLPVHPRHPYAGDLVFTAFSGSHQDAIKK

SEQ ID NO: 115722 - protein, 80 aa, Unknown
  Bacterial polypetide isolated from the Sargasso Sea
MSKKDRVFIFDTTMRDGEQSPGASMSVEEKIQISRVFDEMGIDIIEAGFPISSPGDFEAVSAISKSLKNSIPCGLSRALK

SEQ ID NO: 115723 - protein, 83 aa, Unknown
  Bacterial polypetide isolated from the Sargasso Sea
MEDKNRIIIFDTTMRDGEQSPGASMSLEEKIQISRVFDELGIDVIEAGFPIASPGDFEAVTAISKILKKSVPAGLARHTKKEY

SEQ ID NO: 115724 - protein, 182 aa, Unknown
  Bacterial polypetide isolated from the Sargasso Sea
MSREDLNDAFARFKDLADRKREITDRDLEAIVSEQVQLPEAKFQLSLVQVSCGNASKPTATISLLNTEDNTEDTAVSIGTGPVDAVCEALNKLAKVPNELIEFSVKSVTEGIDALGEVTIRIRRDNKIYSGHSADTDVVVAAANAYVNALNRLVFSEKKNSIHPQFDNLENSNNTYISNPAN

SEQ ID NO: 115725 - protein, 228 aa, Unknown
  Bacterial polypetide isolated from the Sargasso Sea
MQHGAITKYRPFPKIELPDRQWPDKRIERAPIWASVDLRDGNQALAIPMNIGEKLEMFQMLVAIGFKEIEVGFPSASDTEFQFIRRLVEDRLIPEDVTLQVLVQAREHLIRRTFESLEGVPSAIVHLYNSTSPLQRRVTFGKSKAEILQIAVEGTRLVKSLVDTLPGTRIRLEYSPESFSDTEVDYALEVCEAVMEVWQPTAEEPIVLNLPATVEVATTQRPMPNQIE

SEQ ID NO: 115726 - protein, 534 aa, Unknown
  Bacterial polypetide isolated from the Sargasso Sea
MKKEKIYIFDTTLRDGAQTEGVDFTIEDKNKIAKVLSDIGVDYIEGGWPGANPVDTKFFSKPPKMHKTQFTAFGMTKKTGRSADNDPGLASLVNANTPAVCVVGKSWDFHVKVALGIKNEENLDNIKETTKHFVKNNKEFLFDAEHFFDGYKANSEYAMSCLKQAYDNGARWVVLCDTNGGTLPNEVREIVSKVSQVIPGKNLGIHAHNDTENAVANSLAAVECGARQIQGTINGLGERCGNANLISIIPNLCLKKSFSDKFEINIKKEKLSSLTDCSRLLDEILNRKPNKNMAYVGASAFSHKGGLHVSAVKKDPKTYEHIDPKLIGNHRNIIISNQSGRSNILSRLEKYGVKIDSKDSKVQKILDEVKDREFSGYSYDGADASFELLANRLLGKVPEYLKVKSYDVNVSKSDKIKTKASVVFLIDSKEIECHGEGNGPVNALDNAIRSNFKKVTKYYNFFSDLKLLDYKVRILNTGTEATTRVLIESTDKKGISWFTVGVSPNIIEASFKALIDSLDYKLYKEKAPANLNEK

SEQ ID NO: 115727 - protein, 336 aa, Unknown
  Bacterial polypetide isolated from the Sargasso Sea
MKKEKIYIFDTTLRDGAQTEGVDFSIEDKNKIAKVLSEIGVDYIEGGWPGANPVDTKFFSNPPKMNKTLFTAFGMTKKTGRSVENDPGLASLMNANTSTVCVVGKSWDFHVKVALGINNEENLENIRETTKHFVKNKKEFLFDAEHFFDGYKANPEYAVNCLKQAYENGARWVILCDTNGGTLPNEIREIVSKVSKIIPGSNLGIHAHNDTENAVANSLAAIECGARHVQGTINGLGERCGNANLMSIIPTLCLKKSFSDKYEINIDKKKLSSLTECSRLLDEILNRKPNKNMAYVGASAFSHKGGLHVSAVKKDPKTYEHIDPKLIGNHRNIIVS

SEQ ID NO: 115728 - protein, 512 aa, Unknown
  Bacterial polypetide isolated from the Sargasso Sea
VHFSLDEKTKIAHALDALGVDYIEGGWPGANPSDTEFFQKGLNLKNSTFTAFGMTKKAGRSAENDPGLSSILNSNTTSVCLVGKAWDFHVDVALGISKEENLENISETTKHFVKNNKEFMFDAEHFFDGYKSNPKYALECIKAAYDNGAKWIVLCDTNGGTLPHEVTEIVKEVSKNVPGKNLGIHAHNDTGNAVANSIAAVLSGARQIQGTINGLGERCGNANLMSIIPTFHLKKELSDKFEINIKEKNIKHITQCSRLLDEILNRKPNKHLPYVGAAAFSHKGGLHVSAVQKDPKTYEHIDPSDVGNARNIVVSDQSGKSNILSRLKTIGIEIEENDPKVKKLLEEVKDREFIGYSYDGADASFELLARRVIGEIPRYISIKEYDVSVSKNDQDKIISRAKAKLEVDGEQIVCEGEGNGPVHALDNAIRKNVTRLEKYSEYLKDLKLVDYKVRILNTGTEATTRVSIESTDSKGKNWFTIGVSPNIIDASFKALIDSLDFKLFKDKAPASK

SEQ ID NO: 115729 - protein, 533 aa, Unknown
  Bacterial polypetide isolated from the Sargasso Sea
MSKEKIYIFDTTLRDGAQTQGVDFSIDDKLKIAKSLDDLGVDYIEGGWPGANPTDTEFFQKKIKLNNSVLTAFGMTKRSGRSADNDPGLSSILNSNTPAVCLVGKSWDFHVDVALGITNDENLENISESAKLFVKEKKEFMFDAEHFFDGFKNNKEYALSCIKSAYENGARWIVLCDTNGGTLPNEITEIVGEVVKTVPGKNLGIHAHNDTGNAVANSLAAVLSGVRQIQGTINGLGERCGNANLMSIIPTLHLKKTYTNNYEINIKKDNINKLTQCSRLLDEILNRKPNQHLPYVGAAAFSHKGGLHVSAVQKDPKTYEHINPLEVGNVRNIVVSDQSGRSNIVSRLNSLGIHFKQDDPKIKKLLEEVKDREFIGYSYDGADASFELLARRVMGEIPRYISIKEYDVSVKKNNLGEIISSAKAQLEVDKKLILCEGQGNGPVHALDNAIRDNVDKLAKYSQYLKDLKLVDYKVRILNTGTEAVTRVSIESTDSKGKNWFTIGVSANIIDASFKALVDSLDYKLFKDNAPASL

SEQ ID NO: 115730 - protein, 147 aa, Unknown
  Bacterial polypetide isolated from the Sargasso Sea
MYYARVKNTMSDKEKLYIFDTTMRDGEQSPGASMSVEEKIQISRVFDEMGIDIVEAGFPIASPGDFEAVSEISKIMKNSIPCGLSRALKKDIDACHESLKHAPRFRIHTFISTSPLHMKHKLEMTNEQVLDAIKESVTYARNFTDDV

SEQ ID NO: 115731 - protein, 281 aa, Unknown
  Bacterial polypetide isolated from the Sargasso Sea
MAMKTRSDLMPYSTGINTTLLSKASKVVSNATGFPVQFNKAIVGKNAFAHEAGIHQDGMLKNRNTYEIMTPESVGVKQSSLVMGKHSGRHAFKDKLTSLGYVDLTDDVIENAFGKFKILADKKKHIYDEDIVALVDDSLIKEDNVITLKSLKVFAGTGEPQRAEMTLEVYGEIKKTTETGDGPVDAIFKGIKKLYPHDVNLQLYQVHAVTEGTDAQATVSVRIEEEGKTTVGQAADTDTLVASANAYINALNKMIIKRKRNFAPDNIEVKKNLKTEKMKGI

SEQ ID NO: 115732 - protein, 156 aa, Unknown
  Bacterial polypetide isolated from the Sargasso Sea
MADKNRVYIFDTTMRDGEQSPGASMSLEEKIQISRVFDELGIDIIEAGFPIASPGDFEAVTEISKILKKSIPAGLSRHSKKDIDRCYEALKHAPRFRIHTFISTSPLHMKHKLNMTSEQVYDSVKEHVTYARKFTDDVEWSCEDGTRTDMDFMCKT

SEQ ID NO: 115733 - protein, 525 aa, Unknown
  Bacterial polypetide isolated from the Sargasso Sea
MSRDKLYIFDTTLRDGAQTQGVDFSIDDKLKIAKALDDLGVDYIEGGWPGANPTDTEFFQKKIKLNNSIMTAFGMTKRAGRSADNDPGLSSILNSNTKAVCLVGKSWDFHVDVALGISNEENLENISESAKLFVKEKKEFMFDAEHFFDGFKNNKEYTLSCIKSAYDNGARWIVLCDTNGGTLPNEVSEIVNEVTKSVPGKNLGIHAHNDTGNAVANSLAAILSGVRQIQGTINGLGERCGNANLMSIIPTLHLKETYSKNYEINIKKENINKLTQCSRLLDEILNRKPNQHMPYVGAAAFSHKGGLHVSAVQKDPKTYEHINPETVGNARNIVVSDQSGKSNIVSRLNSIGIDFKQDDPKIKKLLEEVKDREFIGYSYDGADASFELLARRIMGEIPRYILIKEYDVSVKKNSSGEIISSAKAQLEVDKKLILCEGEGNGPVHALDNAIRNNVDKLAKYSQYLKDLKLVDYKVRILNTGTEAVTRVSIESTDSKGKNWFTIGVSANIIDASFKALVDSLDYKLL

SEQ ID NO: 115734 - protein, 222 aa, Unknown
  Bacterial polypetide isolated from the Sargasso Sea
VFTAFSGSHQDAIKKGFQAMKTSNDPKWAVPYLPIDPADLGRSYEAVVRINSQSGKGGVAFLLEKDHGVSLPRRLQISMSQKIQRLADQTGKEISTLEIWEIFEKNFLIPKNGYKYIKHSSSSKDDTNNLELEMIFNNSKEIINGSGNGPIDAFINGLKTNLNLDLKVSDYNQSAISSGSDAKAGAYIELEMNGKTSWGVGINSSTTKASFEAIVVGISKLV

SEQ ID NO: 115735 - protein, 268 aa, Unknown
  Bacterial polypetide isolated from the Sargasso Sea
LMPYETGINTTLLSKASKIVSNATGFPVQYNKAIVGKNAFAHEAGIHQDGMLKNRQTYEIMTPESVGVKQTSLVMGKHSGRHAFKDKLNSLGYPDLTDDVVGNAFAKFKVLADKKKHVYDEDIIALVDDSLIVDNKVNAITLKSLKVFAGTGEPQKAEMTLDVYSDVKNATETGDGPVDAIFKCIKTLYPHDVNLQLYQVHAVTEGTDAQATVSVKIEEKGKTTVGQAADTDTLVASANAYINALNKMIIKRDKTAPMEQESQKVRGI

SEQ ID NO: 115736 - protein, 365 aa, Unknown
  Bacterial polypetide isolated from the Sargasso Sea
MTKEKVYIFDTTLRDGAQTQGVDFSIDDKLKIASALDRLGVDYIEGGWPGANPTDTEFFQKDLNLKNSILTAFGMTKKTGRSTENDPGIAAISNCNTRAVCLVGKAWDYHVDVALEITNEENLENIVDSTKHFVKEKKDFMFDAEHFFDGYKNNPKYSLKCIKAAYDNGARWVVLCDTNGGTLPNEISKIVSEVINHIPGKNLGIHAHNDTGNAVANSLAAVLSGARQVQGTINGLGERCGNANLMSIIPTLHLKENFSKLFETNIKNNNIKNLTQCSRLLDEILNRKPNKHLPYVGAAAFSHKGGLHVSAVQKDPKTYEHIKPEEVGNHRNIIVSDQSGKSNILSRLKTIGIEIEEDNPKIKKL

SEQ ID NO: 115737 - protein, 103 aa, Unknown
  Bacterial polypetide isolated from the Sargasso Sea
MSDKNRIIIFDTTMRDGEQSPGATMSLEEKIQIARCFDELGIDVIEAGFPIASPGDFEAVTEISKVLKKSIPAGLSRATKKDIDACRDSLKHAKRFRIHTFIS

SEQ ID NO: 115738 - protein, 254 aa, Unknown
  Bacterial polypetide isolated from the Sargasso Sea
SIVTEKLTKTSKLVSAVTGFPVQFNKAIVGKNAFAHEAGIHQDGMLKNNKTYEIMTPESVGVSESNLVMGKHSGRHAFKQKIIELGYSVNDNVIEEAFENFKSLADKKKNIYDEDIVAIIDDQVIRINDSIILKDLQVIAGTKGPQQAEINLMIEDKLNNITSTGDGPVDAIFNGLSKLVPHKAKLLLYQVHAVTEGTDAQAEVSVRLSEDGKTVVGLGSDTDTLVASAKAYINALNKLVVKREKSAPAKMSGI

SEQ ID NO: 115739 - protein, 267 aa, Unknown
  Bacterial polypetide isolated from the Sargasso Sea
MPYETGINTTLLSKASKIVSNATGFPVQYNKAIVGKNAFAHEAGIHQDGMLKNRQTYEIMTPESVGVKQTSLVMGKHSGRHAFKDKLNSLGYPDLTDDVVGNAFAKFKVLADKKKHVYDEDIIALVDDSLIVDNKVNAITLKSLKVFAGTGEPQKAEMTLDVYGDVKNATETGDGPVDAIFKCIKTLYPHDVNLQLYQVHAVTEGTDAQATVSVKIEEKGKTTVGQAADTDTLVASANAYINALNKMIIKRDKTAPMEQESQKVRGI

SEQ ID NO: 115740 - protein, 151 aa, Unknown
  Bacterial polypetide isolated from the Sargasso Sea
REVNDKDLEILMDEEKRVSNEPITYSLDQVHFSSGDHDIPTATVRLIGPDNTQFTDASTGNGPVDAVCKAIDRVIGTTCKLIDFNVQSVTEGLDSQGTVTIRIENNDQIFSGRGANTDIIVASAEAYLSAVNRMIANDDNYKMPALEGTPD

SEQ ID NO: 115741 - protein, 113 aa, Unknown
  Bacterial polypetide isolated from the Sargasso Sea
MDNPTDKYSAYKPVDLVNREWPSNTIKKAPIWCSVDLRDGNQALIEPMGSERKNRMFSLLCKLGFKEIEVGFPSASKTDYDFVRDLIENKKIPLDVNIQVLTQAREELIIKTF

SEQ ID NO: 115742 - protein, 429 aa, Unknown
  Bacterial polypetide isolated from the Sargasso Sea
MNKEKIYIFDTTLRDGAQTQGVDFSIDDKLKIAKALDDLGVDYIEGGWPGANPTDTEFFQKKMKLNNSILTAFGMTKKVGRSADNDPGLSSILNSNTPAVCLVGKTWDFHVDIALQISNQENLENISESAKLFVKEKKEFMFDAEHFFDGFKNNKEYAISCIKSAYDNGARWIVLCDTNGGTLPNEISSIINEVTKFIPGKNLGIHAHNDTGNAVANSLAAILSGVRQVQGTINGLGERCGNANLMSVIPTLFLKKIYSKNYEINIKKENINKLTQCSRLLDEILNRKPNQHLPYVGAAAFSHKGGLHVSAVQKDPKTYEHINPEDVGNTRNIVVSDQSGKSNIVSRLKSIGIDFKQDDPKIKKLLEEVKDREFIGYSYDGADASFELLARRIMGEIPRYILIKEYDVSVKKNSSGKIISSAKAQLEVD

SEQ ID NO: 115743 - protein, 152 aa, Unknown
  Bacterial polypetide isolated from the Sargasso Sea
MNNGHVKIFDTTLRDGEQAPGCSMTLGEKLKISRALTDLNVDIIEAGFPAASPGDFNSVKEIADQNLGPIICGLARCNEDDINKAFNAVKGSDNHRIHVFVATSSIHREYKLKMAKEEIIKNAVSSISLAKSMCDDIEFSPEDASRTELSYL

SEQ ID NO: 115744 - protein, 167 aa, Unknown
  Bacterial polypetide isolated from the Sargasso Sea
MTKIINKSVSKYKPFEPINLENRAWPNKSIKEAPIWCSVDLRDGNQALIEPMGEERKLRMFKMLLEIGFREIEVGFPSASQTDFDFVRKIINENLIPENVSIQALTQARPELIKRTYEALEGAPRAIVHVYNSTSTLQRRVVFNSDENGIKKIATDGAKQVRDYAEK

SEQ ID NO: 115745 - protein, 127 aa, Unknown
  Bacterial polypetide isolated from the Sargasso Sea
MEDKNRIIIFDTTMRDGEQSPGASMSLEEKIQISRVFDELGIDVIEAGFPIASPGDFEAVTAISKILKKSVPAGLARHTKKDIDACNESLKSAKRFRIHTFISTSSLHMKHKLNKTPEQVIDSIKSM

SEQ ID NO: 115746 - protein, 246 aa, Unknown
  Bacterial polypetide isolated from the Sargasso Sea
MPFAKYQAFKPIELSDRQWPSRVIDKAPRWCSVDLRDGNQALIDPMNVDEKLRLWDLLLKIGFSEIEVGFPAASQPDFDFIRKLVDEDRIPDDVTVQVLCQARRELIEKTVEALEGAPNVIFHLYNSTSELQRRVVFDLDKQGITDLAVKGTEIVKEGLKNFSSNVTFEYSPESFTGTELDFAVDICSAVAETWGASPEDPIIINLPSTVEMATPNVYADQIEFFVRNFSYRDSSVISLHTHNDRG

SEQ ID NO: 115747 - protein, 121 aa, Unknown
  Bacterial polypetide isolated from the Sargasso Sea
MANKDRVFIFDTTMRDGEQSPGASMSLEEKIQISRVFDELGIDVIEAGFPIASPGDFEAVSAISKVLKKSIPCGLARHSKKDIDRCYEALKHAPRFRIHTFISTSPLHMKHKLNKTPEQVY

SEQ ID NO: 115748 - protein, 100 aa, Unknown
  Bacterial polypetide isolated from the Sargasso Sea
MSDNNRVYIFDTTMRDGEQSPGASMSLEEKIQIARVFDELGIDIIEAGFPIASPGDFEAVTEVSKILKNSIPAGLSRHSKKDKNRCYEALKHAPRFEFIL

SEQ ID NO: 115749 - protein, 270 aa, Unknown
  Bacterial polypetide isolated from the Sargasso Sea
MSKERLYIFDTTLRDGAQTQGVHFSIDEKTKIAHALDNLGVDYIEGGWPGANPSDTEFFQKGLNLKNSTFTAFGMTKKTGRSAENDPGLSAILNSNTNAVCLVGKSWDFHVDVALGISNEENLENIKETTKHFVKNNKEFMFDAEHFFDGYKSNPKYALDCIKAAYDNGAKWIILCDTNGGTLPHEVTEIVKEVTKHIPGENLGIHAHNDTGNAVANSIAAVLSGARQVQGTINGLGERCGNANLMSLIPTFHLKKEFSDKFEINIKDKN

SEQ ID NO: 115750 - protein, 72 aa, Unknown
  Bacterial polypetide isolated from the Sargasso Sea
MTDKNRVYIFDTTMRDGEQSPGASMSLEEKIQIARVFDELGVDIIEAGFPIASPGDFEAVSEVSKVLKNSIP

SEQ ID NO: 115751 - protein, 89 aa, Unknown
  Bacterial polypetide isolated from the Sargasso Sea
MSEKERVYIFDTTMRDGEQSPGASMSLEEKIQIARVFDELGIDIIEAGFPIASPGDFEAVTEISKILKKSIPAGLSRHSKKDMIDVMKH

SEQ ID NO: 115752 - protein, 533 aa, Unknown
  Bacterial polypetide isolated from the Sargasso Sea
MSKERLYIFDTTLRDGAQTQGVDFSIEDKEKIASALDNLGVDYIEGGWPGANPTDTEFFQKKHNFKNSKLTSFGMTKRSGRSAENDTGLSALINSNSPAVCLVGKSWDFHVDVALEITNEENLENIRESAKHFIKAKKEFMFDAEHFFDGYKANSKYALSCIKAAYDEGARWIVLCDTNGGTLPHEVSRIVSEVSKVIPGENLGIHAHNDTGNAVANSLAAVLSGARQIQGTINGLGERCGNANLMSLIPTFFLKKDFSSKFETGIKTKNINNLTECSRLLDEILNRKPNQHLPYVGAAAFSHKGGLHVSAVQKDPKTYEHINPEDVGNTRNIVVSDQSGKSNIISRLKSIKIDIKENDPKIKKLLNEVKDREFIGYSYDGADASFELLARRIIGEIPRYISINEYDVSVKKNKLGEIVSSAKAQLEVDGEKIICEGEGNGPVNALDNAIRQNVDRLAKYSKYLKDLKLVDYKVRILNTGTEAVTRVSIESTDSDGKNWFTIGVSTNIIEASFKALVDSLDYKLFKDNAPASK

SEQ ID NO: 115753 - protein, 396 aa, Unknown
  Bacterial polypetide isolated from the Sargasso Sea
MSKEKIHIFDTTLRDGAQTQGVDFSIDDKLKIAKALDDLGVDYIEGGWPGANPTDTEFFQKKIKLNNSVITAFGMTKRSGRSADNDPGLSAILNSNTPAVCLVGKSWDFHVDVALGISNKENLENISESTKLFVKENKEFMFDAEHFFDGFKNNKEYALSCIKSAYDNGARWIVLCDTNGGTLPNEISEIVSEVAKSVPGQNLGIHAHNDTGNAVANSLAAVLSGARQIQGTINGLGERCGNANLMSIIPTLYLKQNYNQNYEINIKKENINKLTQCSRLLDEILNRKPNQHLPYVGAAAFSHKGGLHVSAVQKDPKTYEHISPEEVGNVRNIVVSDQSGKSNIVSRLSSIGVDFKQDDPKIKKLLEEVKDREFIGYSYDGADASFELLARRVMGE

SEQ ID NO: 115754 - protein, 356 aa, Unknown
  Bacterial polypetide isolated from the Sargasso Sea
MSKEQLYIFDTTLRDGAQTQGVDFSIDDKEKISSALDKLGVDYVEGGWPGANPTDTEFFNKDHNFKSTKLTAFGMTKKSEHSAENDPMLSSLINSKSNSVCLFGKSWDFQVDVALGISNEQNLMNISESTKHIVKSGKEFMFDAEHFFDGYKANPEYAMSCLKAAFDNGARWIVLCDTNGGTLPHEITEIASKVIKQIPGKNLGIHAHNDTENAVANSLAAVQAGVRQVQGTINGLGERCGNANLMSLIPSFFLKKDFSEKFELSIKRENLKNLTQCSRLLDEILNRKPNKHLPYVGASAFSHKGGMHVSAVQKDPKTYEHINPEEVGNSRNIVVSDQSGQSNIMSRLNSIGIKVE

SEQ ID NO: 115755 - protein, 93 aa, Unknown
  Bacterial polypetide isolated from the Sargasso Sea
MTDNNRVYIFDTTMRDGEQSPGASMSLEEKIQIARVFDELGIDIIEAGFPIASPGDFEAVTEVSKILKKSIPAGLARHSKKDIDRCYEALKHA

SEQ ID NO: 115756 - protein, 256 aa, Unknown
  Bacterial polypetide isolated from the Sargasso Sea
KIVSNATGFPVQFNKAIVGKNAFAHEAGIHQDGMLKNRNTYEIMTPESVGVKQTSLVMGKHSGRHAFKDKLVSLGYADLTDDITENAFGKFKVLADKKKHIYDEDIVALVDDSLIKDDNVITLKSLKVFAGTGEPQRAEMTLEVYGEIKKASEIGDGPVDAIFKAIKKLYPHDANLQLYQVHAVTEGTDAQATVSVRIEEEGKITVGQAADTDTLVASANAYINALNKMIIKRKRNFAPDSMEVKQNLKTEKMKGI

SEQ ID NO: 115757 - protein, 527 aa, Unknown
  Bacterial polypetide isolated from the Sargasso Sea
MPREKVILFDTTLRDGQQTQGVDFSVQDKVNIANALDNIGIDYIEGGWPGANPTDTKFFENKNNFSNAKFTAFGMTKRSGRSADNDPQLRSLIDAHSDSVCLVAKTWDFHVDLALGISLEENIEAIKDSVLSVKAGGKEPLIDCEHFFDGYKSNSEFSFKCIEAALESGAEWVVLCDTNGGTLPSEIFNIVEEITKKFPGDKIGIHCHNDTENAVANSLAAIDAGARHLQGTINGLGERCGNANLISIIPTLLLKKEYSDKYEISINANKLSELKNLSRLVDDILNKHPNNHQPYVGENAFAHKGGLHVSAVMKDPTTYEHVNPELVGNNRKILVSNQAGRSNLLSRLKSIGMEIDSDDKRINTLLEIVKEREYMGYSYDGAGASFEILAKNILDQVPSFFSVENYEVTIAGSKDKSSLSKANIVLNVDERIINSTGEGNGPVNALDNALRKDLGIYNEYIQDLTLVDYKVRILDGGTEAITRVVIESSDSKNQSWFTVGISPNIIEASFEALMDSINYKLIKSDIK

SEQ ID NO: 115758 - protein, 121 aa, Unknown
  Bacterial polypetide isolated from the Sargasso Sea
IIDKAPIWLSTDLRDGNQSLIEPMDAEKKMRFFKCLVAVGLKEIEVGFPSASQTDFDFVRELIEGGHIPDDVTIQVLTQARDDLIERTFESLKGAKKAIVHYYNACAPSFRKIVFTRTRRG

SEQ ID NO: 115759 - protein, 429 aa, Unknown
  Bacterial polypetide isolated from the Sargasso Sea
KAWDFHVDVALGISKEENLENISETTKHFVKNNKEFMFDAEHFFDGYKSNPKYALECIKAAYDNGAKWIVLCDTNGGTLPHEVTEIVKEVSKHIPGKNLGIHAHNDTGNAVANSIAAVLSGARQIQGTINGLGERCGNANLMSIIPTFHLKKELSDKFEINIKEKNIKHITQCSRLLDEILNRKPNKHLPYVGAAAFSHKGGLHVSAVQKDPKTYEHIDPSDVGNARNIVVSDQSGKSNILSRLKTIGIEIEENDPKVKKLLEEVKDREFIGYSYDGADASFELLARRVIGEIPRYISIKEYDVSVSKNDQDKIISRAKAKLEVDGEQIVCEGEGNGPVHALDNAIRKNVTRLEKYSEYLKDLKLVDYKVRILNTGTEATTRVSIESTDSKGKNWFTIGVSPNIIDASFKALIDSLDFKLFKDKAPASK

SEQ ID NO: 115760 - protein, 189 aa, Unknown
  Bacterial polypetide isolated from the Sargasso Sea
MTKIINKSVSKYKPFEPVQLDNREWPTESIKRAPIWCSVDLRDGNQALIEPMGEERKLRMFNMLLDIGFREIEVGFPSASQTDFDFVRKIINENLIPEHVTIQALTQARPELIKRTFEALEGAPRAIVHVYNSTSTLQRRVVFKSDEEGIKKIATDGAKNVKDYSEKYPNTDWIFEYSPESFTGTELPY

SEQ ID NO: 115761 - protein, 166 aa, Unknown
  Bacterial polypetide isolated from the Sargasso Sea
MYYRFSKILVMSSKDRVFIFDTTMRDGEQSPGASMSLEEKIQIARVFDELGIDIIEAGFPIASPGDFEAVSEVSKILKNSIPAGLSRHSVKDIDRAYEALKHAPRFRIHTFISTSPLHMKHKLNMTSDDVYESIGKHVAYARKFTDDVEWSCEDGTRTDMITCVKL

SEQ ID NO: 115762 - protein, 272 aa, Unknown
  Bacterial polypetide isolated from the Sargasso Sea
MDNPTDKYSAYKPVDLVNREWPSNTIKKAPIWCSVDLRDGNQALIEPMGSERKNRMFSLLCKLGFKEIEVGFPSASKTDYDFVRDLIENKKIPSDVNIQVLTQAREELIIKTFESLKGASKGIIHFYNSTSTLQRKVVFNQDKDGVKKIATDAAELIKKLALENSDTEWTFEYSPESFTGTELEYARDVCDNVVEILKPVSKNKIIINLPATVEMSTPNIYGDQIEWMSKNLKNRNDICLSLHPHNDRGTAVAASEFGIMAGADRVEGTLLE

SEQ ID NO: 115763 - protein, 268 aa, Unknown
  Bacterial polypetide isolated from the Sargasso Sea
MPYNTGIKTELISKASKIVSNATGFPVQFNKAIVGKNAFAHESGIHQDGMLKNRETYEIMTPESVGVKKTSLVMGKHSGRHAFKDKLSDLGYSNLTDDIIQAAFGKFKVLADKKKHIYDEDIVALVDDSLIVDNKINAINLKSLKVFAGTGEPQKAEMTLDVYGDIKNTTETGDGPVDAIFKCIKKLFPHDVKLSLYQVHAVTEGTDAQATVSVKIEENDRTTVGQSADTDTLVASANAYLNALNKMLIKREKKAPSQNIKHQKVKGI

SEQ ID NO: 115764 - protein, 235 aa, Unknown
  Bacterial polypetide isolated from the Sargasso Sea
MKKIINKAISKYKPFPKIELEDRVWPENQIEKPPIWCSVDLRDGNQALIEPMGEERKLRMFKLLLDIGFKEIEVGFPAASQTDFDFVRRIIKEGLVPDDVYIQVLTQSRKELIEKTFESLKGAKNAILHVYNSTSTVQRKVVFKSNKKGIKRIAQEGASWVLENSLKHPDTNWKFEYSPESFTGTELPYAAEVCNAVNEIWEPTKDNKSIINLPATVELSTPNIYADQIEWMCKN

SEQ ID NO: 115765 - protein, 334 aa, Unknown
  Bacterial polypetide isolated from the Sargasso Sea
GESIKLIINNIKNIDGIIVSVHCHNDLGLAVSNSLSAVENGARQIEGCINGLGERAGNAALEEVIMGLEVRKDHFNVQTKVNTSEIGPTSRMVSNIFGFPMQANKAIVGQNAFRHSSGIHQDAFLKDKSTFEIMEPETVGWRGEALVLGKLSGRAGLKSRLKDLGYEFDEDQLNSLFIKFKDLADSKKEVTDMDLESLMLEQSRSENNKQFLTLESVQVECGNKIDPKAKIELINEAGTKIKTESNGTGPVDAVCKAIDKIISFTSKLTEFSVNSVTEGIDALGEVTIRVENKKGRTFTGIGSDSDIVVASAKAYINAINRQVQMMNEGSESPG

SEQ ID NO: 115766 - protein, 147 aa, Unknown
  Bacterial polypetide isolated from the Sargasso Sea
MTEKIYIFDTTLRDGEQSPGASMNLDEKLQIAEVLDSMRVDIIEAGFPIASNGDFEAVQEVSKKVKNSTIAGLARASLKDIDRAWDAVQFAKSPRIHTFIATSPLHMKYKLKKTETEVLEAIKKTVSYARNLCDNIEWSCEDGGRSE

SEQ ID NO: 115767 - protein, 306 aa, Unknown
  Bacterial polypetide isolated from the Sargasso Sea
MCKLGFKEIEVGFPSASKTDYDFVRDLIENKKIPSDVNIQVLTQAREELIIKTFESLKGASKGIIHFYNSTSTLQRKVVFNQNKDGVKKIATDAAELIKKLALENSDTEWTFEYSPESFTGTELDYAREVCDNVVEILKPVSKNKIIINLPATVEMSTPNIYGDQIEWMNKNLKNRNDICLSLHPHNDRGTAVAASEFGIMAGADRVEGTLFGNGERTGNVDIVTIALNMLTQGVEPNLDFSNINSVMREVEYCNQLPVHPRHPYAGDLVFTAFSGSHQDAIKKGFQAIKKSNDPKWEVPYLPIDP

SEQ ID NO: 115768 - protein, 330 aa, Unknown
  Bacterial polypetide isolated from the Sargasso Sea
MLKDPSKKYRPFTQIQIPDRTWPDKIIDKAPIWLSTDLRDGNQSLIEPMDAEKKMRFFKCLVAVGLKEIEVGFPSASQTDFDFVRELIEGGHIPDDVTIQVLTQARDDLIERTFESLKGAKKAIVHYYNACAPSFRKIVFNQDKAGVKAIAVAAGTTIKRLADAAPETQWGFEYSPEVFSSTEIDFAVEVCNAVIGVFQPTPANKLILNLPATIECATPNNYADQIEWFGRHVDRRDSVLISVHTHNDRGTGVAASELAVMAGADRVEGCLFGNGERTGNVCLVTLALNLYTQGVDPELDFSDIDAVRKVVEDCNQIPVHPRHPYVGDLV

SEQ ID NO: 115769 - protein, 236 aa, Unknown
  Bacterial polypetide isolated from the Sargasso Sea
MSGKDRVIIFDTTMRDGEQSPGASMSLEEKIQIARVFDELGIDIIEAGFPIASPGDFEAVTEVSKILKKSIPAGLSRHSKKDIDRAYEALKHAPRFRIHTFISTSPLHMKHKLNMSPEDVYESIGQHVAYARKFTDDVEWSCEDGTRTDMDFMCKTVELAIKNGATTINIPDTVGYTIPSEFTKIIQTLLNKVPNIDKAILSTHCHNDLGLAVANSLAGVQAGARQIECTINGLGE

SEQ ID NO: 115770 - protein, 204 aa, Unknown
  Bacterial polypetide isolated from the Sargasso Sea
MTEKIYIFDTTLRDGEQSPGASMNLEEKLQIAEVLASMKVDIIEAGFPIASNGDFEAVSEISKNIKGPTIAGLARAKISDIERAWEAVKFAESPRIHTFIATSPIHMKYKLMKSEDEVLETIKKTVTYARNLCPNVEWSCEDGGRSNLDYLYKCIELAINCGASTINIPDTVGYTLPSEFGSIFKSVKNNVSNIDKAILSTHTH

SEQ ID NO: 115771 - protein, 312 aa, Unknown
  Bacterial polypetide isolated from the Sargasso Sea
MMGPTICSLQRCNESDIEKAYEALKVNKNRRIHVFVATSEIHLKHKLNMAKDEVLKAAYEGVKMAKSFCDNVEFSPEDASRTDHGFLTEVVNAAIEAGATTINVPDTVGYTIPYEFGELFKHLISNCTHAEDVVFSVHCHDDLGLSVANSLAAVESGARQIECTINGIGERAGNTSLEEVCMAIRTREEYFDFKTSIDSTKLYPTSRLVSSITGMHVPRNKAIVGDNAFAHEAGIHQHGMLRDSSTYEIMKPQDVGIARSNLVLGKHSGRHAFLDRINDLGFKLEKDEIDPAFREFKKLADKKKEIFDTDIE

SEQ ID NO: 115772 - protein, 92 aa, Unknown
  Bacterial polypetide isolated from the Sargasso Sea
MKDSREIIIFDTTLRDGEQAPGCSMTIGEKLKIAHALKELNVDVIEAGFAAASPGDYEAVNAIASEIDGPTICSLARCNESDIEKAYEALKV

SEQ ID NO: 115773 - protein, 158 aa, Unknown
  Bacterial polypetide isolated from the Sargasso Sea
INGIGERAGNTSLEEVVMILRQHSDLNLDTNINSKLLNETSQKVSELMGMPVQPNKAIVGSNAFAHSSGIHQDGVIKKRETYEIIDPIDVGVNKSSIVLTARSGRAALAYRMKEFGVNLTKKELDDVYGEFLVIADQKKEVTDSDFPLMLQKKNISYG

SEQ ID NO: 115774 - protein, 235 aa, Unknown
  Bacterial polypetide isolated from the Sargasso Sea
MHMKYKLKKTEEEVLDAIQKTVSHARNLCDNIEWSCEDGGRSELEFLYQCIELAINSGASTINIPDTVGYTLPEEFGKIFKNVKNNVPNIDRAILSTHTHNDLGLATANNVAAIKEGARQVECTINGMGERAGNSSLEEIVMTLKVKKDLMPFHTDIKTESIMKASRLVSSITGFPVQPNKAIVGANAFAHEAGIHQDGMLKHAGTYEIMTPESIGLNKSSLVLGKHSGKHAFSE

SEQ ID NO: 115775 - protein, 324 aa, Unknown
  Bacterial polypetide isolated from the Sargasso Sea
TRTNLDFMCKTIELAIKCGAKTINIPDTVGYSIPEEFAKTITHIKNNVPNIDKAIISAHCHNDLGLAVANALAGLSAGVRQIECTINGIGERAGNAALEEIVMAIKTRNDLMPYETGIKTELISKASKIVSNATGFPVQFNKAIVGKNAFAHESGIHQDGMLKNRETYEIMTPESVGVKKTSLVMGKHSGRHAFKDKLNDLGYTDVTDDVIQAAFGKFKILADKKKHIYDEDIVALVDDSLIIDNKINAINLKSLKVFAGTGEPQRAEMTLDVFGDVKKTVQTGDGPVDAIFKCIKELYPHNVKLSLYQVHAVTEGTDAQATVS

SEQ ID NO: 115776 - protein, 317 aa, Unknown
  Bacterial polypetide isolated from the Sargasso Sea
MEAVKNGARQLECTINGIGERAGNASLEELVMALHVRRSYFNGYMDRAEDSTKPLTAIQTEEIYKTSRLVSNLTGMAVQPNKAIVGANAFAHESGIHQDGVLKNRLTYEIIDARTIGLTDNRISLGKLSGRSAVRARLEELGYQLEGDDLNDAFARFKELADRKREITDRDLEAIVSQNAQQIEAHYQLAGVQVSCGRDLRATATVTLRTSDGEECSQAAIGTGPVDAVCQALNALVQVPNELVEFSVKSVTEGIDAMGEVTIRLRQDGRLYSGHAADTDVVVAAAQAFVNALNRMVSGQKHSPLHPQRAPLPAPAL

SEQ ID NO: 115777 - protein, 317 aa, Unknown
  Bacterial polypetide isolated from the Sargasso Sea
KFLKMLKNNVSNIDKAILSTHTHNDLGLATANNVAAIKEGARQVECTINGMGERAGNSSLEEIVMTLKVKKDLMPFHTDIKTESIMKASRLVSSITGFPVQPNKAIVGANAFAHEAGIHQDGMLKHSGTYEIMTPESIGLNKSSLVLGKHSGKHAFSEKLKELGYEPGNNALMELFGRFKDLADKKKEIFEEDLIALAEDRSASYDEHIKFVSLEVNAGSVEKPEAKLKIEMDQNIKSVKINGNGPVDATFNAIKKLTLTDFKLKLYQVNAITAGTDAQGEVTVRLEDDDLSSQAKGSDPDIIVASAKAYINALNRL

SEQ ID NO: 115778 - protein, 311 aa, Unknown
  Bacterial polypetide isolated from the Sargasso Sea
EKIQIARVFDELGIDIIEAGFPIASPGDFEAVTEVSKILKKSIPAGLSRHSKKDIDRAYEALKHAPRFRIHTFISTSPLHMKHKLNMSPEDVYESIGQHVAYARKFTDDVEWSCEDGTRTDMDFMCKTVELAIKNGATTINIPDTVGYTIPSEFTKIIQTLLNKVPNIDKAILSTHCHNDLGLAVANSLAGVQAGARQIECTINGLGERAGNAALEEVVMAIKTRPDLMPYETGINTTLLNKASKIVSNATGFPVQYNKAIVGKNAFAHEAGIHQDGMLKNRQTYEIMTPESVGVKQTSLVMGKHSGKHAF

SEQ ID NO: 115779 - protein, 269 aa, Unknown
  Bacterial polypetide isolated from the Sargasso Sea
MNKENNYIKIFDTTLRDGEQSPGASMNIEEKLKIAEALEDLKVDIIEAGFPAASKGDYDAVSEISKQIKNSSICALSRASKNDIQTAADALKNAASPRIHTFISTSELHMKHKLQLNSDEVYQKVIDSVSFARNLCDDVEWSCEDGTRTDLDFMCKTVEAAIKNGASTINIPDTVGYSIPDEFTNIINHLMNNVPNIDKVTISTHCHNDLGLAVANSLAGVRAGARQIECTINGLGERAGNAAMEEVVMAIRTRNDMMPFQTNIQTEKL

SEQ ID NO: 115780 - protein, 356 aa, Unknown
  Bacterial polypetide isolated from the Sargasso Sea
NNYIKIFDTTLRDGEQSPGASMNIEEKLKIAEALEDLKVDIIEAGFPAASKGDYEAVSEISKKIKNSSICALSRASKNDIQTAADALKNATAPRIHTFISTSELHMKHKLQLNSDEVYQKVIDSVSFARNLCDDVEWSCEDGTRTDLDFMCKTVEAAIKNGASTINIPDTVGYSIPDEFTNIINHLMNNVTNIDKVTISTHCHNDLGLAVANSLAGVRAGARQIECTINGLGERAGNAAMEEVVMAIRTRNDMMPFQTNIQTEKLTKTSKLVSAVTGFPVQFNKAIVGKNAFAHEAGIHQDGMLKNNKTYEIMTPESVGVSESNLVMGKHSGRHAFKQKIIELGYSINDNVIEEAF

SEQ ID NO: 115781 - protein, 294 aa, Unknown
  Bacterial polypetide isolated from the Sargasso Sea
EAGFPIASPGDFEAVTAISKILKNSIPAGLSRHTKKDIDACYESLKGAKRFRIHTFISTSALHMKHKLNKTPEEVTESIKEHVTYARKFTDDVEWSCEDGTRTDIDFMCKTVELAIKCGAKTINIPDTVGYTVPSEYTKIINTLFNKVPNIDKAILSTHTHNDLGLAVANSLAGVSAGARQVECTINGIGERAGNAALEEIVMAMKTRPDLMPFTTGINTKLLSKASKVVSNATGFPVQFNKAIVGKNAFAHESGIHQDGMLKNRNTYEIMTPESVGVKKTSLVMGKHSGRHAF

SEQ ID NO: 115782 - protein, 177 aa, Unknown
  Bacterial polypetide isolated from the Sargasso Sea
MSGKDRVIIFDTTMRDGEQSPGASMSLEEKIQIARVFDELGIDIIEAGFPIASPGDFEAVTEVSKILKKSIPAGLSRHSKKDIDRAYEALKHAPRFRIHTFISTSPLHMKHKLNMSPEDVYESIGQHVAYARKFTDDVEWSCEDGTRTDMDFMCKTVELAIKNGAKTINIPDTVGYT

SEQ ID NO: 115783 - protein, 130 aa, Unknown
  Bacterial polypetide isolated from the Sargasso Sea
MADKNRIIIFDTTMRDGEQSPGASMSLEEKLQISRVFDELGVDVIEAGFPIASPGDFEAVTEISKTLKRSVPAGLARATKKDIDACHESLKHAKNFRIHTFISTSPLHMKHKLNKTPDEVLGSIKRKCNL

SEQ ID NO: 115784 - protein, 243 aa, Unknown
  Bacterial polypetide isolated from the Sargasso Sea
MTKIINDSASKYRPFKSIDIDNRTWPSNTITQSPIWCSVDLRDGNQALIEPMGEERKLRMFSLLIEIGFKEIEVGFPSASQTDFDFVRKIITENLIPNDVTIQALTQARPELIKKTFEALEGAKKAIVHVYNSTSTLQRKVVFKSDEAGIKKIATDGAKWVKEESELYDETDWSFEYSPESFTGTELPYAVEVCNAVNEIWQPNDQKKTIMNLPATVEMASPNTYADQIEWMCRNLQDRENVI

SEQ ID NO: 115785 - protein, 232 aa, Unknown
  Bacterial polypetide isolated from the Sargasso Sea
MDKTNKKYKPYRPVSMENRSWPSKVIEKSPIWCSVDLRDGNQALIEPMGDERKKRMFNLLCKIGFKQIEIGFPAASQTDFDFTRYLINEKVIPSDVTIQVLTQARPEIIKRTFEALDGAPNAILHFYNSTSTLQRKVVFDKDKEGVKKIATDAAKLIKELSSEYKNTNWSFEYSPESFTGTELDYAVEVCDDVVDILKKSSNNKIIINLPATVEMSTANIYGDQIEWMSENF

SEQ ID NO: 115786 - protein, 283 aa, Unknown
  Bacterial polypetide isolated from the Sargasso Sea
LLCDLGFKEIEVGFPAASETDFEFVRWLIEEKQIPSDVTIQVLTQARDHIIERTFESLEGASQAIVHFYNSTSTLQRKVVFDQDKSGIKKIATDGAKLVKKLALTQSETKWSFEYSPESFTGTELDYAAEVCDSVVDILKDATSEKIIINLPATVEMATPNVYGDQIEWMNENLENRESICLSLHPHNDRGTAVAASEFGLMAGADRVEGTLFGNGERTGNVDIVTIALNLLTQGIDPELDFSDINSVIREVEYCNQLPVHPRHPYAGDLVFTAFSGSHPRCN

SEQ ID NO: 115787 - protein, 298 aa, Unknown
  Bacterial polypetide isolated from the Sargasso Sea
AGVRQIECTINGIGERAGNAALEEIVMAIKTRDDLLPYETGIKTELISKASKIVSNATGFPVQFNKAIVGKNAFAHESGIHQDGMLKNRETYEIMTPESVGVKKTSLVMGKHSGRHAFKDKLSDLGYADVTDDVVQAAFGKFKILADKKKHIYDEDIVALVDDSLIIDNKINAINLKSLKVFAGTGEPQRADMTLDVFGEVKKTSQTGDGPVDAIFKCIKELYPHDVKLSLYQVHAVTEGTDAQATVSVKIEENDRTTVGQSADTDTLVASANAYLNALNKMLIKREKKSLYKNIEPK

SEQ ID NO: 115788 - protein, 290 aa, Unknown
  Bacterial polypetide isolated from the Sargasso Sea
DVTIQVLTQARPEIIKRTFEALDGAPNAILHFYNSTSTLQRKVVFDKDKEGVKKIATDAAKLIKELSSDYKNTNWSFEYSPESFTGTELDYAAEVCDDVVDILKESSNNKIIINLPATVEMSTANIYGDQIEWMSENFKNRENICLSLHPHNDRGTAIAASEFGLMAGADRVEGTLFGNGERTGNVDIVTLALNMYSQGINPNLDFSQINNVMREVEYCNQLPVHPRHPYAGDLVFTAFSGSHQDAIKKGLNALRSSNEPQWEVPYLPIDPADLGRTYEAVVRIIHNLEK

SEQ ID NO: 115789 - protein, 257 aa, Unknown
  Bacterial polypetide isolated from the Sargasso Sea
HNDRGTAVAATELGVMAGADRIEGTLFGNGERTGNVDLVTLALNMLTQGVDPELDFSDINPIMRETEFCNQLPVHPRHPYAGDLVFTAFSGSHQDAIKKGLNELRNSNQETWEVPYLPIDPKDVGRSYEAVIRINSQSGKGGVAYLLEKDHGLSMPRRLQIEFSQVIQRITDETGKEISASDIWDTFQETYLNENGTFKFLEHHINSTANKEGIQEDEIEIKIEKGSEIKTITGTGNGPIDAMINALSTNLELNVKI

SEQ ID NO: 115790 - protein, 269 aa, Unknown
  Bacterial polypetide isolated from the Sargasso Sea
SAEDATRSDPEFLVELFSETVKAGAVVLNVPDTVGYTTPDEMYSLLSRLMNEVYQSDQVIFSVHCHNDLGMAVANSIAAIRAGARQVECTINGIGERAGNASMEEIVMALKTRQQYFKFQTSIHTEQIYPTSKLLSQITGVDVQPNKAIVGANAFAHEAGIHQHGVLKNALTYEIMTPQSVGIKASNLVLGKHSGRHALSNRIKQLGFKLNDVELNQIFQEFKRLADIKKQIFDEDLEALVTHGIRKHADRYHLENLTVSSGTEVIPTA

SEQ ID NO: 115791 - protein, 205 aa, Unknown
  Bacterial polypetide isolated from the Sargasso Sea
MADKDRVYIFDTTMRDGEQSPGASMSLEEKIQIARVFDELGIDIIEAGFPIASPGDFEAVTEVSKILKNSIPAGLSRHSKKDIDRCYEALKHAPRFRIHTFISTSPLHMKHKLNKSSEEVYESIKEHVTYARKFTDDVEWSCEDGTRTDMDYMCKTVELAIQCGAKTINIPDTVGYTIPSEFTTIIHTLLNKVPNIDKAILSTHC

SEQ ID NO: 115792 - protein, 322 aa, Unknown
  Bacterial polypetide isolated from the Sargasso Sea
MDDRQWPGRQIDKAPIWCSVDLRDGNQALIEPMDSARKMTMFKLLVKIGFKEIEVGFPAASDTDFNFLRELIEGGHIPNDVTIQVLTQAREELIQRTVDSLRGAPNAILHLYNSTSTLQRRVVFKSDRDGVKQIAVDGAKMVADSLARAGAEHLRLQYSPESFTGTELDYALEVCEAVMEVWQPTSTKPTVINLPATVEMSSPNIYADQIEWMHRNFSNRAAVILSLHPHNDRGCAVAATELALMAGADRVEGTLFGNGERTGNVDLVTLGLNMFTQGVDPHLDFSDINHLIETAEFCNQLPVHERHPYAGKLVHTAFFRQS

SEQ ID NO: 115793 - protein, 260 aa, Unknown
  Bacterial polypetide isolated from the Sargasso Sea
MGAKTINIPDTVGYTVPSEFKKIIETLINKVPNIDKAILSTHCHNDLGLAVANSLAGVMAGARQIECTINGIGERAGNAALEEVVMAMRTRHDLMPYTTNINTKLLSKASKVVSNATGFPVQFNKAVVGKNAFAHESGIHQDGMLKNRNTYEIMTPESVGVHKTSLVMGKHSGRHAFKDKLNDLGYVGVTDDVIQIAFGKFKVLADKKKHIYDEDIAAIVDDSLVTEDNVIKLKSLKVFAGTGEPQKAEMTLEVFGEVKK

SEQ ID NO: 115794 - protein, 282 aa, Unknown
  Bacterial polypetide isolated from the Sargasso Sea
AGFPIASPGDFEAVTAISKILKNSIPCGLSRHSKKDIDACYEALKAAPRFRIHTFISTSPLHMKHKLNKSSEEVYESIKEHVTYARNFTDDVEWSCEDGTRTEIDYMCKTVELAIKCGAKTVNIPDTVGYTVPLEFTKIITTLKNKVPNIDKAKISVHCHNDLGLAVANSLAGVSAGARQVECTINGIGERAGNASLEEIVMAIKTRNDLMPYQTGINTTLLSKASKVVSNATFPVQFNKAIVGKNAFAHEAGIHQDGMLKNRNTYEIMTPESVGVKQTSLV

SEQ ID NO: 115795 - protein, 212 aa, Unknown
  Bacterial polypetide isolated from the Sargasso Sea
MSKDPGRILIFDTTLRDGEQSPGASLNLEEKLAIAHQLARLGVDIIEAGFPFASPGDFKAVNKIANSVGKENGPIICGLARASKDDIKACYEAVSPAPKKRIHTFIATSDIHLKHKLRKSRKDVLQIVPDMVNYAKSLVDDVEFSCEDASRSDPDFLYEVIQLAISAGATTINIPDTVGFTTPSEFGKLIADINKNVPNIDEAIISVHGHND

SEQ ID NO: 115796 - protein, 298 aa, Unknown
  Bacterial polypetide isolated from the Sargasso Sea
CTINGIGERAGNASLEELVMALHVRKSFFNSFFKRNPDSPTPLTAIRTEEITKTSRLVSNLTGMTVQPNKAIVGANAFAHESGIHQDGVLKNRLTYEIIDAKTVGLSDNKISLGKLSGRSAVRARLEEMGYDLSREDLNDAFARFKDLADRKREITDRDLEAIVSEQVQLPEAKFQLSLVQVSCGNTSKPTATISLLNTEDNTEDTAVSIGTGPVDAVCEALNKLAKVPNELIEFSVKSVTEGIDALGEVTIRIRRDNKIYSGHSADTDVVVAAANAYVNALNRLVFSEKKNSIHPPI

SEQ ID NO: 115797 - protein, 232 aa, Unknown
  Bacterial polypetide isolated from the Sargasso Sea
MTEKIYIFDTTLRDGEQSPGASMNLDEKLQIAEVLDSMRVDIIEAGFPIASNGDFEAVREVSKKVKNSTIAGLARASFKDIDRAWEAVQHAKSPRIHTFIATSPLHMKYKLKKTEDEVLEAINKTVSHARNLCGNIEWSCEDGGRSELDFLYKCIELAINCGASTINIPDTVGYTLPEEFGKIFKNVKNNVVNIDKAILSTHTHNDLGLATANNVAAIKEGARQVECTINGM

SEQ ID NO: 115798 - protein, 237 aa, Unknown
  Bacterial polypetide isolated from the Sargasso Sea
FAHESGIHQDGVLKNRLTYEIIDAKTVGLTDNKISLGKLSGRSAVRARLEEMGYDLSREDLNDAFARFKDLADRKREITDRDLEAIVSEQVQLPESKFQLSHVQVSCGSTSKPTATVTLINTEDDTEDTAVAIGTGPVDAVCEALNALAKVPNELIEFSVKSVTEGIDALGEVTIRIRNKNKIYSGHSADTDVVVAAAHAFVNALNRMIFSEKKNSIHPQFDILENSKKEVLSNPKD

SEQ ID NO: 115799 - protein, 291 aa, Unknown
  Bacterial polypetide isolated from the Sargasso Sea
EFAKTITSIKNNVPNIDKAIISAHCHNDLGLAVANALSGLSAGVRQIECTINGIGERAGNAALEEIVMAIKTRDDLLPYETGIKTELISKASKIVSNATGFPVQFNKAIVGKNAFAHESGIHQDGMLKNRETYEIMTPESVGVKKTSLVMGKHSGRHAFKDKLSDLGYADVTDDVVQAAFGKFKILADKKKHIYDEDIVALVDDSLIIDNKINAINLKSLKVFAGTGEPQRADMTLDVFGEIKKTSKTGDGPVDAIFKCIKELYPHDVKLSLYQVHAVTEGTDAQATVSVK

SEQ ID NO: 115800 - protein, 278 aa, Unknown
  Bacterial polypetide isolated from the Sargasso Sea
NLPATVEMSTANIYGDQIEWMSENFKNRENICLSLHPHNDRGTAIAASEFGLMAGADRVEGTLFGNGERTGNVDIVTLALNMYSQGINPNLDFSQINNVMREVEYCNQLPVHPRHPYAGDLVFTAFSGSHQDAIKKGLNALRSSNEPQWEVPYLPIDPADLGRTYEAVVRINSQSGKGGVAFLLEKDHGVSLPRRLQISMSQKIQKIADETGKEISTSEIWEIFHTNFVMPKSGHSFKNYSLKTSDATDVSDHIKAEIEIDGKNHEISGSGNGPIDAL

SEQ ID NO: 115801 - protein, 95 aa, Unknown
  Bacterial polypetide isolated from the Sargasso Sea
MEKIQIFDTTLRDGEQSPGCSMSAGEKLLLARQLEKLGVDTIEAGFAASSPGDFESVKSIGQEIRESMVVSLCRMVENDVDRGAEALKDAHNWGL

SEQ ID NO: 115802 - protein, 319 aa, Unknown
  Bacterial polypetide isolated from the Sargasso Sea
IYADQIEWVCNNIDNRENLIISLHPHNDRGTAVAATELGVMAGADRIEGTLFGNGERTGNVDLVTLALNMLTQGVDPELDFSNINPIMRETEYCNQLPVHPRHPYAGDLVFTAFSGSHQDAIKKGLNELRNSNQETWEVPYLPIDPKDVGRSYEAVIRINSQSGKGGVAYLLEKDHGLSMPRRLQIEFSQVIQKITDETGKEISASDIWEIFQETYFNENGRFKFLEHHINSRANRKGLQEDEIEIKINDGNKSHTIKGLGNGPIDAMINALSVDLNLEITIADYHQHAISSGSDAKAVAYYEIAYKNQSVWGVGIHQN

SEQ ID NO: 115803 - protein, 194 aa, Unknown
  Bacterial polypetide isolated from the Sargasso Sea
MSNKDRVFIFDTTMRDGEQSPGASMSLEEKIQIARVFDELGIDIIEAGFPIASPGDFEAVSEVSKILKNSIPAGLSRHSVKDIDRAYEALKHAPRFRIHTFISTSPLHMKHKLNMSPEDVYESIGKHVAYARKFTDDVEWSCEDGTRTDMDYMCKTVELAIKNGATTINIPDTVGYTIPSEFTTIIEILLNKVP

SEQ ID NO: 115804 - protein, 261 aa, Unknown
  Bacterial polypetide isolated from the Sargasso Sea
VDPELDFSSINESRRIADMQNQLPVHPRHPYVGDLVYTAFSGSHQDAIKKGLSALSKSDMPLWEVPYLPIDPKDVGRTYEDVIRVNSQSGKGGVSYLLKTDQDLDLPRRLQIEFTRVIQDITDKTGKEITAQEIWGVFREHYLDKNKPFELISFNTSQNAEGKDRTQVEAVIAIEGKEEKFTGEGGGSIEAFTKALNSGLEGTVAVLDYHEHAIGSGADAKAVCYIELSVDGDELWGIGMHSDIVSASLRAIISGLNSAAG

SEQ ID NO: 115805 - protein, 312 aa, Unknown
  Bacterial polypetide isolated from the Sargasso Sea
MSVEEKIQISRVFDEMGIDIIEAGFPISSPGDFEAVSEISKEIKNSIPCGLARALRKDIDACHESLRHSKRFRIHTFISTSPVHMKHKLDMSNDQVLDAIKDSVTYARKFTNDVEWSCEDGTRTDLDFMCKTIELAIKCGATTINIPDTVGYSVPEEFAKTITHIKNKVPNIDKAIISAHCHNDLGLAVANALAGLSAGVRQIECTINGIGERAGNAALEEIVMAIKTRNDLMPYETGIKTELISKASKIVSNATGFPVQFNKAIVGKNAFAHESGIHQDGMLKNRETYEIMTPESVGVKKTSLVMGKHSGR

SEQ ID NO: 115806 - protein, 231 aa, Unknown
  Bacterial polypetide isolated from the Sargasso Sea
QIAGLARAKHEDIEAAWNAVKKAKNPRIHTFIATSPIHMEFKLKLTEDQVLDKIKDSVSFARNLCPNIEWSCEDGGRSSIDFLYRCIELAIESGASTINIPDTVGYTLPFEFGEIIKKVKNNVPNIDKAIISVHCHNDLGLAVANSLNAVENGARQIECTINGLGERAGNAALEEVVMAMKVRSDLLKVQSNINTSAISKTSKLVSSITGFPVQPNKAIVGANAFAHESGI

SEQ ID NO: 115807 - protein, 65 aa, Unknown
  Bacterial polypetide isolated from the Sargasso Sea
MSKDPGRILIFDTTLRDGEQSPGASLNLEEKLAIAHQLARLGVDVIEAGFPFASPGDFKAVNKIS

SEQ ID NO: 115808 - protein, 261 aa, Unknown
  Bacterial polypetide isolated from the Sargasso Sea
MTKDPGRILIFDTTLRDGEQSPGASLNLEEKLAIAHQLARLGVDVIEAGFPFASPGDFKAVNKIANAVGKENGPIICGLARASQGDIKACYEAVSPAPRKRIHTFIATSDIHLKHKLKKSRKDVLQIVPEMVNYAKSLVDDIEFSCEDASRSDPDFLYEVIQLAISAGATTINIPDTVGFTTPSEFGKLIADINKNVSNIDEAVISVHGHNDLGLAVANFLEAVKNGARQLECTINGIGERAGNASLEELVMALHVRKEFF

SEQ ID NO: 115809 - protein, 282 aa, Unknown
  Bacterial polypetide isolated from the Sargasso Sea
MEEVVMAIKTRNDLMPYNTGIKTELISKASKIVSNATGFPVQFNKAIVGKNAFAHESGIHQDGMLKNRETYEIMTPESVGVKKTSLVMGKHSGRHAFKDKLSDLGYSDLTDDIIQAAFGKFKVLADKKKHIYDEDIVALVDDSLIVDNKINAINLKSLKVFAGTGEPQKAEMTLDVYGDIKNTTETGDGPVDAIFKCIKKLFPHDVKLSLYQVHAVTEGTDAQATVSVKIEENDRTTVGQSADTDTLVASANAYLNALNKMLIKREKKAPSQNIKHQKVKGI

SEQ ID NO: 115810 - protein, 322 aa, Unknown
  Bacterial polypetide isolated from the Sargasso Sea
DPDFLYEVIQLAISAGATTINIPDTVGFTTPSEFGKLIADINKNVPNIDEAVISVHGHNDLGLAVANFLESVKNGARQLECTINGIGERAGNASLEELVMALHVRKSFFNNFFKRTPDSPTPLTAIRTEEITKTSRLVSNLTGMTVQPNKAIVGANAFAHESGIHQDGVLKNRLTYEIIDAKTVGLSDNKISLGKLSGRSAVRARLEEMGYDLSREDLNDAFARFKDLADRKREITDRDLEAIVSEQVQLPEAKFQLSLVQVSCGNASKPTATITLLNTEDNTEQTAVSIGTGPVDAVCEALNKLAKVPNELIEFSVKSVTE

SEQ ID NO: 115811 - protein, 185 aa, Unknown
  Bacterial polypetide isolated from the Sargasso Sea
MTQDTNNIKIFDTTMRDGEQSPGASMNIEEKIKIAQALETLGVDIIEAGFPAASKGDFNAVKEISSIIKKSQVCALSRASQNDIQSAADALKNAAQPRIHTFISTSELHMKHKLQLDSDQVYQKVIDSVSFARNLCDDIEWSCEDGTRTNLDFMCKTVEAAIKNGASTINIPDTVGYSVPEEFTH

SEQ ID NO: 115812 - protein, 214 aa, Unknown
  Bacterial polypetide isolated from the Sargasso Sea
MSKDPGRVLIFDTTLRDGEQSPGASLNLEEKLAIAHQLARLGVDVIEAGFPFASPGDFKAVNKIANAVGKENGPIICGLARASEGDIKACYEAVSPAPKKRIHTFIATSDIHLKHKLKKSRKDVLQIVPEMVNYAKSLVDDIEFSCEDASRSDPDFLYEVIQLAISAGATTINIPDTVGFTTPSEFGKLITDINTNVPNIDEAVISVHGHNDLG

SEQ ID NO: 115813 - protein, 164 aa, Unknown
  Bacterial polypetide isolated from the Sargasso Sea
MSNDTASEKVVIFDTTLRDGEQSPGISLDVGEKLEIAGQLARLGVDYIEAGFPIASQGDFDAVHAIASNVSGPVICGLSRTSYKDIDRCWEAIEPAEKRRIHTFIATSPTHMEHKLKMTPEQVLAEAASAVGRAREYTDDVEFSPEDASRSDFDFMCDVLPAAV

SEQ ID NO: 115814 - protein, 276 aa, Unknown
  Bacterial polypetide isolated from the Sargasso Sea
FPIASPGDFEAVSEVSKILKNSIPAGLSRHSVKDIDRAFEALKHAPRFRIHTFISTSPLHMKHKLNMSPEDVYESIGKHVTYARNLTDDVEWSCEDGTRTDMDYMCKTVELAIKNGATTINIPDTVGYTIPSEFTTIIETLLNKVPNIDKAILSTHCHNDLGLAVANSLAGVQAGARQIECTINGLGERAGNAALEEVVMAIKTRPDLMPYETGINTTLLSKASKIVSNATGFPVQYNKAIVGKNAFAHEAGIHQDGMLKNRQTYEIMTPESVGVK

SEQ ID NO: 115815 - protein, 62 aa, Unknown
  Bacterial polypetide isolated from the Sargasso Sea
MSKDPGRILIFDTTLRDGEQSPGASLNLEEKLAIAHQLARLGVDVIEAGFPFASPGDFKAVN

SEQ ID NO: 115816 - protein, 312 aa, Unknown
  Bacterial polypetide isolated from the Sargasso Sea
MSKENLIIFDTTLRDGEQSPGASMDISEKVQIAHALEELNVDIIEAGFPIASPGDYKAVKEIAETINNSGVCALARALDKDIESAAKALENAKNPRIHTFIATSPIHMEKKLNMSPAKVIATAVHAVELSKQFTDDIEFSPEDAGRSELDFLYEIIEATIDAGAKTINIPDTVGYNLPHQFGDLIRNIIANVKNSDNAIFSVHCHNDLGLAVANSLAAVSNGARQVECTINGLGERAGNAALEEIVMSVKTRRDMFHCNTRINTKKILKCSRLVAGITGFPVQPNKAIVGKNAFAHESGIHQDGIIKSRETY

SEQ ID NO: 115817 - protein, 227 aa, Unknown
  Bacterial polypetide isolated from the Sargasso Sea
MTEKIYIFDTTLRDGEQSPGATMTLEEKLQIAEVLDEMNVDIIEAGFPIASNGDFEAVSEISKNIKNSTIAGLARANLKDIERAWEAIKFAKSPRIHTFIATSPLHMKFKLKKTEEEVLESIKKTVSYARNLCSNIEWSCEDAGRSDLEFLYKCIELAITCGATTINIPDTVGYTLPQEFGKIFNQVKNNVSNIDKAILSSHTHNDLGLATANNVAAIQEGARQIEC

SEQ ID NO: 115818 - protein, 266 aa, Unknown
  Bacterial polypetide isolated from the Sargasso Sea
SMNVDIIEAGFPIASNGDFEAVSEVSKRVKNSTIAGLARASFKDIDRAWGAVQHAKSPRIHTFIATSPLHMKYKLKKTEKEVLEAIQKTVSYARNLCDNIEWSCEDGGRSELEFLYQCIELAINSGASTINIPDTVGYTLPEEFGKIFKNVKNNVPNIDKAILSTHTHNDLGLATANNVAAIKEGARQVECTINGMGERAGNSSLEEIVMTLKVKKDLMPFHTDIKTESIMKASRLVSSITGFPVQPNKAIVGANAFAHEAGIHQD

SEQ ID NO: 115819 - protein, 105 aa, Unknown
  Bacterial polypetide isolated from the Sargasso Sea
MSNRVIIFDTTLRDGEQALAASLSVKEKLQIAMALERLGVDVMEVGFPVSSPGDFESVQTIARTIKNSRVCALSRALEKISMPPPKHYRLPNSSVFIPLSPPRLS

SEQ ID NO: 115820 - protein, 270 aa, Unknown
  Bacterial polypetide isolated from the Sargasso Sea
LGLNMFTQGINPELDFSDINNLIETAEFCNQIPVHQRHPYAGLLVHTAFSGSHQDAIRKGMEAISKSNKLHWEVPYLPIDPSDIGRTYEAIIRVNSQSGKAGSAWLLEQEHNINIPRGAQIQFSQVVQNIADKSGKEITSDMIWSIFEQEFLKKGKFSLLKFKSKKISKGDNTEFVEATIENNGEKIKISSTGNGPISAFVNAMRDTFKLTFMLNDFGQNTRSSGSSAEAAAYIEIKVPDENGESVFGVGIDTSITLAPIKAVISAINRI

SEQ ID NO: 115821 - protein, 279 aa, Unknown
  Bacterial polypetide isolated from the Sargasso Sea
SDVNIQVLTQARNELIEKTFQSLEGAKNAIIHFYNSTSTLQRRVVFNQDKEGIKNIAMNAALKIKELAEKNPSTDWSFEYSPESFTGTEIDYAAEICDSVVKILKDSTNHKIIINLPATVEMSTPNIYGDQIEWMHCNLKERDNICLSLHPHNDRGTAVAAAEFGVMAGADRIEGTLFGNGERTGNVDIVTIALNMLTQGIDPKLDFSNINSVMREVEFCNQLPVHPRHPYAGDLVFTAFSGSHQDAIKKGFQAMKTSNDPKWAVPYLPIDPADLAEVR

SEQ ID NO: 115822 - protein, 295 aa, Unknown
  Bacterial polypetide isolated from the Sargasso Sea
DKKLRFFSMLVELGFKQIEIGFPSASETEFKFVRELVNQNLIPDDVQIQVLTQSREHLIEKTFESVADCKKVILHLYNSTSTLQRKVVFNKDKKGITKIATEGAALVKKLSEEAKNTNWQFQYSPESFTGTELEYALEVCNEVNEIWQPTKNRKSIMNLPATVELSTPNIYADQIEWMSENLKNRESIILSLHPHNDRGTAVAAAELGLMAGADRIEGTLFGNGERTGNVDIVSLALNQLTQGVDPKLDFSNINKIMREVEYCNQLPVHPRHPYAGDLVFTAFSGSHQDAIKKRF

SEQ ID NO: 115823 - protein, 303 aa, Unknown
  Bacterial polypetide isolated from the Sargasso Sea
DAVKDSVTYARKFTDDVEWSCEDGTRTNLDFMCKTIELAIKCGAKTINIPDTVGYSIPEEFAKTITHIKNNVPNIDKAIISAHCHNDLGLAVANALAGLSAGVRQIECTINGIGERAGNAALEEIVMAIKTRNDLMPYETGIKTELISKASKIVSNATGFPVQFNKAIVGKNAFAHESGIHQDGMLKNRETYEIMTPESVGVKKTSLVMGKHSGRHAFKDKLNDLGYTDVTDDVIQAAFGKFKILADKKKHIYDEDIVALVDDSLIIDNKINAINLKSLKVFAGTGEPQRAEMTLDVFGEVKK

SEQ ID NO: 115824 - protein, 249 aa, Unknown
  Bacterial polypetide isolated from the Sargasso Sea
MKESREIIIFDTTLRDGEQAPGCSMTMGEKLKIAHALKELNVDVIEAGFAAASPGDFDAVNAIASEIDGPTICSLARCNESDIEKAYEALKVNKNRRVHVFVATSEIHLKHKLNMAKDEVLKAAYEGVKMAKSFCENVEFSPEDASRTDHGFLTEVVNAAIEAGATTINVPDTVGYTIPYEFGELFKHLISNCNDAENVIFSVHCHDDLGLSVANSLAAVESGARQIECTINGIGERAGNTSLEEVCMA

SEQ ID NO: 115825 - protein, 288 aa, Unknown
  Bacterial polypetide isolated from the Sargasso Sea
ARQIECTINGIGERAGNAALEEVVMAMRTRNDLMPYSTGINTKLLSKASKVVSNATGFPVQFNKAIVGKNAFAHESGIHQDGMLKNRNTYEIMTPESVGVKKTSLVMGKHSGRHAFRDKLADMGYVSITDDIIDTAFGKFKILADKKKHVYDEDIAALVDDSLIKEDNVIKLKSLKVFAGTGEPQKAEMKLEVFGDLKDASETGDGPVDAIFKCIKKIYPHNVNLQLYNVHAVTEGTDAQATVSVRIEEEGKTTVGQAANTDTLVASADAYLNALNKMIIKRKKTAPE

SEQ ID NO: 115826 - protein, 144 aa, Unknown
  Bacterial polypetide isolated from the Sargasso Sea
MLQTPSTKYSAFERIDLPDRKWPSNLIHSAPIWCSVDLRDGNQALVEPMGPERKRRMFQRLVDVGFKEIEVGFPSASQTDFDFVRSLIEENLIPDDVVIQVLTQARRHLIDRTFESLVGVKRAIVHLYNSTSTLQRRVVFNADR

SEQ ID NO: 115827 - protein, 293 aa, Unknown
  Bacterial polypetide isolated from the Sargasso Sea
KTINIPDTVGYTVPSEFKKIIETLINKVPNIDQAILSTHCHNDLGLAVANSLAGVSAGARQIECTINGIGERAGNAALEEIVMAMKTRNDLMPFKTGINTKLLSKASRVVSNATGFPVQFNKAIVGKNAFAHESGIHQDGMLKNRNTYEIMTPESVGVKQTSLVMGKHSGRHAFKDKLTDLGYVDITDDVIQIAFGKFKVLADKKKHIYDEDIAALVDDSLIKEDNVIVLKSLKVFAGTGEPQRADMTLEVYGEMKKSTETGDGPVDAIFKCIKKLYPHEVKLQLYQVHAVQK

SEQ ID NO: 115828 - protein, 292 aa, Unknown
  Bacterial polypetide isolated from the Sargasso Sea
VDIIEAGFPIASNGDFEAVCEVSKKVKNSTIAGLARASLKDIDRAWEAVKYAKSPRIHTFIATSPLHMKYKLKKTEDEVLEAINKTVKYARNLCDNIEWSCEDGGRSELDFLYKCIELAISCGATTINIPDTVGYTLPEEFGKIFKNVKNNVNNIDKAILSTHTHNDLGLATANNVAAIKEGARQVECTINGMGERAGNSSLEEIVMTLKVKKDLMPYHTDIKTESIMKASRLVSSITGFPVQPNKAIVGANAFAHEAGIHQDGMLKHAGTYEIMTPESIGLNKSSLVLGKH

SEQ ID NO: 115829 - protein, 167 aa, Unknown
  Bacterial polypetide isolated from the Sargasso Sea
MTEKIYIFDTTLRDGEQSPGASMNLDEKLQIAEVLDSMKVDIIEAGFPIASNGDFEAVSEVSKHVKNSTIAGLARASFKDIDRAWEAVQHAKSPRIHTFIATSPLHMKYKLKKTEEEVLEAIQKTVSHARNLCDNIEWSCEDGGRSELEFLYQCIELAINSGASTYK

SEQ ID NO: 115830 - protein, 246 aa, Unknown
  Bacterial polypetide isolated from the Sargasso Sea
MKDKDRIIIFDTTMRDGEQSPGASMSLEEKIQIARVFDELGIDIIEAGFPIASPGDFEATIEVSKILKNSIPAGLARHSKKDIDRCYEALKNAKRFRIHTFISTSPLHMKHKLNKSPDEVYESIKEHVTYARKFTDDVEWSCEDGTRTDMDYMCKTVELAIKCGAKTINIPDTVGYTVPSEFTKIIQTLMNKVPNIDKAILSTHCHNDLGLAVANSLAGVQAGARQIECTINGKRERAGNAALEEV

SEQ ID NO: 115831 - protein, 285 aa, Unknown
  Bacterial polypetide isolated from the Sargasso Sea
MGVDICEAGFPIASEGDFEAVSKIGKTVKSAKVCGLARASKLDIERCWRAVEKSINPRIHTFIGTSPLHREFQVKLSKDEVLDKVFDTVTFAKSFCDDIQWSPMDATRTESEFLVEVVKIAIQAGASTINIPDTVGYTAPKESANIIKNLFLKIPELKNIIVSTHCHNDLGMATANSLAAVEAGARQVECTINGLGERAGNTALEEIVMALKVRKDILPYETNMITNKLIQASRLVSKVSGFPVQFNKAVVGKNAFAHESGIHQDGMLKHAGTFEIMKLRRYRFN

SEQ ID NO: 115832 - protein, 277 aa, Unknown
  Bacterial polypetide isolated from the Sargasso Sea
TMRDGEQSPGASMSLEEKLQISRVFDELGVDVIEAGFPIASPGDFEAVTEISKTLKKSIPAGLARATKKDIDACHQALKHAKNFRIHTFISTSPLHMKHKLNKSPNEVLESIKESVTYARKFTNDVEWSCEDGTRTDMDYMCKTVELAIKCGAKTINIPDTVGYTVPSEFKKIIETLINKVPNIDKAILSTHCHNDLGLAVANSLAGVMAGARQIECTINGIGERAGNAALEEVVMAMRTRHDLMPYTTNINTKLLSKASKVVSNATGFPVQFNKAK

SEQ ID NO: 115833 - protein, 175 aa, Unknown
  Bacterial polypetide isolated from the Sargasso Sea
MTDKNRVYIFDTTMRDGEQSPGASMSLEEKIQIARVFDELGIDIIEAGFPIASPGDFEAVTEISKILKKSVPAGLSRHSKKDIDRCYEALKHSKRFRIHTFISTSPLHMKHKLNKSPEEVYESIKEHVTYARKFTDDVEWSCEDGTRTDMDYMCKTVELAIKCGARTINIPDTVG

SEQ ID NO: 115834 - protein, 298 aa, Unknown
  Bacterial polypetide isolated from the Sargasso Sea
TSDIHLKHKLKKSRKDVLQIVPDMVNYAKSLVDDIEFSCEDASRSDPDFLYEVIQLAISAGATTINVPDTVGFTTPSEFGKLIADINKNVPNIDEAVISVHGHNDLGLAVANFLEAVKNGARQLECTVNGIGERAGNASLEELVMALHVRKSFFNSFFKRNSDSPTPLTAIRTEEITKTSRLVSNLTGMTVQPNKAIVGANAFAHESGIHQDGVLKNRLTYEIIDAKTVGLSDNKISLGKLSGRSAVRARLEEMGYDLSREDLNDAFARFKDLADRKREINDRDLEAIVSEQVQLLRG

SEQ ID NO: 115835 - protein, 311 aa, Unknown
  Bacterial polypetide isolated from the Sargasso Sea
TLDMDGVKKIATDGAELIKELVPTVPNTKIIHQYSPESYTQTELPYAMEVCEAVMDIWQPTPENKTIINLPATVEVATPNVYADGIEWMHRNFSKRENVILSLHPHNDRGTGVAATELGILAGADRVEGTLFGNGERTGNVDVITLAMNMVSHGLDSQLDMRNMRELRATAEYCNQLPVHPRHPYAGDLVFTAFSGSHQDAINKGLKAMETQNSEEWDVPYLPIDPADVGASYEAVIRINSQSGKGGIAYIMETEFGVQMPRALQVEFSGAVQKISDSSGEEQTPEDIWKAFDQEYLSAKTPYEFIEHQTR

SEQ ID NO: 115836 - protein, 301 aa, Unknown
  Bacterial polypetide isolated from the Sargasso Sea
GAKTINIPDTVGYTIPSEFTSIIETLINKVPNIDKAILSTHCHNDLGLAVANSLAGVQAGARQIECTINGLGERAGNAALEEVVMAIKTRPDLMPFETGINTTLLNKASKIVSNATGFPVQYNKAIVGKNAFAHEAGIHQDGMLKNRQTYEIMTPESVGVKQTSLIMGKHSGRHAFKDKLNSLGYPDLTDDVVSNAFAKFKVLADKKKHVYDEDIIALVDDSLIIDNKVNAINLKSLKVFAGTGEPQKAEMTLNVYGEIKKASEIGDGPVDAIFKCIKTLYPHNVNLQLYQVHAVTEGTDA

SEQ ID NO: 115837 - protein, 294 aa, Unknown
  Bacterial polypetide isolated from the Sargasso Sea
IFKNVKNNVPNIDKTILSTHTHNDLGLATANNVAAIKEGARQVECTINGMGERAGNSSLEEIVMTLKVKKDLMPFHTDIQTESIMKASRLVSSITGFPVQPNKAIVGANAFAHEAGIHQDGMLKHAGTYEIMTPESIGLNKSSLVLGKHSGKHAFSEKLKELGYEVGDNALMELFGRFKDLADKKKEIFEEDLIALAEDRTSSYDEHIKFVSLEVNAGSVEKAEAKLKIEINDKVVNTKINGNGPVDATFNAIKKLTNTQFKLKLYQVNAITAGTDAQGEVTVRLEDDNLSSQA

SEQ ID NO: 115838 - protein, 231 aa, Unknown
  Bacterial polypetide isolated from the Sargasso Sea
MTKNSNHIKIFDTTLRDGEQSPGASMNIEEKLKIAEALEELKVDIIEAGFPAASKGDFEAVSEISKKIKGSSICALSRASKSDIETAAKALKDANAPRIHTFISTSDLHMKHKLQLNAEEVYQKVIDSVSFARNLCDDVEWSCEDGTRTDMDFMCRTVEAAIKNGASTINIPDTVGYSIPDEFTNIITHLVNNVPNIDKVTISTHCHNDLGLAVANSLAGVRAGARQIECT

SEQ ID NO: 115839 - protein, 290 aa, Unknown
  Bacterial polypetide isolated from the Sargasso Sea
GFKHAPRFRIHTFISTSPLHMKHKLNMSPEDVYESIGKHVAYARKFTDDVEWSCEDGTRTDMDYMCKTVELAIKNGATTINIPDTVGYTIPSEFTTIIETLLNKVPNIDKAILSTHCHNDLGLAVANSLAGVQAGARQIECTINGLGERAGNAALEEVVMAIKTRPDLMPYETGINTTLLSKASKIVSNATGFPVQYNKAIVGKNAFAHEAGIHQDGMLKNRQTYEIMTPESVGVKQTSLVMGKHSGRHAFKDKLNSLGYPDLTDDVVGNAFAKFKVLADKKKHVYDEDI

SEQ ID NO: 115840 - protein, 273 aa, Unknown
  Bacterial polypetide isolated from the Sargasso Sea
VANALSGLSAGVRQIECTINGIGERAGNAALEEIVMAIKTRDDLLPYETGIKTELISKASKIVSNATGFPVQFNKAIVGKNAFAHESGIHQDGMLKNRETYEIMTPESVGVKKTSLVMGKHSGRHAFKDKLSDLGYADVTDDVVQAAFGKFKILADKKKHIYDEDIVALVDDSLIIDNKINAINLKSLKVFAGTGEPQRADMTLDVFGEIKKTSQTGDGPVDAIFKCIKELYPHDVKLSLYQVHAVTEGTDAQATVSVKIEENDRTTVGQSAD

SEQ ID NO: 115841 - protein, 261 aa, Unknown
  Bacterial polypetide isolated from the Sargasso Sea
MKDSREIIIFDTTLRDGEQAPGCSMTIGEKLKIAHALKELNVDVIEAGFAAASPGDYEAVNAIASEIDGPTICSLARCNESDIEKAYEALKVNKNKRIHVFVATSEIHLKHKLNMAKDEVLKAAYEGVKMAKSFCDNVEFSPEDASRTDHGFLTEVVNAAIEAGATTINVPDTVGYTIPYEFGELFKHLISNCTDAENVVFSVHCHDDLGLSVANSLAAVESGARQIECTINGIGERAGNTSLEEVCMAIRTREEYFDFKT

SEQ ID NO: 115842 - protein, 240 aa, Unknown
  Bacterial polypetide isolated from the Sargasso Sea
DFPSANKAIVGANAFAHEAGIHQDGMLKHAGTYEIMTPESIGLNKSSLVLGKHSGKHAFSEKLKELGYEPGDNALMELFGRFKDLADKKKEIFEEDLIALAEDRSSSYDEHIKFVSLEVNAGSVEKHEANLKITMNEETKIIKSNGNGPVDATFNAIKQLTSTDFKLKLYQVNAITAGTDAQGEVTVRLEEQDLSSQAKGSDPDIIVASAKAYINALNRLIFKKTKSIKENSSNLEIRGV

SEQ ID NO: 115843 - protein, 207 aa, Unknown
  Bacterial polypetide isolated from the Sargasso Sea
MDKTNKKYKPYKPVSKENRSWPSKVIENAPIWCSVDLRDGNQALIEPMGDERKKRMFNLLCKIGFKQIEIGFPAASQTDFDFTRYLINEKVIPSDVTIQVLTQARPEIIKRTFEALDGAPNAILHFYNSTSTLQRKVVFDKDKEGVKKIATDAAKLIKELSSDYKNTNWSFEYSPESFTGTELDYATEVCDDVVDILKESSNNKIII

SEQ ID NO: 115844 - protein, 294 aa, Unknown
  Bacterial polypetide isolated from the Sargasso Sea
EQSPGASMSVEEKIQISRVFDEMGIDIVEAGFPIASPGDFEAVSEISKIMKNSIPCGLSRALKKDIDACHESLKHAPRFRIHTFISTSPLHMKHKLEMTNDQVLDAIKESVTYARNFTDDVEWSCEDGTRTDMDFMCKTVELAIKCGAKTINIPDTVGYSIPEEFAKTIKHLKNNVPNIDKAILSAHCHNDLGLAVANALAGVSEGVRQIECTINGIGERAGNAALEEVVMAIKTRNDLMPYNTGIKTELISKASKIVSNATGFPVQFNKAIVGKNAFAHESGIHQDGMLKNRE

SEQ ID NO: 115845 - protein, 312 aa, Unknown
  Bacterial polypetide isolated from the Sargasso Sea
AKALERMHVDIIEAGFPIASPGDFEAVKAVSQLITQSTVCGLARALNKDIDCAADALKPAKSSRIHTFIATSPIHMREKLRMQPEQVVENAVKAVKRAGKYTDDIEFSPEDAGRSEFDFLCQVIEAVINAGATTINIPDTVGYNLPQYFGELIGKLIENVPNSDKATFSVHCHNDLGLAVGNSLAAVINGARQVECTINGLGERAGNAALEEIVMSVRTRRDVFTCDTNIDTSQIVNCSRLVSTITGFPVQPNKAIVGANAFAHESGIHQDGVLKSRETYEIMRAEDVGWNTNKMVLGKHSGRNAFRTRLEE

SEQ ID NO: 115846 - protein, 273 aa, Unknown
  Bacterial polypetide isolated from the Sargasso Sea
PLTAIRTEEITKTSRLVSNLTGMTVQPNKAIVGANAFAHESGIHQDGVLKNRLTYEIIDAKTVGLSDNKISLGKLSGRSAVRARLEEMGYDLSREDLNDAFARFKDLADRKREITDRDLEAIVSEQVQLPEAKFQLSLVQVSCGNASKPTATISLLNTEDNTEDTAVSIGTGPVDAVCEALNKLAKVPNELIEFSVKSVTEGIDALGEVTIRIRSDNKIYSGHSADTDVVVAAATAYVNALNRLVFSEKRNSIHPQFDNLEKSNNKFLSNQAN

SEQ ID NO: 115847 - protein, 314 aa, Unknown
  Bacterial polypetide isolated from the Sargasso Sea
VPNIDKAILSVHCHNDLGLAVANSLAGVSAGARQVECTINGIGERAGNAALEEIVMAIRTRNDLMPYSTGINTELLSKASKVVSNATFPVQFNKAIVGKNAFAHEAGIHQDGMLKNRETYEIMTPESVGVKKTSLVMGKHSGRHAFKEKLSDLGYVDVTDDVIQTAFGKFKILADKKKHVYDDDIAALVDDSMVHEKNAINLKSLKVFAGTGEPQRAEMTLDVYGEIKKTTETGDGPVDSIFNCIKVLYPHDIKLLLYQVHAVTEGTDAQATVSVRIEEEGKTTVGQAADTDTLVASANAYLSALNKMIIKKTK

SEQ ID NO: 115848 - protein, 180 aa, Unknown
  Bacterial polypetide isolated from the Sargasso Sea
MSGQDKIWIFDTTLRDGEQALRASLSHKQKIQLAHAIARLNVDVMEVGFPVSSPGDFESVQSIATQVKGPIICGLARAVSADIEACGQALANAERRRIHTFIATSPLHLQYKLRRTLEQATEQAVAAIQLARRYTDDVEFSCEDAGRTPIDDLCRIVEAAIKAGARTINIPDTVGYTIPQ

SEQ ID NO: 115849 - protein, 164 aa, Unknown
  Bacterial polypetide isolated from the Sargasso Sea
MSAHQSVRIFDTTLRDGEQSPGASMNLTEKIEVAHALSQLGVDIIEAGFPIASPGDFESVREIARAVREPVICGLARCNDTDIDRAWEALAEAARPRIHVFLATSAIHREFKLRMGEDEVVQRAVAGVRRARESCEDVEFSPEDAARTEIDFLCRVVEAVIDVE

SEQ ID NO: 115850 - protein, 295 aa, Unknown
  Bacterial polypetide isolated from the Sargasso Sea
AGADRVEGTLFGNGERTGNVDIVTLGLNLFTQGVDPDLDFSNINSLMDTAVHCNQLPIHARHPYAGELVHTAFSGSHQDAINKGMKAMETANSPLFEVPYLPIDPKDIGRDYEAIIRVNSQSGKGGVSYILENDYSIRLPKPAQAQFSQVIQKITDETSQEITPEEIWKAFQSTFIEQTGPFQLISFSSEAASRSNDLERMTAKVAFKGAEYEIKGTGNGPIAAFIQGIRDTFDLKFRLKDYTEHTRTAGSASEAAAYIELKVPNENGASVFGVGIDTSITLAPIKAVISALNRI

SEQ ID NO: 115851 - protein, 266 aa, Unknown
  Bacterial polypetide isolated from the Sargasso Sea
AGFPIASPGDFEAVSEVSKILKNSIPAGLSRHSVKDIDRAYEALKHAPRFRIHTFISTSPLHMKHKLNMSPEDVYESIGKHVAYARKLTDDVEWSCEDGTRTDMDYMCKTVELAIKNGATTINIPDTVGYTIPSEFTTIIETLLNKVPNIDKAILSTHCHNDLGLAVANSLAGVQAGARQIECTINGLGERAGNAALEEVVMAIKTRPDLMPYETGINTTLLSKASKIVSNATGFPVQYNKAIVGKNAFAHEAGIHQDGMLKNRQT

SEQ ID NO: 115852 - protein, 278 aa, Unknown
  Bacterial polypetide isolated from the Sargasso Sea
MSLFQHTVTMTLWLAVANSLTAITAGARQIEGAINGIGERAGNTSTEEIIMAVKTRQDQFGVEIQAETQEIFETSRLVSKLTGYPVQYNKAVVGKNAFSHESGIHQHGYLRNTTTYEIMSPDSVGQEAKIILGKHSGRAGFKDALDKLGISLNNDAFNNAFDTFKKIADRKGEIVENELRAIVGQVESSSDSPKLVSVSVNSKDEFASASVTLKVGNDEITEEATGDGMIHAAFTAVKSILKSDATLIDYRVESITKGADATAEIVTIINDGHLMKQG

SEQ ID NO: 115853 - protein, 187 aa, Unknown
  Bacterial polypetide isolated from the Sargasso Sea
MKDRLVIFDTTLRDGEQSPGASMNINEKVRIAKALEKLKVDVIEAGFPIASDGDFKAVQEVSKNIKDSVICALARAIDKDIERAGNAISKASKSRIHTFIATSDIHMEKKLNMTKEQVIDQAVKSIKKIRKYTDDIEFSPEDAGRSEFNFLCEIIEKAINAGANTINIPDTVGYNIPVQFGDLIKEL

SEQ ID NO: 115854 - protein, 285 aa, Unknown
  Bacterial polypetide isolated from the Sargasso Sea
KLDMTNDQVLDAIKESVTYARKFTNDVEWSCEDGTRTDLDFMCKTIELAIKCGATTINIPDTVGYSIPEEFARTITHIKNNVPNIDKAIISAHCHNDLGLAVANALAGLSAGVRQIECTINGIGERAGNAALEEIVMAIKTRNDLMPYETGIKTELISKASKIVSNATGFPVQFNKAIVGKNAFAHESGIHQDGMLKNRETYEIMTPESVGVKKTSLVMGKHSGRHAFKDKLGDLGYSDLTDDVVQAAFGKFKVLADKKKHVYDEDIIALVDDSLIIDNKINAIN

SEQ ID NO: 115855 - protein, 191 aa, Unknown
  Bacterial polypetide isolated from the Sargasso Sea
MSDKNRIIIFDTTMRDGEQSPGATMSLEEKIQIARCFDELGIDVIEAGFPIASPGDFEAVTEISKVLKKSIPAGLSRATKKDIDACKDSLKHAKRFRIHTFISTSPLHMKHKLNKSPEEVLGLIKESVSYARKFTDDVEWSCEDGTRTDLDYMCKTVELAIKCGAKTINIPDTVGYSVPSEFKKIIETLVN

SEQ ID NO: 115856 - protein, 242 aa, Unknown
  Bacterial polypetide isolated from the Sargasso Sea
MTDKNRIIIFDTTMRDGEQSPGASMSLEEKLQISRVFDELGVDIIEAGFPIASPGDFEAVTEISKTLKRSVPAGLARATKKDIDACHQALKHAKNFRIHTFISTSPLHMKHKLNKSPEEVLESIKDSVTYARKFTDDVEWSCEDGTRTDMDYMCKTVELAIKSGAKTINIPDTVGYTVPSEFKKIIETLINKVPNIDKAILSTHCHNDLGLAVANSLAGVMAGARQIECTINGIGERAGNAA

SEQ ID NO: 115857 - protein, 75 aa, Unknown
  Bacterial polypetide isolated from the Sargasso Sea
MKIRIFDTTLRDGEQTPGVSLSPEKKLNIAKKLDVLGIDAIETGFPVISDGERNAVKMIANENLQSELCGLARTN

SEQ ID NO: 115858 - protein, 283 aa, Unknown
  Bacterial polypetide isolated from the Sargasso Sea
PGDFEAVTEVSKILKKSIPAGLSRHSKKDIDRAYEALKHAPRFRIHTFISTSPLHMKHKLNMSPDDVYESIGQHVAYARKFTDDVEWSCEDGTRTDMDFMCKTVELAIKNGATTINIPDTVGYTIPSEFTKIIETLLNKVPNIDQAILSTHCHNDLGLAVANSLAGVQAGARQIECTINGLGERAGNAALEEVVMAIKTRPDLMPYETGINTTLLSKASKIVSNATGFPVQYNKAIVGKNAFAHEAGIHQDGMLKNRQTYEIMTPESVGVKQTSLVMGKHSGR

SEQ ID NO: 115859 - protein, 248 aa, Unknown
  Bacterial polypetide isolated from the Sargasso Sea
MTKIINDSASKYRPFKSIDIDNRTWPSNTITQSPMWCSVDLRDGNQALIEPMGEERKLRMFSLLIEIGFKEIEVGFPSASQTDFDFVRKIITENLIPNDVTIQALTQARPELIKKTFEALEGAKKAIVHVYNSTSTLQRKVVFKSDEAGIKKIATDGAKWVKEESELYDETDWSFEYSPESFTGTELPYAVEVCNAVNEIWEPNDQKKTIMNLPATVEMASPNTYADQIEWMCRNLQDRENVIVSLHP

SEQ ID NO: 115860 - protein, 211 aa, Unknown
  Bacterial polypetide isolated from the Sargasso Sea
MSDKNRVFIFDTTMRDGEQSPGASMSLEEKIQIARVFDELGVDIIEAGFPIASPGDFEAVSEVSKILKNSIPAGLARHSKKDIDRCFEALKHAPRFRIHTFISTSPLHMKHKLNKTPEQVYDSIKEHVTYARKFTDDVEWSCEDGTRTDMDYMCKTVELAIKCGAKTINIPDTVGYTVPSEFTKIIQTLLNKVPNIDQAILSTHCHNDLGL

SEQ ID NO: 115861 - protein, 291 aa, Unknown
  Bacterial polypetide isolated from the Sargasso Sea
LARATKKDIDACHQALMYAKNFRIHTFISTSPLHMKHKLNKSPEEVLESIKESVTYARKFTDDVEWSCEDGTRTDMDYMCKTVELAIKCGAKTINIPDTVGYTVPSEFRKIIETLINKVPNIDKAILSTHCHNDLGLAVANSLAGVMAGARQIECTINGIGERAGNAALEEVVMAMRTRHDLMPYTTNINTKLLSKASKVVSNATGFPVQFNKAVVGKNAFAHESGIHQDGMLKNRNTYEIMTPESVGVKKTSLVMGKHSGRHAFRDKLSDMGYVDVTDDIINTAFGNLKF

SEQ ID NO: 115862 - protein, 298 aa, Unknown
  Bacterial polypetide isolated from the Sargasso Sea
EDVIISTHCHNDLGLAVANSLTAITAGARQIEGAINGIGERAGNTSTEEIIMAIKTRQDQFGVNIKAETTEIFETSRLVSKLTGYPVQYNKAVVGKNAFSHESGIHQHGYLRNTTTYEIMSPDSVGQEAKIILGKHSGRAGFKDALENLNISLDDDSFNNAFDTFKKIADRKGEIVENELRAIVGQVENKENSTKLVSVSVNSKDEFASAEVTLKVEGKEVTEEATGDGMIHAAFTAVKKILNSDAKLIDYRVESITKGSDATAEIVTIINDGHLMKQGRAVSTDVVQGSVESFLNAL

SEQ ID NO: 115863 - protein, 291 aa, Unknown
  Bacterial polypetide isolated from the Sargasso Sea
MKDSREIIIFDTTLRDGEQAPGCSMTIGEKLKIAHALKELNVDVIEAGFAAASPGDYEAVNAIASEIDGPTICSLARCNESDIEKAYEALKVNKNRRIHVFVATSEIHLKHKLNMAKDEVLKAAYEGVKMAKSFCDNVEFSPEDASRTDHGFLTEVVNAAIEAGATTINVPDTVGYTIPYEFGELFKHLISNCTHAENVVFSVHCHDDLGLSVANSLAAVESGARQIECTINGIGERAGNTSLEEVCMAIRTREEYFDFKTSIDSTKLYPTSRLVSSITGMHVPRNKAIGW

SEQ ID NO: 115864 - protein, 308 aa, Unknown
  Bacterial polypetide isolated from the Sargasso Sea
YARKFTDDVEWSCEDGTRTNLDFMCKTIELAIKCGATTINIPDTVGYSIPEEFARTITHIKNNVPNIDKAIISAHCHNDLGLAVANALAGLSAGVRQIECTINGIGERAGNAALEEIVMAIKTRNDLMPYETGIKTELISKASKIVSNATGFPVQFNKAIVGKNAFAHESGIHQDGMLKNRETYEIMTPESVGVKKTSLVMGKHSGRHAFKDKLNDLGYTDVTDDVIQAAFGKFKVLADKKKHIYDEDIVALVDDSLIIDNKINAINLKSLKVFAGTGEPQRAEMTLDVFGEVKKTTQNGDGPVDAIF

SEQ ID NO: 115865 - protein, 261 aa, Unknown
  Bacterial polypetide isolated from the Sargasso Sea
MRDGEQSPGASMSLEEKIQIARVFDELGIDIIEAGFPIASPGDFEAVTEVSKVLKNSIPAGLSRHSKKDIDRCYEALKHAPRFRIHTFISTSPLHMKHKLNKSSEEVYESIKEHVTYARKFTDDVEWSCEDGTRTDMDYMCKTVELAIKCGAKTINIPDTVGYTVPSEFTKIIQTLMNKVPNIDKAILSTHCHNDLGLAVANSLAGVQAGARQIECTINGIGERAGNAALEEVVMAIKTRNDLMPYTTGINTTLLSKASKI

SEQ ID NO: 115866 - protein, 281 aa, Unknown
  Bacterial polypetide isolated from the Sargasso Sea
MANEKVKILDTTLRDGEQSAGIGMTVEEKMEIAKQLEKLKVDIIEAGFAASSPGDFQAVENIAKEVRSSVICSLSRAHPNDVDQAWGAIKQAESPRIHVFLSSSEIQVLHQLRKNREEVMDMAVAMVTRAKSYCDDVEFSPMDATRTNPEYLYKMLEAVIKAGATTINIADTVGYAIPSNFAELITDIRNKIPGIEKTTLSVHCHNDLGLAVSNTLAAIQAGVRQVEGCINGLGERAGNASLEEIIMGLDTRKDLFNIDCNIDTTQLYPTSRLVSRITGMA

SEQ ID NO: 115867 - protein, 174 aa, Unknown
  Bacterial polypetide isolated from the Sargasso Sea
MEKIQIFDTTLRDGEQSPGCSMSAGEKLLLARQLEKLGVDTIEAGFAASSPGDFESVRSIGQEICESMVVSLCRMVENDVDRGAEALKDAHKWGLHTFIASSPLHMKHKLQMEPEEVLKATTKCVERAKKYTDNVEFSAEDATRSEPEFLVQLFSEAVRAGAVVLNVPDTVGYT

SEQ ID NO: 115868 - protein, 287 aa, Unknown
  Bacterial polypetide isolated from the Sargasso Sea
MCKTVELAIKCGAKTINIPDTVGYTIPSEFTKIIETLLNKVPNIDKAILSTHCHNDLGLAVANSLAGVQAGARQIECTINGLGERAGNAALEEVVMAMKTRPDLMPYETGIETTLLSKASKIVSNATGFPVQYNKAIVGKNAFAHEAGIHQDGMLKNRQTYEIMTPESVGVKQTSLVMGKHSGRHAFKDKLTSLGYPDLTDDVVDNAFAKFKILADKKKHVYDEDIIALIDDSLIIDNKVSAINLKSLKVFAGTGEPQRAEMTLDVFGEVKKASETGDGPVDAIFKC

SEQ ID NO: 115869 - protein, 121 aa, Unknown
  Bacterial polypetide isolated from the Sargasso Sea
MSDKNRIIIFDTTMRDGEQSPGASMSLEEKLQISRVFDELGVDVIEAGFPIASPGDFEAVTEISKSLKKSIPCGLARATIKDIDACRDSLKHAKNFRIHTFISTSPLHMKHKLNKSPRSGN

SEQ ID NO: 115870 - protein, 317 aa, Unknown
  Bacterial polypetide isolated from the Sargasso Sea
NKSPEEVLEAIKESVSYARKFTDDVEWSCEDGTRTDMDYMCKTVELAIKSGAKTINIPDTVGYTVPSEFKKIIETLRNKVPNIDKTVISTHCHNDLGLAVANSLAGVMAGARQIECTINGIGERAGNAALEEVVMAMRTRHDLMPYTTNINTKLLSKASKVVSNATGFPVQFNKAVVGKNAFAHESGIHQDGMLKNRNTYEIMTPESVGVHKTSLVMGKHSGRHAFKDKLNDLGYVGVTDDVIQTAFGKFKVLADKKKHIYDEDIAAIVDDSLVSEDNVIKLKSLKVFAGTGEPQKAEMTLEVFGEVKKHLKQEMGL

SEQ ID NO: 115871 - protein, 272 aa, Unknown
  Bacterial polypetide isolated from the Sargasso Sea
PVSKNKIIINLPATVEMSTPNIYGDQIEWMSKNLKNRNDICLSLHPHNDRGTAVAASEFGIMAGADRVEGTLFGNGERTGNVDIVTIALNMLTQGVEPDLDFSNINSVMREVEYCNQLPVHPRHPYAGDLVFTAFSGSHQDAIKKGFQAIKKSNDPKWEVPYLPIDPADLGRNYEAVVRINSQSGKGGVAFLLEKDHGVSLPRRLQISLSQRIQKLADDTGKEISSSQIWDIFEKKYLQPVNNYSYIKHSSSSKDDLHKLELTMNMNNEEIT

SEQ ID NO: 115872 - protein, 138 aa, Unknown
  Bacterial polypetide isolated from the Sargasso Sea
MSDRVYIFDTTLRDGEQSPGATMNLDEKMQIAQLLEEMQVDIIEAGFPIASNGDFEAVSEISKNIKNSTIAGLARAKLADIDRAWEAVKNAKSPRIHTFIATSPIHMKYKLKKTEEEVLESIKHTVTHARNLCDNIEW

SEQ ID NO: 115873 - protein, 273 aa, Unknown
  Bacterial polypetide isolated from the Sargasso Sea
EEWGATVEHPMIINLPSTVEMATPNVYADQIEYFIRQFPKRDSIIVSLHTHNDRGTGIAATELGLMAGAQRVEGTLFGNGERTGNCDIVTVAMNLFSQGIDPCLDFRNMPEIREIVESINKLPVHERHPYAGDLVFTAFSGSHQDAIKKGMKKVDRDRWEVPYLPIDPADVGSSYKETVRVNSQSGKGGIGFVLEEFYGIALPKSILVQFSQVVQKLTEQLDREVKPSEILEALLAEYVDETGLYQLVDYDLSSGISADQKSIARVKVADNLV

SEQ ID NO: 115874 - protein, 283 aa, Unknown
  Bacterial polypetide isolated from the Sargasso Sea
FCINAINLAKKFTDDVEFSPEDAGRSEFDFLCEVIEAAIDSGATTINIPDTVGYNMPHQFGSLINSLIKKISNSNKAIFSVHCHNDLGLAVANSLSAVLNGARQIECTINGLGERAGNAALEEIVMTVKTRRDIFDCNTSIDTTKIMKASRLVSGITGFPVQPNKAIVGKNAFAHESGIHQDGVIKSRETYEIMKAEDIGLVSNKLVLGKHSGRNAFKQKVKDLNIFPKTVQEFDELFYRFKDLADKKHEIFDEDIIQLATNIEFKAHNISFKHMSVVSETGK

SEQ ID NO: 115875 - protein, 326 aa, Unknown
  Bacterial polypetide isolated from the Sargasso Sea
IPDTVGYTIPSEFTKIIETLLNKVPNIDKAILSTHCHNDLGLAVANSLAGVQAGARQIECTINGLGERAGNAALEEVVMAMKTRPDLMPYETGIETTLLSKASKIVSNATGFPVQYNKAIVGKNAFAHEAGIHQDGMLKNRQTYEIMMPESVGVKQTSLVMGKHSGRHAFKDKLTSLGYPDLTDDVVDNAFAKFKILADKKKHVYDEDIIALIDDSLITDNKVSAINLKSLKVFAGTGEPQKAEMTLDVFGEVKKASETGDGPVDAIFKCIKKLYPHEVNLQLYQVHAVTEGTDAQATVSVKIEENGKTTVGQAADTDTLVASANA

SEQ ID NO: 115876 - protein, 140 aa, Unknown
  Bacterial polypetide isolated from the Sargasso Sea
MAEKDKVFIFDTTMRDGEQSPGASMSVEEKIQISRVFDEMGIDIIEAGFPISSPGDFEAVSAISKSVKNSIPCGLARATKKDIDACHESLKFAKRFRIHTFISTSPVHMKHKLNMTDEQVLEAIKESVTYAKKFTDDVEW

SEQ ID NO: 115877 - protein, 231 aa, Unknown
  Bacterial polypetide isolated from the Sargasso Sea
LCPESGIHQDGVLKNPLTYEIIDARTVGLSDNRISLGKLSGRSAVRARLEELGYDLTREDLDEAFARFKDLADRKREITDRDLEAIVSEQVQQPDARFVLKLVQVSCGSSLRPTATVTLADEEDGERTGSAVGTGPVDAVCRALNDLAGVPNELVEFSVKSVTEGIDAMGEVTIRLRRDGSLFSGHSADTDVVVAAGQAFINALNRLVAGMERRPLHPQKDVVSVETRPSL

SEQ ID NO: 115878 - protein, 275 aa, Unknown
  Bacterial polypetide isolated from the Sargasso Sea
FAKTITSIKNNVPNIDKAILSAHCHNDLGLAVANALSGLSAGVRQIECTINGIGERAGNAALEEIVMAIKTRDDLLPYETGIKTELISKASKIVSNATGFPVQFNKAIVGKNAFAHESGIHQDGMLKNRETYEIMTPESVGVKKTSLVMGKHSGRHAFKDKLSDLGYADVTDDVVQAAFGKFKILADKKKHIYDEDIVALVDDSLIIDNKINAINLKSLKVFAGTGEPQRADMTLDVFGEVKKTSQTGDGPVDAIFKCIKELYPHDVKLSLYQVH

SEQ ID NO: 115879 - protein, 170 aa, Unknown
  Bacterial polypetide isolated from the Sargasso Sea
MNKENNYIKIFDTTLRDGEQSPGASMNIEEKLKIAEALEDLKVDIIEAGFPAASKGDYEAVSEISKKIKNSSICALSRASKNDIQTAADALKNAAAPRIHTFISTSELHMKHKLQLNSDEVYQKVIDSVSFARNLCDDVEWSCEDGTRTDLDFMCKTVEAAIKSGASTIH

SEQ ID NO: 115880 - protein, 320 aa, Unknown
  Bacterial polypetide isolated from the Sargasso Sea
INLIKNNVPNIDKAIISAHCHNDLGLAVANALSGLSAGVRQIECTINGIGERAGNAALEEIVMAIKTRDDLLPYQTGIKTELISKASKIVSNATGFPVQFNKAIVGKNAFAHESGIHQDGMLKNRETYEIMTPESVGVKKTSLVMGKHSGRHAFKDKLSDLGYADVTDDVVQAAFGKFKILADKKKHIYDEDIVALVDDSLIIDNKINAINLKSLKVFAGTGEPQRADMTLDVFGEIKKTTQTGDGPVDAIFKCIKELYPHDVKLSLYQVHAVTEGTDAQATVSVKIEENDRTTVGQSADTDTLVASANAYLNALNKMLI

SEQ ID NO: 115881 - protein, 289 aa, Unknown
  Bacterial polypetide isolated from the Sargasso Sea
RIASQLKKLNVDIIEAGFAASSPGDFAAVRKIALEIEGPTIATLARAVPSDIDSAINCLKGAMKPRIHTFLSVSDIHMLHQMKKDRESIMSMAIDAVKRARDSVADVEFSPMDASRSDPDYLYMMLENAISAGATTVNIPDTVGYTNPQEFGDLIAGVFNNVSNINKAVVSVHCHNDLGMAVANSLSALENGARQIEGCINGLGERAGNAALEEVIMAVKTRPDHYGVETQINTKEIGPSSRLISNIFGFPIQFNKAITGQNAFRHSSGIHQDAFLKERTTFEIMLPEE

SEQ ID NO: 115882 - protein, 243 aa, Unknown
  Bacterial polypetide isolated from the Sargasso Sea
FCTQLPVHERHPYAGSLVHTAFSGSHQDAIRKGMEAISKSNQDKWEVPYLPIDPSDIGKTYEAIIRVNSQSGKAGSAWLLEQDHNIFLPRGAQIQFSQSVQKIADQTGKEITSQIIWDIFKKEYLNDGKFKLIDFDSKKLSRNSNKEQIDATIKFLDKNIEISASGNGPISAFVTAMRERFNLSFRLSDFGQNTRSSGSTAEAAAFVEIKVPNENGRSVYGVGIDTSITLAPIKAVISAINRI

SEQ ID NO: 115883 - protein, 176 aa, Unknown
  Bacterial polypetide isolated from the Sargasso Sea
KTESITKASRLVSSITGFSVQPNKAIVGANAFAHEAGIHQDGMLKNAETYEIMTPETVGLTESSLVLGKHSGKHAFSEKLKELGYELGDNALMELFGRFKDLADRKKEIFDEDLIALVGDRAASYNEHIKFVSLKVNAGSFEKHEAKLAILIDQKNKEIVKNGNGPVDATFNAIKS

SEQ ID NO: 115884 - protein, 336 aa, Unknown
  Bacterial polypetide isolated from the Sargasso Sea
GEQSPGATMNLDEKMQIAQLLEEMQVDIIEAGFPIASNGDFEAVSEISKNIKNSTIAGLARAKLADIDRAWEAVKYAKSPRIHTFIATSPIHMKYKLMKTEEEVLESIKHTVTHARNLCDNIEWSCEDGGRSNLEFLYKCIELAISSGASTINIPDTVGFTLPSEFGSIFKSVKNNVPNIDKAILSTHTHNDLGLAVANSIAAIQEGARQVECTINGLGERAGNAALEEVVMTLKVKKDLIPFHTNVKSEYITKASRLVSSITGFSVQPNKAIVGANAFAHEAGIHQDGMLKNAETYEIMTPESVGLNKSSLVLGKHSGKHAFSEKLKELGYDFGD

SEQ ID NO: 115885 - protein, 246 aa, Unknown
  Bacterial polypetide isolated from the Sargasso Sea
AAGATTVNIPDTVGWAVPDEFGQLIAHLHDNVEEFQTGKAVISVHCHNDLGLAVANSLAAVQAGARQVECTVNGIGERAGNAAMEEVVMALKTRKSFYRGFSMGVDTKEIVKASKLVARMSGLSVQRSKAIVGENAFAHSSGIHQDGILKKRETYEIMNPKHVGWGKTELPLTKHSGRAAVAARLKHLGFKMDAAEVGSIFDKFKEIGDKKKFVYDDDLAALVEGHITTVQETWSLDYLSVSTGNQ

SEQ ID NO: 115886 - protein, 307 aa, Unknown
  Bacterial polypetide isolated from the Sargasso Sea
MDKTNKKYNPFSPVNKENRKWPSQIIKKAPMWCSVDLRDGNQALIEPMGDERKRRMFDLLCKIGFKQIEIGFPAASQTDFDFTRYLITEKIIPTDVTIQVLTQARSEIIKRTFEALEGAQNVILHFYNSTSTLQRRVVFDKDKEGVKQIATDAAKLIKELAEKYKTTNWSFEYSPESFTGTELDYAVSVCDEVVDILKDSSDNKIIINLPATVEMSTANIYGDQIEWMSENFKNRENICLSLHPHNDRGTAVAASEFGLMAGADRVEGTLFGNGERTGNVDIVTLALNMYSQGINPQFRFFTKLIML

SEQ ID NO: 115887 - protein, 274 aa, Unknown
  Bacterial polypetide isolated from the Sargasso Sea
GTLFGNGERTGNVDIVTIALNMLTQGVEPNLDFSNINSVMREVEYCNQLSVHPRHPYAGDLVFTAFSGSHQDAIKKGFQAIKKSNDPKWEVPYLPIDPADLGRNYEAVVRINSQSGKGGVAFLLEKDHGVSLPRRLQISLSQRIQKLADDTGKEISSSQIWDIFEKRYLQPVNNYSYIKHSSSSKDDLHKLELTMNMNNEETTIQGSGNGPIDSFVNGLSEKIGVEIKVADYHQTAISSGSDAKAAAYIELEKDGKTFWGVGIHPNTTRASFDA

SEQ ID NO: 115888 - protein, 275 aa, Unknown
  Bacterial polypetide isolated from the Sargasso Sea
KYKFKSTREKVLEQAVSSVKYARKYFDDIEFYPEDAGRADQDFLSKMVEEVIKAGVTVINIADTTGYNLPDMYGEKIKFLKNNVPNIDKATISVHCHNDLGLATANSIAGLQNGARQVEVTMNGIGERAGNTSLEEVVMALHAHKHLNFRTGINTKKIVPLSKKVSKLMNMPVQRNKAIVGANAFAHSSGIHQDGFLKHRETYEIIDPEVVGVDSSSIDLTARSGRAALSHRLSLLGITLSKIELETLYTKFLEVADKKKLIHDEDLYELVKKKK

SEQ ID NO: 115889 - protein, 193 aa, Unknown
  Bacterial polypetide isolated from the Sargasso Sea
MTEKIYIFDTTLRDGEQSPGASMNLDEKLQIAEVLDSMKVDIIEAGFPIASNGDFEAVREVSKKVKNSTIAGLARASLKDIDRAWEAVQHAQSPRIHTFIATSPLHMKYKLKKTEEEVLEAIKKTVSHARNLCDNIEWSCEDGGRSELDFLYKSIELAINCGATTINIPDTVGYTLPEEFGKIFKNVKNNVIN

SEQ ID NO: 115890 - protein, 296 aa, Unknown
  Bacterial polypetide isolated from the Sargasso Sea
VWPRASGADIKACADAVAPAPRRRIHTFIATSDIHLEHKLRKSRADVLGIVPEMVSYARSLVEDVEFSCEDAGRSDPEFLYEVIEAAIAAGATTINIPDTVGYTTPSEFGALIAGINQQVPNIGDAVISVHGHNDLGLAVANFLEAVKNGARQLECTINGIGERAGNASLEELVMALHVRRRYYNPFFGREEDSPTPLTAVRTEEITKTSRLVSNLTGMVVQPNKAIVGANAFAHESGIHQDGVLKNRLTYEIIDAQTVGLSDNRISLGKLSGRSAVRARLEEMGYDLTREDLDEA

SEQ ID NO: 115891 - protein, 295 aa, Unknown
  Bacterial polypetide isolated from the Sargasso Sea
ILSTHCHNDLGLAVANSLAGIMAGARQIECTINGIGERAGNAALEEVVMAMRTRHDLMPYTTNINTKLLSKASKVVSNATGFPVQFNKAIVGKNAFAHESGIHQDGMLKNRNTYEIMTPESVGVKKTSLVMGKHSGRHAFRDKLSDMGYVNVTDDIINTAFGKFKILADKKKHIYDEDIAALVDDSLVTEDNVIKLKSLKVFAGTGEPQKAEMTLEIFGEVKSALDTGDGPVDAIFKCIKKLYPHDVKLLLYNVHAVTEGTDAQATVSVRIEEKGKTTVGQAADTDTLVASAMHI

SEQ ID NO: 115892 - protein, 229 aa, Unknown
  Bacterial polypetide isolated from the Sargasso Sea
INCGAKTINIPDTVGYSIPEEFAKTIKSIKNNVHNIDKAIISAHCHNDLGLAVANALSGLSAGVRQIECTINGIGERAGNAALEEIVMAIKTRDDLLPYETGIKTELISKASKIVSNATGFPVQFNKAIVGKNAFAHESGIHQDGMLKNRETYEIMTPESVGVKKTSLVMGKHSGRHAFKDKLNDLGYTDVTDDVVQAAFGKFKILADKKKHIYDEDIVALVDDSLIID

SEQ ID NO: 115893 - protein, 172 aa, Unknown
  Bacterial polypetide isolated from the Sargasso Sea
MAEKDKVYIFDTTMRDGEQSPGASMSVEEKIQISRVFDEMGIDIIEAGFPISSPGDFEAVSAISKSVKNSIPCGLARATKKDIDACHESLKFAKRFRIHTFISTSPVHMKHKLNMTDEQVLGAIKESVTYARKFTDDVEWSCEDGTRTDLDFMYKTIELAINCGAKTINIPD

SEQ ID NO: 115894 - protein, 247 aa, Unknown
  Bacterial polypetide isolated from the Sargasso Sea
MSKDPGRILIFDTTLRDGEQSPGASLNLEEKLAIAHQLARLGVDVIEAGFPFASPGDFKAVNKIASAVGKENGPIICGLARASKGDIKACYEAVSPAPKRRVHTFIATSDIHLKHKLKKSRKDVLQIVPEMVNYAKSLVDDIEFSCEDASRSDPDFLYEVIQLAISAGATTINIPDTVGFTTPSEFGKLIADINKNVPNIDEAVISVHGHNDLGLAVANFLEAVKNGAKPLECTINGIGERAGDASL

SEQ ID NO: 115895 - protein, 290 aa, Unknown
  Bacterial polypetide isolated from the Sargasso Sea
VTIQVMTQARSHLIARTFEALKGAPRAIVHVYNATAPVFRDVVFNVDKAGCIEIATQATREIKQHMDANPDTQWTFQYSPETFCFTELDFALQVCEAVTDTFGPTPSNKMILNLPTTVEVSTANVFADQIEWFCRHFSRRDSVVISVHPHNDRGTGVSTAEQACLAGAERVEGTLFGNGERTGNVDILTLAMNLYTSGIDPQLDFSDILHVQREVEFCNQLPTHPRHPYAGELVFTAFSGSHQDAIKKGFAARQANPQGMWEVPYLPIDPADMGRSYEAVIRVNSPVGKG

SEQ ID NO: 115896 - protein, 279 aa, Unknown
  Bacterial polypetide isolated from the Sargasso Sea
LAGVMAGARQIECTINGIGERAGNAALEEVVMAMRTRHDLMPYTTNINSKLLSKASKVVSNATGFPVQFNKAVVGKNAFAHESGIHQDGMLKNRNTYEIMTPESVGVHKTSLVMGKHSGRHAFKDKLNDLGYVGVTDDVIQTAFGKFKVLADKKKHIYDEDIAAIVDDSLVTEDNVIKLKSLKVFAGTGEPQKAEMTLEVFGEVKKASETGDGPVDAIFKCIKKLYPHEVKLLLYNVHAVTEGTDAQATVSVRIEEEGKTTVGQAADTDTLVASANAYL

SEQ ID NO: 115897 - protein, 292 aa, Unknown
  Bacterial polypetide isolated from the Sargasso Sea
EEFARTITSIKNNVPNIDKAILSAHCHNDLGLAVANALSGLSAGVRQIECTINGIGERAGNAALEEIVMAIKTRDDLLPYETGIKTELISKASKIVSNATGFPVQFNKAIVGKNAFAHESGIHQDGMLKNRETYEIMTPESVGVKKTSLVMGKHSGRHAFKDKLSDLGYADVTDDVVQAAFGKFKILADKKKHIYDEDIVALVDDSLIIDNKINAINLKSLKVFAGTGEPQRADMTLDVFGEVKKTSQTGDGPVDAIFKCIKELYPHNVKLSLYQVHAVTEGTDAQATVSVK

SEQ ID NO: 115898 - protein, 151 aa, Unknown
  Bacterial polypetide isolated from the Sargasso Sea
MADKDKVFIFDTTMRDGEQSPGASMSVEEKIQISRVFDEMGIDIIEAGFPISSPGDFEAVSAISKSVKNSIPCGLARATKKDIDACHESLKFAKRFRIHTFISTSPVHMKHKLNMTNEQVLGAIKESVTYAKKFTDDVEWSCEDGTRTDLD

SEQ ID NO: 115899 - protein, 260 aa, Unknown
  Bacterial polypetide isolated from the Sargasso Sea
EGLKNFSSNVTFEYSPESFTGTELDFAVDICSAVAETWGASPEDPIIINLPSTVEMATPNVYADQIEWFVRNFSYRDSSIISLHTHNDRGTGVAATELAIMAGADRVEGCLFGNGERTGNCDLVTVAMNLFSQGVDPTLDFRAMPEIREAVESINKIPVHERHPYAGDLVFTAFSGSHQDAIKKGMSKVEKGLWEVPYLPIDPGDVGSSYKEAIRVNSQSGKGGVGFLLEEHYGISLPRELLVEFATMVQQLTEQLDREV

SEQ ID NO: 115900 - protein, 196 aa, Unknown
  Bacterial polypetide isolated from the Sargasso Sea
MTDKNRIIIFDTTMRDGEQSPGASMSLEEKLQISRVFDELGVDVIEAGFPIASPGDFEAVTEISKTLKRSIPAGLARATRKDIDACHQALKHAKNFRIHTFISTSPLHMKHKLNKSPEEVLNSIKESVTYARKFTDDVEWSCEDGTRTDMDYMCKTVELAIKCGAKTINIPDTVGYTVPSEFKKIIETLINKVPNI

SEQ ID NO: 115901 - protein, 293 aa, Unknown
  Bacterial polypetide isolated from the Sargasso Sea
ASDTDFNFVREIIEQNLIPADVTIQVLTQAREELIQRTCESLLGSKNCIVHLYNSTSTLQRRVVFESDRNGVKEIAVDGAKMVRDRISMLENSGSQVRLEYSPESFTGTELDYALEVCEAVMDIWQPTSENPTIINLPSTVEMATPNIFADQIEWMHTNFRNRENVILSVHPHNDRGTGVAAAELAQMAGADRVEGTLFGNGERTGNVDIVTLGLNLFTQGVDPQLDFSNINSLMDTAIHCNQLPIHARHPYAGELVHTAFSGSHQDAINKGMKAMETANSPLFEVPYLPIDP

SEQ ID NO: 115902 - protein, 219 aa, Unknown
  Bacterial polypetide isolated from the Sargasso Sea
YEIIDAKTVGLSDNKISLGKLSGRSAVRARLEEMGYDLSREDLNDAFARFKDLADRKREITDRDLEAIVSEQVQLPEAKFQLSLVQVSCGNASKPTATISLLNTEDNSEDTAVSIGTGPVDAVCEALNKLAKVPNELIEFSVKSVTEGIDALGEVTIRIRRDNKIYSGHSADTDVVVAAANAYVNALNRLVFSEKKNSIHPQFDDLENSDNKFLSNPAN

SEQ ID NO: 115903 - protein, 307 aa, Unknown
  Bacterial polypetide isolated from the Sargasso Sea
FFGRCSAGARQIECTINGLGERAGNAALEEVVMAMKTRPDLMPYETGIETTLLSKASKIVSNATGFPVQYNKAIVGKNAFAHEAGIHQDGMLKNRQTYEIMTPESVGVKQTSLVMGKHSGRHAFKDKLTSLGYPDLTDDVVDNAFAKFKILADKKKHVYDEDIIALIDDSLITDNKVSAINLKSLKVFAGTGEPQRAEMTLDVFGEVKKASETGDGPVDAIFKCIKKLYPHEVNLQLYQVHAVTEGTDAQATVSVKIEENGKTTVGQAADTDTLVASANAYINSLNKMIIKRDKTAPETNIENQNFE

SEQ ID NO: 115904 - protein, 260 aa, Unknown
  Bacterial polypetide isolated from the Sargasso Sea
MGAKTINIPDTVGYTVPSEFKKIIETLLNKVPNIDKAIISTHCHNDLGLAVANSLAGVMAGARQIECTINGIGERAGNAALEEVVMAMRTRHDLMPYTTNINTKLLSKASKVVSNATGFPVQFNKAIVGKNAFAHESGIHQDGMLKNRNTYEIMTPESVGVHKTSLVMGKHSGRHAFKDKLNDLGYVGITDDIIQTAFGKFKVLADKKKHIYDEDIAAIVDDSLVSEDNVIKLKSLKVFAGTGEPQKAEMTLEVFGEVKS

SEQ ID NO: 115905 - protein, 308 aa, Unknown
  Bacterial polypetide isolated from the Sargasso Sea
EAVSEISKIMKNSIPCGLSRALKKDIDACHESLKHAPRFRIHTFISTSPLHMKHKLEMTNEQVLDAIKESVTYARKFTDDVEWSCEDGTRTDMDFMCKTVELAINCGAKTINIPDTVGYSIPEEFAKTIKHLKNNVPNIDKAILSAHCHNDLGLAVANALAGVSEGVRQIECTINGIGERAGNAALEEVVMAIKTRNDLMPYNTGIKTELISKASKIVSNATGFPVQFNKAIVGKNAFAHESGIHQDGMLKNRETYEIMTPESVGVKKTSLVMGKHSGRHAFKDKLNDLGYSDLTDDIISAAFGNFKF

SEQ ID NO: 115906 - protein, 204 aa, Unknown
  Bacterial polypetide isolated from the Sargasso Sea
MEDKNRIIIFDTTMRDGEQSPGASMSLEEKIQISRVFDELGIDVIEAGFPIASPGDFEAVTAISKILKKSVPAGLARHTKKDIDACHESLKSAERFRIHTFISTSSLHMKHKLNKTPEQVVDSIKEHVTYARKFTDDVEWSCEDGTRTDMDFMCKTVELAIKAGAKTINIPDTVGYTVPSEYKKIIETLKNKVPNIDKAILSVH

SEQ ID NO: 115907 - protein, 297 aa, Unknown
  Bacterial polypetide isolated from the Sargasso Sea
ISKIIKNASVCALSRANQKDIDVAAESLKNAKKPRIHTGIGTSEVHIKYKFNSSKDSIIEIAKKSVARARKYVDDVEFYAEDAGRTDNEFLAKVCEEVIKSGATVLNIPDTTGYCLPSEYGDKIKFLMNNVKGIENVTVSCHCHNDLGLATANSIYGVINGARQIECTVNGIGERAGNTSLEEVVMILRQHTNLNLDTNINSKLLNQTSQKVSELMGMPVQPNKAIVGSNAFAHSSGIHQDGVIKKRETYEIIDPLDVGVDKSSIVLTARSGRAALAFRMKQYGVNLTKKELDDVYN

SEQ ID NO: 115908 - protein, 231 aa, Unknown
  Bacterial polypetide isolated from the Sargasso Sea
KHKLNMSPEDVYESIGQHVAYARKFTDDVEWSCEDGTRTDMDFMCKTVELAIKNGATTINIPDTVGYTIPSEFTKIIQTLLNKVPNIDKAILSTHCHNDLGLAVANSLAGVQAGARQIECTINGLGERAGNAALEEVVMAIKTRPDLMPYETGINTTLLSKASKIVSNATGFPVQYNKAIVGKNAFAHEAGIHQDGMLKNRQTYEIMTPESVGVKQTSLVMGKHSGRHAFK

SEQ ID NO: 115909 - protein, 251 aa, Unknown
  Bacterial polypetide isolated from the Sargasso Sea
IVSNATGFPVQFNKAIVGKNAFAHESGIHQDGMLKNRETYEIMTPESVGVKKTSLVMGKHSGRHAFKDKLSDLGYSDLTDDIIQAAFGKFKVLADKKKHIYDEDIVALVDDSLIVDNKINAINLKSLKVFAGTGEPQKAEMTLDVYGDIKNTTETGDGPVDAIFKCIKKLFPHDVKLSLYQVHAVTEGTDAQATVSVKIEENDRTTVGQSADTDTLVASANAYLNALNKMLIKREKKAPSQNIKHQKVKGI

SEQ ID NO: 115910 - protein, 288 aa, Unknown
  Bacterial polypetide isolated from the Sargasso Sea
EGARQVECTINGMGERAGNSSLEEIVMTLKVKKDLMPFHTDIKTESIIKASRLVSSITGFPVQPNKAIVGANAFAHEAGIHQDGMLKHSGTYEIMTPESVGLVKSSLVLGKHSGKHAFSEKLKELGYEPGDNALMELFGRFKDLADKKKEIFEEDLIALAEDRAASYNEHIKFISLEVNAGSVEKPEANLKIQMQDKIKTIKINGNGPVDATFNAIKKLTLTDYKLKLYQVNAITAGTDAQGEVTVRLEDEDLSSQAKGSDSDIIVASAKAYINALNRLIFKKTKSIK

SEQ ID NO: 115911 - protein, 275 aa, Unknown
  Bacterial polypetide isolated from the Sargasso Sea
MTDKNRVYIFDTTMRDGEQSPGASMSLEEKIQIARVFDELGIDIIEAGFPIASPGDFEAVTEVSKVLKNSIPAGLSRHSKKDIDRCYEALKHAPRFRIHTFISTSPLHMKHKLNKSSEEVYESIKEHVTYARKFTDDVEWSCEDGTRTDMDYMCKTVELAIKCGAKTINIPDTVGYTVPSEFTKIIQTLMNKVPNIDKAILSTHCHNDLGLAVANSLAGVQAGARQIECTINGIGERAGNAALEEVVMAMKTRNDLMPYTTGINTTLLSKASKIV

SEQ ID NO: 115912 - protein, 314 aa, Unknown
  Bacterial polypetide isolated from the Sargasso Sea
MRCQRQIYIGDQIEWMSENFKNRENICLSLHPHNDRGTAIAASEFGLMAGADRVEGTLFGNGERTGNVDIVTLALNMYSQGINPNLDFSQINNVMREVEYCNQLPVHPRHPYAGDLVFTAFSGSHQDAIKKGLNALRSSNDPQWEVPYLPIDPADLGRTYEAVVRINSQSGKGGVAFLLEKDHGVSLPRRLQISMSQKIQKIADETGKEISTSEIWEIFHTNFVMPKSGHSFKNYSLKTSDATDLSDHIKAEIEIDGKNHEISGSGNGPIDAFVNALNQKLSIDIKVSDYHQSAISSGSDAQAAAYIELQKGDK

SEQ ID NO: 115913 - protein, 163 aa, Unknown
  Bacterial polypetide isolated from the Sargasso Sea
MSTNEHLHSIQQPSSMPYEKYRSFEPIDIEDRSWPSRVISKAPLWCSVDLRDGNQALIEPMDPERKWRMFETLVSIGFKEIEVGFPSASEADFQFVREIIDANAIPDDVTIQVLVQSREELINRTFESIAGSKQAIIHFYNSTSTLQREVVFGIDRIGITKIA

SEQ ID NO: 115914 - protein, 266 aa, Unknown
  Bacterial polypetide isolated from the Sargasso Sea
GFPIASNGDFEAVQEVSKNVKNSSIAGLARASLKDIDRAWEAIQHAKSPRIHTFIATSPLHMKYKLKKTEDEVLEAIEKTVMHARNLCDNIEWSCEDGGRSELEFLYKCIELAINSGASTINIPDTVGYTLPEEFGEIFKHVKNNVPNIDKAILSTHTHNDLGLATANNVAAIKEGARQVECTINGMGERAGNSSLEEIVMTLKIKKDLMPYHTDIKTESIMKASRLVSSITGFPVQPNKAIVGANAFAHEAGIHQDGMLKHAVPM

SEQ ID NO: 115915 - protein, 252 aa, Unknown
  Bacterial polypetide isolated from the Sargasso Sea
MSSEDNHIRIFDTTLRDGEQSPGATMTLDEKIQVAELLDDMGVDIIEAGFPIASNGDFEAVSKIAERSQNSIIAGLARAIPEDIDRAGEAVKKAKRGRIHTFVSTSPIHLEHQMKKNEEEVLEIIKKTVTLARSYVEDVEWSGMDATRTSIDFLCKCCEVAIKNGATTINIPDTVGYAIPHEFNNLIKTLRERVPGADSVIFSTHCHNDLGLAVANSLAGVDAGARQIECTINGLGERAGNAALEEVVMAIN

SEQ ID NO: 115916 - protein, 281 aa, Unknown
  Bacterial polypetide isolated from the Sargasso Sea
MADNIKTSRICALARALEKDILRAADALKNAKLSRIHTFIATSPIHMEMKLKMTPEQVIKNAVNAVNIAKDNAEDVEFSPEDAGRSDFNFLCEIIEHVINAGATTINIPDTVGYNMPHQFGQLIEKIISNVPNANKAIFSVHCHNDLGLAVSNSLSSVLHGARQVECTINGLGERAGNAALEEIVMTVKTRRDIFSCDTRINTKKIMNCSRLVSSITGFPVQPNKAIVGKNAFAHESGIHQDGIIKSRETYEIMRAEDVGLISNSLVLGKHSGRNALKQKM

SEQ ID NO: 115917 - protein, 278 aa, Unknown
  Bacterial polypetide isolated from the Sargasso Sea
LHMKHKLNMSPEDVYESIGQHVAYARKFTDDVEWSCEDGTRTDMDFMCKTVELAIKNGATTINIPDTVGYTIPSEFTKIIQTLLNKVPNIDKAILSTHCHNDLGLAVANSLAGVQAGARQIECTINGLGERAGNAALEEVVMAIKTRPDLMPYETGINTTLLSKASKIVSNATGFPVQYNKAIVGKNAFAHEAGIHQDGMLKNRQTYEIMTPESVGVKQTSLVMGKHSGRHAFKDKLNSLGYPDLTDDIVGNAFAKFKVLADKKKHNYDEDIIALIDD

SEQ ID NO: 115918 - protein, 168 aa, Unknown
  Bacterial polypetide isolated from the Sargasso Sea
MEDKDKVFIFDTTMRDGEQSPGASMSVEEKIQISRVFDEMGIDIIEAGFPISSPGDFEAVSAISKSIKNSIPCGLARATKKDIDACHESLKFAKRFRIHTFISTSPVHMKHKLNMTNEQVLGAIKESVTYAKKFTDDVEWSCEDGTRTDLDFMYKTIELAIKCGATTI

SEQ ID NO: 115919 - protein, 280 aa, Unknown
  Bacterial polypetide isolated from the Sargasso Sea
KKDIDACHESLKFAKRFRIHTFISTSPVHMKHKLDMTNDQVLDAIKESVTYARKFTNDVEWSCEDGTRTDLDFMCKTIELAIKCGATTINIPDTVGYSIPEEFARTITHIKNNVPNIDKAIISAHCHNDLGLAVANALAGLSAGVRQIECTINGIGERAGNAALEEIVMAIKTRNDLMPYETGIKTELISKASKIVSNATGFPVQFNKAIVGKNAFAHESGIHQDGMLKNRETYEIMTPESVGVKKTSLVMGKHSGRHAFKDKLSDLGYSDLTDDVVQAA

SEQ ID NO: 115920 - protein, 279 aa, Unknown
  Bacterial polypetide isolated from the Sargasso Sea
GATTINIPDTVGYTIPYEFGELFKHLISNCNDAENVIFSVHCHDDLGLSVANSLAAVESGARQIECTINGIGERAGNTSLEEVCMAIRTREEYFDFKTSIDSTKLYPTSRLVSSITGMHVPRNKAIVGDNAFAHEAGIHQHGMLRDSSTYEIMKPQDVGIARSNLVLGKHSGRHAFLDRINELGFALEKDEIDPAFQEFKKLADRKKEIFDTDIEAIVLNADIANMSRWSLMDLETTSGSSWGSTASLKLKDSGEEIIERDNNSNPASGPIEAVFNIIS

SEQ ID NO: 115921 - protein, 286 aa, Unknown
  Bacterial polypetide isolated from the Sargasso Sea
IAETIKTSRVCALARALKKDIFRAGDALKDAKFSRIHTFIATSPIHMEMKLKMTPNQVIENAINAVKMAKDFVEDVEFSPEDAGRSDFNFLCTIIEKVIDAGASTINIPDTVGYNMPHQFGELMSKIIENVPNSKDAIFSVHCHNDLGLAVSNSLSSVLNGARQVECTINGLGERAGNAALEEIVMTVKTRRDIFKCDTRINTKKIMNCSRLVSSITGFPVQPNKAIVGKNAFAHESGIHQDGIIKSRETYEIMKAEDIGLISNSLVLGKHSGRNAFKQKLDELNI

SEQ ID NO: 115922 - protein, 256 aa, Unknown
  Bacterial polypetide isolated from the Sargasso Sea
MKNKYEKYSAYPTVKILDRKWPNKTITSEPIWCSVDLRDGNQALIEPMDSVRKMRMFKHLVKIGFKEIEIGFPSASETDFNFVRELITDNHIPEDVTVQVLTQSRKSLIEKTVESLKDCKNAIIHLYNSTSTLQREIVFKESMDGVKKIATDGAKIILDQLYKLEKSNIRLQYSPESFTGTELPYALEVCETVLDVWEASEQNPVIINLPATVEMSTPNIHADQIEWMGDNFSNRKRVILSLHPHNDRGTAIAATE

SEQ ID NO: 115923 - protein, 150 aa, Unknown
  Bacterial polypetide isolated from the Sargasso Sea
MSDDKLVIFDTTLRDGEQSPGIALTPSEKLLIAQQLEKLKVDVIEAGFAASSPGDWEGVNLIAKNIKNSTIASLARCHPDDIEQAWEAIKVAKDSRIHVFTSTSQIHMEHMLRKSKEEVLKDAKESVKYAKKLCDNIEFSAQDATRTDKD

SEQ ID NO: 115924 - protein, 214 aa, Unknown
  Bacterial polypetide isolated from the Sargasso Sea
MTDKNRVFIFDTTMRDGEQSPGASMSLEEKIQIARVFDELGVDIIEAGFPIASPGDFEAVSEVSKILKKSIPAGLSRHSKKDIDRCYEALKHAPRFRIHTFISTSPLHMKHKLNMTKEQVYDSVKEHVTYARKFTDDVEWSCEDGTRTDMDYMCKTVELAIKCGAKTINIPDTVGYTVPSEFTKIIQTLLNKVPNIDKAILSTHCHNDLGLAVA

SEQ ID NO: 115925 - protein, 303 aa, Unknown
  Bacterial polypetide isolated from the Sargasso Sea
SAGARQIECTINGIGERAGNAALEELVMAMKTRNDLMPFSTGINTKLLSKASKVVSNATGFPVQFNKAIVGKNAFAHESGIHQDGMLKNRNTYEIMTPESVGVKQTSLVMGKHSGRHAFKDKLTDLGYKDITDDVIQTAFGKFKILADKKKHVYDEDIAALVDDSLIKEDNVITLKSLKVFAGTGEPQRADMTLEVYGEIKKATETGDGPVDAIFKCIKKLYSHDVKLQLYQVHAVTEGTDAQATVSVRIEENGKTTVGQAADTDTLVASANAYLNALNKMIIKRKKTAPDGYQQQKNYQNKK

SEQ ID NO: 115926 - protein, 312 aa, Unknown
  Bacterial polypetide isolated from the Sargasso Sea
IINHLMNNVTNIDKVTISTHCHNDLGLAVANSLAGVRAGARQIECTINGLGERAGNAAMEEVVMAIRTRNDMMPFQTNIQTEKLTKTSKLVSAVTGFPVQFNKAIVGKNAFAHEAGIHQDGMLKNNKTYEIMTPESVGVSESNLVMGKHSGRHAFKQKIIELGYSINDNVIEEAFENFKNLADKKKNIYDEDIIAIIDDQVIRVNDSILLQDLQVIAGTKGPQKAEISLLIDDEPKTVTSKGDGPVDAIFNGLSQLVPHKGKLLLYQVHAVTEGTDAQAEVSVRLAEDGKTVVGLGAHTDTLVASAKAYINA

SEQ ID NO: 115927 - protein, 299 aa, Unknown
  Bacterial polypetide isolated from the Sargasso Sea
CHNDLGLAVANSLAGVQAGARQIECTINGIGERAGNAALEEVVMAMKTRPDLMPYETGINTTLLSKASKIVSNATGFPVQYNKAIVGKNAFAHESGIHQDGMLKNRQTYEIMTPESVGVKQTSLVMGKHSGRHAFKDKLISLGYVDVTDDVINNAFGKFKVLADKKKHVYDEDIIALVDDSLIIDNKVNAISLKTLKVFAGTGEPQRADMTLDVFGEVKKASETGDGPVDAIFKCIKKLYPHNVNLQLYQVHAVTEGTDAQATVSVRIEENGKTTVGQAADTDTLVASANAYINALNKM

SEQ ID NO: 115928 - protein, 329 aa, Unknown
  Bacterial polypetide isolated from the Sargasso Sea
DDVEWSCEDGPRTDMDFMCKTVKLAIKCGAKTINIPDTVGYTVPSEFKKIIETLKNKVPNIDKAILSVHCHNDLGLAVANSLAGVSAGARQVECTINGIGERAGNAALEEIVMAMKTRNDLMPFKTGIDTKLISKASKTVSNATGFPVQFNKAIVGKNAFAHESGIHQDGMLKNRNTYEIMTPESVGVKKTSLVMGKHSGRHAFKDKLSDLGYASVTDDVIQTAFGKFKILADKKKHVYDEDIIALVDDSLIKESNVINLKSLKVFAGTGEPQKAEMTLEVYGDVKKANETGDGPVDAIFKCIKKLYPHDVKLQLYQVHAVTEGTDAQA

SEQ ID NO: 115929 - protein, 273 aa, Unknown
  Bacterial polypetide isolated from the Sargasso Sea
ANSLAGVMAGARQIECTINGIGERAGNAALEEVVMAMRTRHDLMPYTTNINTKLLSKASKVVSNATGFPVQFNKAIVGKNAFAHESGIHQDGMLKNRNTYEIMTPESVGVKKTSLVMGKHSGRHAFRDKLSDMGYVDVTDDIINTAFGKFKILADKKKYIYDEDIAALVDDSLVTEDNVIKLKSLKVFAGTGEPQKAEMTLEIFGEVKSASDTGDGPVDAIFKCIKKLYNHDVKLLLYNVHAVTEGTDAQATVSVRIEEKGKTTVDKQQILIH

SEQ ID NO: 115930 - protein, 246 aa, Unknown
  Bacterial polypetide isolated from the Sargasso Sea
CEDGTRTDMDYMCKTVELAIKCGAKTINIPDTVGYTIPSEFTKIIETLLNKVPNIDKAILSTHCHNDLGLAVANSLAGVQAGARQIECTINGLGERAGNAALEEVVMAMKTRPDLMPYETGIETTLLSKASKIVSNATGFPVQYNKAIVGKNAFAHEAGIHQDGMLKNRQTYEIMTPESVGVKQTSLVMGKHSGRHAFKDKLTSLGYPDLTDDVVDNAFAKFKILADKKKHVYDEDIIALIDDSLI

SEQ ID NO: 115931 - protein, 293 aa, Unknown
  Bacterial polypetide isolated from the Sargasso Sea
MKYKLMKTESEVLESIKQTVTFARNLCDNIEWSCEDGGRSDLEFLYQCIELAIDCGASTINIPDTVGYTLPNEFGSIFKSVKNNVSNIDKAILSTHTHNDLGLAVANSIAAIQEGARQVECTINGLGERAGNAALEEIVMTLKVKKDLIPFHTDIKTESITKASRLVSSITGFSVQPNKAIVGANAFAHEAGIHQDGMLKNAETYEIMTPESVGLTESSLVLGKHSGKHAFSEKLKELGYEFGDNALMELFGRFKDLADRKKEIFDEDLIALVGDRSVSFDENIKFVSLKVNA

SEQ ID NO: 115932 - protein, 241 aa, Unknown
  Bacterial polypetide isolated from the Sargasso Sea
PPEQKKEIIQLAASATQKIRALCEANPQTRWRYEYSPETFCFTEPDFALQICEAVADVWEPSPERQMIINLPATVEVNTPNVYADQIEYFCRHFSRRNAVCISVHPHNDRGCGVASAELAILAGADRVEGCLFGNGERTGNVCLVTLAMNLYSQGISPKLDFSDMKHVVEAVEQCNQLPVHPRHPYAGKLAFTAFSGSHQDAIKKGFTARGQSASERWEMPYLPVDPNDIGCSYEAVIRVN

SEQ ID NO: 115933 - protein, 254 aa, Unknown
  Bacterial polypetide isolated from the Sargasso Sea
MSDKDKVFIFDTTMRDGEQSPGASMSLEEKIQISRVFDELGIDIIEAGFPIASPGDFEAVKAISKILKNSIPAGLSRANKKDIDACHEALKSAPRFRIHTFISTSPLHMKHKLNKTPEQVLEAIKESVTYARKFTDDVEWSCEDGTRTEMDFMCKIVELAIKSGAKTINIPDTVGYTTPSEFTKIITNLKNKVPNIDKAILSVHCHNDLGLAVANSLAGVSAGARQVECTINGIGERAGNAALEEIVMAIRTRN

SEQ ID NO: 115934 - protein, 287 aa, Unknown
  Bacterial polypetide isolated from the Sargasso Sea
MGERAGNSSLEEIVMTLKVKKDLMPYHTDIKTESIMKASRLVSSITGFPVQPNKAIVGANAFAHEAGIHQDGMLKHAGTYEIMTPESIGLNKSSLVLGKHSGKHAFSEKLKELGYEPGDNALMELFGRFKDLADKKKEIFEEDLIALAEDRSASYDEHIKFVSLEVNAGSLSKHEAKLTLIMDEKKATNISQGNGPVDATFNAIKIITNTDFKLKLFQVNAITAGTDAQGEVTVRLEDKDLSSQAKGSDPDIIVASAKAYISALNRLLFKKTKSVVKKSAEIKIERV

SEQ ID NO: 115935 - protein, 264 aa, Unknown
  Bacterial polypetide isolated from the Sargasso Sea
VEWSCEDGTRTYMDFMCKTVELAIKCGAKTINIPDTVGYTVPSEFKKIIETLKNKVPNIDKAILSVHCHNDLGLAVANSLAGVSAGARQVECTINGIGERAGNAALEEIVMAMKTRNDLMPFKTGIDTKLISKASKTVSNATGFPVQFNKAIVGKNAFAHESGIHQDGMLKNRNTYEIMTPESVGVKKTSLVMGKHSGRHAFKDKLEDLGYAGVTDDVIQTAFGKFKILADKKKHVYDEDIIALVDDSLIKESNVINLKSLKVF

SEQ ID NO: 115936 - protein, 285 aa, Unknown
  Bacterial polypetide isolated from the Sargasso Sea
GTLFGNGERTGNVDIVTIALNMLTQGIEPNLDFSNINSVMREVEYCNQLPVHPRHPYAGDLVFTAFSGSHQDAIKKGFQAIKKSNDPKWEVPYLPIDPADLGRNYEAVVRINSQSGKGGVAFLLEKDHGVSLPRRLQISLSQKIQKLADDTGKEISSSQIWDIFEKKYLQPVNNYSYIKHSSSSKDDLHKLELTMNMNNKETTIQGTGNGPIDSFVNGLSEKIGVEIKVADYHQTAISSGSDAKAAAYIELEKDARTFWGVGIHPNTTRASFDAIIVGLSKLLES

SEQ ID NO: 115937 - protein, 183 aa, Unknown
  Bacterial polypetide isolated from the Sargasso Sea
MSNKDRVFIFDTTMRDGEQSPGASMSLEEKIQIARVFDELGIDIIEAGFPIASPGDFEAVSEVSKILKNSIPAGLSRHSVKDIDRAYEALKHAPRFRIHTFISTSPLHMKHKLNMSPEDVYESIGKHVTYARKFTDDVEWSCEDGTRTDMDYMCKTVELAIKHGATTINIPDTVGYTIPSEFT

SEQ ID NO: 115938 - protein, 273 aa, Unknown
  Bacterial polypetide isolated from the Sargasso Sea
LIDEKIIPSDVAIQVLTQARPEIIKRTFEALDGAPNAILHFYNSTSTLQRKVVFEKDKEGVKKIATDAAKLIKELSSKYKNTNWSFEYSPESFTGTELDYAVEVCDEVVEILKESSDNKIIINLPATVEMSTANIYGDQIEWMSENFKNRENICLSLHPHNDRGTAIAASEFGLMAGADRVEGTLFGNGERTGNVDIVTLALNMYSQGINPNLDFSQINNVMREVEYCNQLPVHPRHPYAGDLVFTAFSGSHQDAIKKGLSALRNSNDPEWGV

SEQ ID NO: 115939 - protein, 266 aa, Unknown
  Bacterial polypetide isolated from the Sargasso Sea
MTDKEKVYIFDTTMRDGEQSPGASMSVEEKIQISRVFDEMGIDIIEAGFPISSPGDFEAVSAISKGIKKSIPCGLARATRKDIDACYESLKFAKRFRIHTFISTSPVHMKHKLNMTDEQVLAAIKDSVTYARKFTDDVEWSCEDGTRTNLDFMYKTIELAINCGAKTINIPDTVGYSIPEEFAKTITSIKNNVPNIDKAIISAHCHNDLGLAVANALSGLSAGVRQIECTINGIGERAGNAALEEIVMAIKTRDDLLPYETGIKTE

SEQ ID NO: 115940 - protein, 290 aa, Unknown
  Bacterial polypetide isolated from the Sargasso Sea
FEDIDRAWEAVQHAKSPFIHTFIATSPLHMKFKLKKTEEEVLEAIDKTVSHARNLCENIEWSCEDGGRSELDFLYKCIELAINCGASTINIPDTVGYTLPEEFGKIFKNVKNNVPNIDKAILSTHTHNDLGLATANNVAAIKEGARQVECTINGMGERAGNSSLEEIVMTLKVKKDLMPYHTDIKTDLIMKASRLVSSITGFPVQPNKAIVGANAFAHEAGIHQDGMLKHAGTYEIMTPESIGLNKSSLVLGKHSGKHAFSEKLKELGYEPGDNALMELFGRFKDLADKK

SEQ ID NO: 115941 - protein, 280 aa, Unknown
  Bacterial polypetide isolated from the Sargasso Sea
GLARHSKKDIDRCYEALKHAPRFRIHTFISTSPLHMKHKLNKSPEQVYESIKEHVTYARKFTDDVEWSCEDGTRTDMDYMCKTVELAINCGAKTINIPDTVGYTVPSEFTKIIQTLLNKVPNIDKAILSTHCHNDLGLAVANSLAGVQAGARQIECTINGIGERAGNAALEEVVMAMKTRPDLMPFETGINTKLISKASKIVSNATGFPVQYNKAIVGKNAFAHESGIHQDGMLKNRQTYEIMTPESVGVKQTSLVMGKHSGKHAFKDKLTSLGYVDVTD

SEQ ID NO: 115942 - protein, 195 aa, Unknown
  Bacterial polypetide isolated from the Sargasso Sea
MSNKDRVFIFDTTMRDGEQSPGASMSLEEKIQIARVFDELGIDIIEAGFPIASPGDFEAVSEVSKILKNSIPAGLSRHSVKDIDRAYEALKHAPRFRIHTFISTSPLHMKHKLNMSPEDVYESIGKHVSYARKFTDDVEWSCEDGTRTDMDYMCKTVELAIKNGATTINIPDTVGYTIPSEFTTIIETLLNKVQI

SEQ ID NO: 115943 - protein, 302 aa, Unknown
  Bacterial polypetide isolated from the Sargasso Sea
GVRQIECTINGIGERAGNAALEEVVMAIKTRNDLMPYNTGIKTELISKASKIVSNATGFPVQFNKAIVGKNAFAHESGIHQDGMLKNRETYEIMTPESVGVKKTSLVMGKHSGRHAFKDKLSDLGYSDLTDDIIQAAFGKFKVLADKKKHIYDEDIVALVDDSLIVDNKINAINLKSLKVFAGTGEPQKAEMTLDVYGDIKNTTETGDGPVDAIFKCIKTLFPHDVKLSLYQVHAVTEGTDAQATVSVKIEENDRTTVGQSADTDTLVASANAYLNALNKMLIKREKKAPSQNIKHQKVKGI

SEQ ID NO: 115944 - protein, 127 aa, Unknown
  Bacterial polypetide isolated from the Sargasso Sea
MADKDKVFIFDTTMRDGEQSPGASMSVEEKIQISRVFDEMGIDIIEASFPISSPGDFEAVSAISKSVKNSIPCGLARATKKDIDACHESLKFAKRFRIHTFISTSPVHMKHKLNMTNEQVLGAIKES

SEQ ID NO: 115945 - protein, 137 aa, Unknown
  Bacterial polypetide isolated from the Sargasso Sea
MGKDKVYVFDTTLRDGEQVPGCQLNTNEKIEIALDLESLGVDVIEAGFPISSPGDFNSVSEISKVVKKPIICALSRAIISDIDMVSLALKNAKRKRIHTGIGSSDIHIKHKFNSTREKILEQAVAAVKYSKKFFEDV

SEQ ID NO: 115946 - protein, 286 aa, Unknown
  Bacterial polypetide isolated from the Sargasso Sea
DELGIDIIEAGFPIASPGDFEAVTEVSKILKKSIPAGLSRHSKKDIDRAYEALKHAPRFRIHTFISTSPLHMKHKLNMSPEDVYESIGQHVAYARKFTDDVEWSCEDGTRTDMDFMCKTVELAIKNGATTINIPDTVGYTIPSEFTKIIQTLLNKVPNIDKAILSTHCHNDLGLAVANSLAGVQAGARQIECTINGLGERAGNAALEEVVMAIKTRPDLMPYETGINTTLLSKASKIVSNATGFPVQYNKAIVGKNAFAHEAGIHQDGMLKNRQTYEIMTPESVGV

SEQ ID NO: 115947 - protein, 311 aa, Unknown
  Bacterial polypetide isolated from the Sargasso Sea
TPDEMYELITRLMNEVYQADQVVFSVHVHNDLGMAVANSMAAVRAGARQIECTINGIGERAGNASLEELVMAINTRQQYYQYETGITTEQIFPSSKLLSQITGVSVQPNKAIVGANAFAHEAGIHQHGVLKNSLTYEIMTPQSVGIKASNLVLGKHSGRHALSDRIKELGFELNDVELNQVFKEFKRLADIKKQIFDEDLEALVTHGIRKHTDRFQLEQLNITSGTSVIPTATVIMKIDGEQVKKAGFGDGPVDAALNTIRDMTGIDCRLTSYVVKAITGGTDAQGEVSVGVDQDGMQLTGRGAHTDIVVA

SEQ ID NO: 115948 - protein, 276 aa, Unknown
  Bacterial polypetide isolated from the Sargasso Sea
RNIKFSTVCGLARANLNDINRCWEAIKNAKQPRIHTFIGTSPIHREFQVRLNKTEVIEKITGTVSHARNLCENVQWSPMDATRTEEDYLCQVVEAAIKAGANTINIPDTVGYTAPNESARIIEILKNKVLDIDRVTIATHCHNDLGMATANALAAVSAGARQIECTINGLGERAGNTALEEVVMAMKVRNDIIPYKTRVDAKKLIKASRLVATVSGFPVQFNKAIVGKNAFAHESGIHQDGMLKHSGSFEIMSPEDIGLTESNLVMGKHSGRAAYD

SEQ ID NO: 115949 - protein, 293 aa, Unknown
  Bacterial polypetide isolated from the Sargasso Sea
SSKDRVIIFDTTMRDGEQSPGASMSLEEKIQIARVFDELGIDIIEAGFPIASPGDFEAVTEVSKILKKSIPAGLSRHSKKDIDRAHEALKHAPRFRIHTFISTSPLHMKHKLNMSSEDVYESIGQHVAYARKFTDDVEWSCEDGTRTDMDFMCKTVELAIKNGATTINIPDTVGYTIPSEFTKIIKTLINKVPNIDKAILSTHCHNDLGLAVANSLAGVQAGARQIECTINGLGERAGNAALEEVVMAIKTRPDLMPYDTAINTTLLSKASKIVSNATGFPVQYNKAILEKML

SEQ ID NO: 115950 - protein, 293 aa, Unknown
  Bacterial polypetide isolated from the Sargasso Sea
MTDKNRVYIFDTTMRDGEQSPGASMSLEEKIQIARVFDELGIDIIEAGFPIASPGDFEAVTEVSKILKNSIPAGLARHSKKDIDRCYEALKHSPRFRIHTFISTSPLHMKHKLNMTPEQVYDSIKEHVTYARKFTDDVEWSCEDGTRTDMDYMCKTVELAIKCGAKTINIPDTVGYTVPSEFTKIIQTLLNKVPNIDKAILSTHCHNDLGLAVANSLAGVQAGARQIECTINGIGERAGNAALEEVVMAMKTRNDLMPYSTGINSTLLSKASKIVSNATGFPVQFNKAIVEKT

SEQ ID NO: 115951 - protein, 163 aa, Unknown
  Bacterial polypetide isolated from the Sargasso Sea
MSKNRVIIFDTTLRDGEQSPGASMSLEGKLQIASAFQDLGVDVLEAGFPAASPGDFEAVTEISKLLKTTVPCGLARAVKNDLEKCVDSLKHSKNFRIHTFISTSDLHIKHKLQKTKDQVLELIKSSIEYAKKHTDDVEWSPEDATRTDPDYLCKTVELAIKCG

SEQ ID NO: 115952 - protein, 287 aa, Unknown
  Bacterial polypetide isolated from the Sargasso Sea
ARQVECTINGLGERAGNASLEEIVMSLKVRNDLNPYETEIDSKQIYPTSRLVSSVTGVFVQPNKAIVGANAFAHEAGIHQDGVLKQSLTYEIMDPSEVGIPSNHIVLGKHSGRHAFRDRLTEFGYELSEDNFEIAFIKFKELCDKKKYVFDEDIEALINEEFVRSGDFYKLESLECQSGTEKTPKAKIKILVDGEEKQAQASGDGPIDSVFKAISEAVQIFPVLDSYSVSSITGGMDAQGEVTVTIKDDDISARGKGVSTDVIIASARALINALNTLDGEKTPKSKT

SEQ ID NO: 115953 - protein, 218 aa, Unknown
  Bacterial polypetide isolated from the Sargasso Sea
QLPVHPRHPYAGDLVFTAFSGSHQDAIKKGFKAIKKSNNPKWEVPYLPIDPADLGRSYEAVVRINSQSGKGGVAFLLEKDHGVSLPRRLQISLSQKIQKLADETGKEITSSQIWEIFDANYLKPKNNFSYIKHSSTSDGDLHSLKLEMNMDAKAIKIEGTGNGPIDSFMNGLSNQFGFDIKVADYHQTAISSGSDAKAAAYIELEKDGKTFWGVGIHP

SEQ ID NO: 115954 - protein, 270 aa, Unknown
  Bacterial polypetide isolated from the Sargasso Sea
ALEVCEAVMDVWQPNRDNPTIINLPSTVEMATPNIFADQIEWMHTNFRSRENVILSVHPHNDRGTGVAAAELAQMAGADRVEGTLFGNGERTGNVDIVTLGLNLFTQGVDPDLDFSNINSLMDTAVHCNQLPIHARHPYAGELVHTAFSGSHQDAINKGMKAMETANSPLFEVPYLPIDPKDIGRDYEAIIRVNSQSGKGGVSYILENDYSIRLPKPAQAQFSQVIQKITDETSQEITPEEIWKAFQSTFIEQTGPFQLISFSSEVASRS

SEQ ID NO: 115955 - protein, 201 aa, Unknown
  Bacterial polypetide isolated from the Sargasso Sea
MKIRIFDTTLRDGEQTPGVSLSPEQKLNIAKKLDALGIDAIETGFPVISDGERSAVKMITSESFNSELCGLARTNKKDIDAAVDCGLNYIHTFIATSDIHLEYKLKMTREQALEKAIDAVEYGKSRGLQVEFSAEDATRTDRVFLKEIFSEVAKAGADRIDIPDTVGYSTPQYIAEITKDAIDATKLPVSVHCHNDFGLAV

SEQ ID NO: 115956 - protein, 253 aa, Unknown
  Bacterial polypetide isolated from the Sargasso Sea
QVGYTTPDEMYELISKLRNEVYDADKVVFSVHCHNDLGLGVANSLAAVRAGARQIECTINGIGERAGNASLEEIVMALKTRQEYFGFESDIDTEQLYPSSKLLSQITGVDVQPNKAIVGANAFSHEAGIHQHGVLKNPLTYEIMTPQSVGIKSSNLVMGKHSGRFALGQRIQELGFDLNDIDLNNIFKEFKRLADLKKQVFDEDIEALVTHGVGRNSDKFILKDLIVTSGTNAIPTATISMKIDDKVFKKAGF

SEQ ID NO: 115957 - protein, 265 aa, Unknown
  Bacterial polypetide isolated from the Sargasso Sea
EEVVMAMRTRHDLMPYTTNINTKLLSKASKVVSNATGFPVQFNKAVVGKNAFAHESGIHQDGMLKNRNTYEIMTPESVGVKKTSLVMGKHSGRHAFRDKLSDMGYVDVTDDIINTAFGKFKILADKKKHIYDEDIAALVDDSLVTEDNVIKLKSLKVFAGTGEPQKAEMTLEIFGEVKSASDTGDGPVDAIFKCIKKLYAHEVKLLLYNVHAVTEGTDAQATVSVRIEENGKTTVGQAADTDTLVASANAYISALNKLIIKRKKT

SEQ ID NO: 115958 - protein, 239 aa, Unknown
  Bacterial polypetide isolated from the Sargasso Sea
MSDKERVFIFDTTMRDGEQSPGASMSLEEKIQIARVFDELGIDIIEAGFPIASPGDFEAVSAISKVLKKSIPCGLSRHSKKDIDRCYEALKHAPRFRIHTFISTSPLHMKHKLNKTPEQVYDSIKEHVTYARNLTDDVEWSCEDGTRTDMDYMCKTVELAIKSGATTINIPDTVGYTVPSEFTKIIKTLLNKVPNIDKAILSTHCHNDLGLAVANSLAGVQAGARQIECTINGIGERAG

SEQ ID NO: 115959 - protein, 310 aa, Unknown
  Bacterial polypetide isolated from the Sargasso Sea
IFDTTLRDGEQSPGASMNLDEKLQIAEVLDSMKVDIIEAGFPIASNGDFEAVSEVSKHVKNSTIAGLARASFKDIDRAWEAVQHAKSPRIHTFIATSPLHMKYKLKKTEEEVLEAIQKTVSHARNLCDNIEWSCEDGGRSELEFLYQCIELAINSGASTINIPDTVGYTLPEEFGKIFRNVKNNVPNIDKAILSTHTHNDLGLATANNVAAIKEGARQVECTINGMGERAGNSSLEEIVMTLKVKKDLMPFHTDIKTESIMKASRLVSSITGFPVQPNKAIVGANAFAHEAGIHQDGMLKHGWNFMNYDT

SEQ ID NO: 115960 - protein, 261 aa, Unknown
  Bacterial polypetide isolated from the Sargasso Sea
NSLAAVLNGARQVECTINGLGERAGNAALEEIVMTVRTRQDIFPCDTRINSKLIMKSSRLVSGITGFPVQPNKAIVGKNAFAHESGIHQDGIIKSRETYEIMKAEDIGLVSNSLVLGKHSGRNAFKQKLTDLNIMPKTNAELDGLFYRFKDLADKKHEIFDEDLINLSSNIKVATNSINFNYMNVITETNKKPHAHIKLVVDDEILEATSTGDGAVDAAFNAIEKIIKSKCKLILYSVNNITSGTDSQGEVTVRITKDESI

SEQ ID NO: 115961 - protein, 190 aa, Unknown
  Bacterial polypetide isolated from the Sargasso Sea
VTVSCHCHNDLGLATANSIYGVINGARQIECTVNGIGERAGNTSLEEVVMILRQHTDLNLDTNINSKLLNVTSQKVSELMGMPVQPNKAIVGSNAFAHSSGIHQDGVIKKRETYEIIDPLDVGVDKSSIVLTARSGRAALAFRMKQYGVNLTKKELDDVYNEFLILADKKKEVTDTDFPEILQNKNISYG

SEQ ID NO: 115962 - protein, 262 aa, Unknown
  Bacterial polypetide isolated from the Sargasso Sea
AIKSGAKTINIPDTVGYTVPSEFTKIIQTLLNKVPNIDKAILSTHCHNDLGLAVANSLAGVQAGARQIECTINGIGERAGNAALEEVVMAIRTRNDLMPYSTGINTKLLSKASKVVSNATGFPVQYNKAIVGKNAFAHEAGIHQDGMLKNRETYEIMTPESVGVKQTSLVMGKHSGRHAFKDKLNSLGYVDVTDDVIQNAFGKFKILADKKKHVYDEDIIALVDDSLIIDNKVNALTLKSLKVFAGTGEPQKEEMTLEIFGE

SEQ ID NO: 115963 - protein, 291 aa, Unknown
  Bacterial polypetide isolated from the Sargasso Sea
AEDKNRVYIFDTTMRDGEQSPGASMSLEEKIQISRVFDELGIDIIEAGFPIASPGDFEAVTEVSKILKNSIPAGLSRHTKKDIDACYEALKSAKRFRIHTFISTSPLHMKHKLNKTPEEVVESIKEHVTYARKFTDDVEWSCEDGTRTDLDFMCKTVELAIKCGAKTINIPDTVGYSVPSEFKKIIEALINKVPNIDKAILSTHCHNDLGLAVANSLAGVSAGARQIECTINGIGERAGNAALEEIVMAMKTRNDLMPFKTGINTKLLSKASKVVSNATGFPVQFNKAIVG

SEQ ID NO: 115964 - protein, 245 aa, Unknown
  Bacterial polypetide isolated from the Sargasso Sea
YAEDAGRTENDFLARVCEAVIKAGATVLNIPDTTGYCLPEEYGDKIKYLKENVTGIDKATLSCHCHNDLGLATANSIAGVQNGARQIECTINGIGERAGNTSLEEVVMILRQHPTLNLDTKIQSNKLYGISQLVSDSMAMPVQPNKAIVGANAFAHSSGIHQDGVIKKRETYEIINPKDVGVNKSSIILTARSGRAALAYRAKNIGYELDKLQLDKVYQQFLIIADQQKEISDLDLPKIIKSSNI

SEQ ID NO: 115965 - protein, 256 aa, Unknown
  Bacterial polypetide isolated from the Sargasso Sea
KRFRIHTFISTSPVHMKHKLNMTNEQVLGAIKESVTYAKKFTDDVEWSCEDGTRTDLDFMYKTIELAIKCGATTINIPDTVGYSIPEEFAKTIKLIKNNVPNIDKAIISAHCHNDLGLAVANALSGLSAGVRQIECTINGIGERAGNAALEEIVMAIKTRDDLLPYETGIKTELISKASKIVSNATGFPVQFNKAIVGKNAFAHESGIHQDGMLKNRETYEIMTPESVGVKKTSLVMGKHSGRHAFKDKLSDLGYA

SEQ ID NO: 115966 - protein, 220 aa, Unknown
  Bacterial polypetide isolated from the Sargasso Sea
TTPSEFGKLIADINKNVPNIDEAVISVHGHNDLGLAVANFLEAVKNGARQLECTINGIGERAGNASLEELVMALHVRKSFFNSFFKRNPDSPTPLTAIRTEEITKTSRLVSNLTGMTVQPNKAIVGANAFAHESGIHQDGVLKNRLTYEIIDAKTVGLSDNKISLGKLSGRSAVRARLEEMGYDLSREDLNDAFARFKDLADRKREITDRDLEAIVSEQV

SEQ ID NO: 115967 - protein, 307 aa, Unknown
  Bacterial polypetide isolated from the Sargasso Sea
ESIKEHVTYPRNYTDDVEWSCEDGTRTDMDYMCKTVELAIKCGAKTINIPDTVGYTIPSEFTTIIETLLNKVPNIDKAILSTHCHNDLGLAVANSLAGVQAGARQIECTINGLGERAGNAALEEVVMAIKTRPDLMPYETGINTTLLSKASKIVSNATGFPVQYNKAIVGKNAFAHEAGIHQDGMLKNRQTYEIMTPESVGVKQTSLIMGKHSGRHAFKDKLNSLGYPDLTDDVVSNAFAKFKVLADKKKHVYDEDIIALVDDSLIVDNKVNAINLKSLKVFAGTGEPQRAEMTLDVYGEIKQASET

SEQ ID NO: 115968 - protein, 190 aa, Unknown
  Bacterial polypetide isolated from the Sargasso Sea
RIHTFIATSPIHMKAKLRMSPEDVLEKAVQAVRQARDAVDDVEFSAEDAGRSDEDFLCRVFEAVIDAGARTVNIPDTVGYTMPHQFGDLFTRLMARIPNSDKAVFSVHCHNDLGVAVANSLAAVQGGARQVECTINGLGERAGNASLEEVVMAVRTRQDVFSCDTEIDTTQILPASRMVSSYHGFSGSAQ

SEQ ID NO: 115969 - protein, 149 aa, Unknown
  Bacterial polypetide isolated from the Sargasso Sea
MSQQVIIFDTTLRDGEQALQASLSVKEKLQIAMALERMGVDVMEVGFPVSSPGDFESVQTIARTIKNSRVCALARCVEKDIDVAAESLKVAEAFRIHTFIATSPMHIATKLRSNLDEVIERAIYMVKRARNYTDDVEFSCEDAGRTPIA

SEQ ID NO: 115970 - protein, 189 aa, Unknown
  Bacterial polypetide isolated from the Sargasso Sea
MSENNRVYIFDTTMRDGEQSPGASMSLEEKIQIARVFDELGVDIIEAGFPIASPGDFEAVTEISKILKKSIPAGLSRHSKKDIDRCYESLKHAERFRIHTFISTSPLHMKHKLNKSPEEVYEAIKEHVTYARKFTDDVEWSCEDGTRTDMDYMCKTVELAIKCGAKTINIPDTVGYTVPSEFTKIIKLY

SEQ ID NO: 115971 - protein, 213 aa, Unknown
  Bacterial polypetide isolated from the Sargasso Sea
MPDKNRVFIFDTTMRDGEQSPGASMSLEEKIQISRVFDELGVDIIEAGFPVASPGDFEAVTEVSKILKKSIPCGLSRHIKKDIDACYEALKSAKRFRIHTFISTSPLHMKHKLNKSPEDVVEAIKEHVTYARKFTDDVEWSCEDGTRTDMDFMCKTVELAIKCGAKTINIPDTVGYTVPSEFKKIIETLINKVPNIDKAILSTHCHNDLGLAV

SEQ ID NO: 115972 - protein, 278 aa, Unknown
  Bacterial polypetide isolated from the Sargasso Sea
KRRMFEHLVKLGFKEIEVGFPSASQTDFDFVREIIELDLIPRDVTIQVLTQAREELIKRTFESVKGAKTAIIHLYNSTSTLQRRVVFNQDKAGVKKIAVDGAKIIKDLANGTPDNETIIYQYSPESFTGTELDYAKEVCEAVMDVWEPSPENKVILNLPATVEMATPNIYADQIEWMHKNLKNRDCIILSLHPHNDRGTGVAAAELGLMAGADRIEGTLFGNGERTGNVDIVTLAMNLYTQGVEPYLDFSNINEVRRVAEHCNQLPVHPRHPYGGDLV

SEQ ID NO: 115973 - protein, 294 aa, Unknown
  Bacterial polypetide isolated from the Sargasso Sea
KHKLNMTKEQVYDSIKEHVTYARKFTDDVEWSCEDGTRTDMDYMCKTVELAIKCGAKTINIPDTVGYTVPSEFTNIIQTLFNKVPNIDKAILSTHCHNDLGLAVANSLAGVQAGARQIECTINGIGERAGNAALEEVVMAMKTRPDLMPYETGINTTLLSKASKIVSNATGFPVQFNKAIVGKNAFAHEAGIHQDGMLKNRNTYEIMTPESVGVKQTSLVMGKHSGRHAFKDKLVSLGYADLTDDVIENAFGKFKILADKKKHVYDEDIVALVDDSLIKDDNVIVLKSLKVFAG

SEQ ID NO: 115974 - protein, 299 aa, Unknown
  Bacterial polypetide isolated from the Sargasso Sea
HTFISTSPLHMKHKLNKSPEEVLESIKESVTYARKFTDDVEWSCEDGTRTDMDYMCKTVELAIKSGAKTINIPDTVGYTVPSEFKKIIETLINKVPNIDRAILSTHCHNDLGLAVANSLAGVMAGARQIECTINGIGERAGNAALEEVVMAMRTRHDLMPYTTNINTKLLSKASKVVSNATGFPVQFNKAIVGKNAFAHESGIHQDGMLKNRNTYEIMTPESVGVKKTSLVMGKHSGRHAFRDKLSDMGYVDVTDDIINTAFGKFKILADKKKHIYDEDIAAIVDDSLVTEDNVIKLKS

SEQ ID NO: 115975 - protein, 251 aa, Unknown
  Bacterial polypetide isolated from the Sargasso Sea
LLKNRVPNIDKAILSVHCHNDLGLAVANSLSGIKAGARQVECTINGLGERAGNAALEEIVMALRTRKDVLPFSNNIKTNYITKASRLVSQITGFAVQPNKAIVGANAFAHEAGIHQDGVLKNASTYEIMTLESVGLIQSNLVLGKHSGRHAFKQKLIDMGYELGANSLEDAFKRFKDLADKKKDVFDEDIIALVDDERSSNDRIKFVSLKVVAGSVEPQTAELELEIDGKIIKQLSSGDGPVDATFNCINK

SEQ ID NO: 115976 - protein, 242 aa, Unknown
  Bacterial polypetide isolated from the Sargasso Sea
MTDKNRVYIFDTTMRDGEQSPGASMSLEEKIQIARVFDELGIDIIEAGFPIASPGDFEAVTEVSKILKNSIPAGLSRHSKKDIDRCYEALKHAPRFRIHTFISTSPLHMKHKLNKSSEEVYESIKEHVTYARKFTDDVEWSCEDGTRTDMDYMCKTVELAIKCGAKTINIPDTVGYTVPSEFTKIIQTLMNKVPNIDKAILSTHCHNDLGLAVANSLAGVQAGARQIECTINGIGERAGNAA

SEQ ID NO: 115977 - protein, 59 aa, Unknown
  Bacterial polypetide isolated from the Sargasso Sea
MSKDRLIIFDTTLRDGEQSPGATMDQDEKLRIARALERMRVDVIEAGFAIASQGGFPLG

SEQ ID NO: 115978 - protein, 266 aa, Unknown
  Bacterial polypetide isolated from the Sargasso Sea
VPNADKAVFSVHCHNDLGLAVANSLAAVVAGARQVECTINGLGERAGNAALEEIVMAIKTREDLLGVHTRIDTPHILSTSRMVSGITGFPVQPNKAIVGANAFAHESGIHQDGVLKHRETYEIMSAQSVGWHTNKLSLGKLSGRNAFRSRLDELGIVLAGEAELNAAFARFKDLADKKHEIFDEDLQALVSDTLAEEAPEHFKLITLDVASKTGEVPQAQVVVSVEGAEHSGNAQGSGPVDATFKAIESIARSEANLQLYSVNAIT

SEQ ID NO: 115979 - protein, 332 aa, Unknown
  Bacterial polypetide isolated from the Sargasso Sea
AGRSEFDFLCQVIEAVINAGATTINIPDTVGYNLPQYFGELIGKLIENVPNSDKATFSVHCHNDLGLAVGNSLAAVINGARQVECTINGLGERAGNAALEEIVMSVRTRRDVFACDTNIDTSQIVNCSRLVSTITGFPVQPNKAIVGANAFAHESGIHQDGVLKSRETYEIMRAEDVGWNTNRMVLGKHSGRNAFRTRLEELGITFTEDEELNAVFSQFKELADKKHEVYDDDLQALVSDTIQGSADERIKLVSLKVGTETGVKPKALVTLSIDGQEKCANAEGGGPVDATYKAIENMVESGCNLPLYSVNTLLMAQITRRKYSSYLTGRSN

SEQ ID NO: 115980 - protein, 286 aa, Unknown
  Bacterial polypetide isolated from the Sargasso Sea
FDELGIDVIEAGFPIASPGDFEAVTEISKVLKKSIPAGLSRATKKDIDACKDSLKHAKRFRIHTFISTSPLHMKHKLNKSPEEVLGLIKESVTYASKFTDDVEWSCEDGTRTDLDFMCKSVELAIKCGAKTINIPDTVGYSVPSEFKKIIETLINKVPNIDKAILSTHCHNDLGLAVANSLAGVMAGARQIECTINGIGERAGNAALEEVVMAMRTRNDLMPYTTGINTKLLSKASKIVSNATGFPVQFNKAVVGKNAFAHESGIHQDGMLKNRNTYEIMTPESVE

SEQ ID NO: 115981 - protein, 122 aa, Unknown
  Bacterial polypetide isolated from the Sargasso Sea
MSDKEKVYIFDTTMRDGEQSPGASMSVEEKIQISRVFDEMGIDIIEAGFPISSPGDFEAVSEISKSVKNSIPCGLSRALKKDIDACHESLKFAKRFRIHTFISTSPVHMKHKLDMTNDQVLD

SEQ ID NO: 115982 - protein, 110 aa, Unknown
  Bacterial polypetide isolated from the Sargasso Sea
MTQDDKTQDRVVIFDTTLRDGEQSPGATMTHAEKLEIAGLLDDMGVDIIEAGFPIASEGDFNAVSEIAKTAQNAVICGLARAQLGDIDRCWEAVKHAARPRIHTFIGTSP

SEQ ID NO: 115983 - protein, 102 aa, Unknown
  Bacterial polypetide isolated from the Sargasso Sea
IIFYTTLRDGEQALQASLSVKEKLQIALALERMGVDVMEVGFPVSSPGDFESVQTIARQVKNSRVCALARCIEKDIDVAAESLKVAEAFRIHTFIATSPMHI

SEQ ID NO: 115984 - protein, 241 aa, Unknown
  Bacterial polypetide isolated from the Sargasso Sea
MTEKNRIIIFDTTMRDGEQSPGASMSLEEKLQISRVFDELGVDVIEAGFPIASPGDFEAVTEISKTLKRSIPAGLARATKKDIDACHQALKHAKNFRIHTFISTSPLHMKHKLNKSPEEVLESIKESVIYARKFTDDVEWSCEDGTRTDMDYMCKTVELAIKCGAKTINIPDTVGYTVPSEFKKIIETLINKVPNIDKAILSTHCHNDLGLAVANSLAGVMAGAKQIECTINGIGERAGNA

SEQ ID NO: 115985 - protein, 312 aa, Unknown
  Bacterial polypetide isolated from the Sargasso Sea
ISRVFDELGIDVIEAGFPIASPGDFEAVTAISKILKKSVPAGLARHTKKDIDACYEALKSAKKFRIHTFISTSALHMKHKLNKTPEQVIDSIKEHVTYARKFTDDVEWSCEDGTRTDIDFMCKTVELAIKCGARTINIPDTVGYTVPSEFKKIIETLKNKVPNIDKAILSVHCHNDLGLAVANSLAGVSAGARQVECTINGIGERAGNAALEEIVMAMKTRSDLMPFKTGINTKLISKASKTVSNATGFPVQFNKAIVGKNAFAHESGIHQDGMLKNRNTYEIMTPESVGVKKTSFGMGKHSGRHAFKDKLT

SEQ ID NO: 115986 - protein, 289 aa, Unknown
  Bacterial polypetide isolated from the Sargasso Sea
FISTSPLHMKHKLNKSPEEVLEAIKESVTYARKFTDDVEWSCEDGTRTDMDYMCKTIELAIKCGAKTINIPDTVGYTVPSEFKKIIETLISRVPNIDKAILSTHCHNDLGLAVANSLAGVMAGARQIECTINGIGERAGNAALEEVVMAMRTRHDLMPYTTNINTKLLSKASKVVSNATGFPVQFNKAVVGKNAFAHESGIHQDGMLKNRNTYEIMTPESVGVKKTSLVMGKHSGRHAFRDKLSDMGYVDVTDDIINTAFGKFKILADKKKHIYDEDIAALVDDSLVTD

SEQ ID NO: 115987 - protein, 276 aa, Unknown
  Bacterial polypetide isolated from the Sargasso Sea
EIHLKHKLNMAKDEVLKAAYEGVKMAKSFCENVEFSPEDASRTDHGFLTEVVNAAIEAGATTINVPDTVGYTIPYEFGELFKHLISNCNDAENVIFSVHCHDDLGLSVANSLAAVESGARQIECTINGIGERAGNTSLEEVCMAIRTREEYFDFKTSIDSTKLYPTSRLVSSITGMHVPRNKAIVGDNAFAHEAGIHQHGMLRDSSTYEIMKPQDVGIARSNLVLGKHSGRHAFLDRINELGFALEKDEIDPAFQEFKKLADRKKEIFDTDIEAIV

SEQ ID NO: 115988 - protein, 268 aa, Unknown
  Bacterial polypetide isolated from the Sargasso Sea
FISTSELHMRHKLQMEPTEVKKMAIAAVERAKKATDNVEFSPEDATRSDPNFLIEILSETVRAGATILNIPDTVGYTTPDEMFELIKLLKNEVYNSDKVTFSVHCHNDLGLGVANSLAAIRAGARQIECTINGIGERAGNASLEELVMALKTRQEYFGFDFDIDTEQLFPSSKLLSQITGVDVQPNKAIVGANAFAHEAGIHQHGVLKNALTYEIMTPQSVGIKSSSLVLGKHSGRSALGERIKEMGFKLNDIDLNHIFVEFKKLADL

SEQ ID NO: 115989 - protein, 264 aa, Unknown
  Bacterial polypetide isolated from the Sargasso Sea
SPSSFPRLGVDIIEAGFPFASPGDFEAVQRIAASVGTSDGPVICGLARATKGDIKACAEAVAPAAHRRIHTFLATSDIHLEHKLRKSRAEVLQIVPEMVAYARSLVEDVEFSCEDAGRSDPEFMHQVIEAAIAAGATTINIPDTVGYTTPGEFGALIADINSEVPNIDRAVISVHGHNDLGLAVANFLEAVKSGARQLECTINGIGERAGNASLEELVMALHVRRSYFNPFLGRGEGSSEPLTAIRTEEIYKSSRLVSNLTGMA

SEQ ID NO: 115990 - protein, 290 aa, Unknown
  Bacterial polypetide isolated from the Sargasso Sea
YAALEEVVMAMKTRNDLMPYSTGINTTLLSKASKIVSNATGFPVQFNKAIVGKNAFAHEAGIHQDGMLKNRNTYEIMTPESVGVKQTSLVMGKHSGRHAFKDKLTSLGYVDVTDDVIENAFGKFKVLADKKKHVYDEDILALVDDSLITDNKINALSLKSLKVFAGTGEPQKADMTLDVYGDVKQATETGDGPVDAIFKCIKKLYPHDVNLQLYQVHAVTEGTDAQATVSVRIEENGKTTVGQAADTDTLVASANAYINALNKMIIKRSKTAPESIVVEKNTKTNKMRGI

SEQ ID NO: 115991 - protein, 297 aa, Unknown
  Bacterial polypetide isolated from the Sargasso Sea
VHKIVQTLLNKVPNIDKAILSTHCHNDLGLAVANSLAGVQAGARQIECTINGLGERAGNAALEEVVMAIKTRPDLMPYETGINTTLLNKASKIVSNATGFPVQYNKAIVGKNAFAHEAGIHQDGMLKNRQTYEIMTPESVGVKQTSLVMGKHSGKHAFKDKLNSLGYPDLTDDVVGNAFAKFKVLADKKKHVYDEDIIALIDDSLIIDNKVNAISLKSLKVFAGTGEPQRAEMTLDVYGDVKQASETGDGPVDAIFKCIKTLFPHDVNLQLYQVHAVTEGTDAQATVSVKIEEKGKT

SEQ ID NO: 115992 - protein, 103 aa, Unknown
  Bacterial polypetide isolated from the Sargasso Sea
MSDKDKVFIFDTTMRDGEQSPGASMSVEEKIQISRVFDEMGIDIIEAGFPISSPGDFEAVSEISKEIKNSIPCGLARAIRKDIDACHESLRHSNRFRIHTFIL

SEQ ID NO: 115993 - protein, 257 aa, Unknown
  Bacterial polypetide isolated from the Sargasso Sea
MEKIRFLDTTLRDGEQSPGCSMSASEKLTLAKQLERLGVNTIEAGFAASSPGDFDSVRDIGQQIQNSTIVSLCRASKNDIEAAVDALSDAKNWGIHTFISTSDLHMKHKLQMKPKEVKNMAVAAVERAKKATDNVEFSPEDATRSNPQFLVEVLSEAVRAGATILNIPDTVGYTTPDEMFELITRLRNEVYNADKVVFSVHCHNDLGLGVANSLAAVRAGARQIECTINGIGERAGNASLEEIVMALKTRQEYFGFE

SEQ ID NO: 115994 - protein, 247 aa, Unknown
  Bacterial polypetide isolated from the Sargasso Sea
MAKDEVLKAAYEGVKMAKSFCENVEFSPEDASRTDHGFLTEVVNAAIEAGATTINVPDTVGYTIPYEFGELFKHLISNCNDAENVIFSVHCHDDLGLSVANSLAAVESGARQIECTINGIGERAGNTSLEEVCMAIRTREEYFDFKTSIDSTKLYPTSRLVSSITGMHVPRNKAIVGDNAFAHEAGIHQHGMLRDSSTYEIMKPQDVGIARSNLVLGKHSGRHAFLDRINELGFALEKDEIDPAFQE

SEQ ID NO: 115995 - protein, 293 aa, Unknown
  Bacterial polypetide isolated from the Sargasso Sea
FDTTLRDGEQSPGASLNLEEKLAIAQQLARLGVDVIEAGFPFASPGDFKAVNKIANVVGGENGPIICGLARASKNDIKACFEAVSPAPKKRIHTFIATSDIHLKHKLRKSRKDVLSIVPEMVNYAKSLVDDVEFSCEDASRSEPEFLYEVIQLAISAGATTINIPDTVGFTTPSEFGKLIFDINKNVPNIDEAIISVHGHNDLGLAVANFLEAIKNGARQLECTINGIGERAGNASLEELVMSLHVRKSFFNNYLKRNPDSPTPLTAIRTEEITKTSRLVSNLTGMNVQPNKA

SEQ ID NO: 115996 - protein, 316 aa, Unknown
  Bacterial polypetide isolated from the Sargasso Sea
MKHKLDMTNDQVLDAIKDSVTYARKFTNDVEWSCEDGTRTDLDFMCKTIELAIKCGATTINIPDTVGYSIPEEFARTITHIKNNVPNIDKAIISAHCHNDLGLAVANALAGLSAGVRQIECTINGIGERAGNAALEEIVMAIKTRNDLMPYETGIKTELISKASKIVSNATGFPVQFNKAIVGKNAFAHESGIHQDGMLKNRETYEIMTPESVGVKKTSLVMGKHSGRHAFKDKLSDLGYSDLTDDVVQAAFGKFKVLADKKKHVYDEDIIALVDDSLIIDNKINAINLKSLKVFAGTGEPQKAEMTLDVFGEIKK

SEQ ID NO: 115997 - protein, 156 aa, Unknown
  Bacterial polypetide isolated from the Sargasso Sea
MNKENNYIKIFDTTLRDGEQSPGASMNIEEKLKIAEALEDLKVDIIEAGFPAASKGDYEAVSEISKKIKNSSICALSRASKNDIQTAADALKNAVAPRIHTFISTSELHMKHKLQLNSDEVYQKVIDSVSFARNLCDDVEWSCEDGTRTDLDFMCK

SEQ ID NO: 115998 - protein, 132 aa, Unknown
  Bacterial polypetide isolated from the Sargasso Sea
MSKDPGRILIFDTTLRDGEQSPGASLNLEEKLAIAHQLARLGVDVIEAGFPFASPGDFKAVNKIANAVGKENGPTICGLARASKGDIKACYEAVSPAPKKRIHTFIATSDIHLKHKLKKSRKDVLHIVPEMV

SEQ ID NO: 115999 - protein, 305 aa, Unknown
  Bacterial polypetide isolated from the Sargasso Sea
PIASPGDFDAVSAISKVLKKSIPCGLARHSKKDIDRCYEALKHAPRFRIHTFISTSPLHMKHKLNKTPEQVYESIKEHVTYARNLTDDVEWSCEDGTRTDMDYMCKTVELAINSGARTINIPDTVGYTVPSEFTKIIETLLNKVPNIDKAILSTHCHNDLGLAVANSLAGVQAGARQIECTINGIGERAGNAALEEVVMAIRTRNDLMPYETGINTTLLSKASKLVSNVTGFPVQFNKAVVGKNAFAHESGIHQDGMLKNRNTYEIMTPESVGVKQTSLVMGKHSGRHAFKDKLISLGYADLTDD

SEQ ID NO: 116000 - protein, 273 aa, Unknown
  Bacterial polypetide isolated from the Sargasso Sea
WTFEYSPESFTGTELEYAREVCDNVVEILKPVSKNKIIINLPATVEMSTPNIYGDQIEWMSKNLKNRNDICLSLHPHNDRGTAVAASEFGIMAGADRVEGTLFGNGERTGNVDIVTIALNMLTQGVEPNLDFSNINSVMREVEYCNQLPVHPRHPYAGDLVFTAFSGSHQDAIKKGFQAIKKSNDPKWEVPYLPIDPADLGRNYEAVVRINSQSGKGGVAFLLEKDHGVSLPRRLQISLSQRIQKLADDTGKEISSSQIWDILKKNTFNLLII

SEQ ID NO: 116001 - protein, 240 aa, Unknown
  Bacterial polypetide isolated from the Sargasso Sea
IVGKNAFAHESGIHQDGMLKNRQTYEIMTPESVGVKQTSLVMGKHSGRHAFKDKLTSLGYVDVTDDIVENAFGKFKILADKKKHIYDEDIIALVDDSLIIDNKVNAINLKSLKVFAGTGEPQKADMTLDVFGEVKQSTETGDGPVDAIFKCIKTLYPHNINLQLYQVHAVTEGTDAQATVSVRIEENGKTTVGQAADTDTLVASANAYINALNKMIIKRDKTAPDNPQVTAEYDNKVRGI

SEQ ID NO: 116002 - protein, 304 aa, Unknown
  Bacterial polypetide isolated from the Sargasso Sea
TTPSEFGKLIADINKNVPNIDEAVISVHGHNDLGLAVANFLESVKNGARQLECTINGIGERAGNASLEELVMALHVRKSFFNNFFKRNPDSPTPLTAIRTEEITKTSRLVSNLTGMIVQPNKAIVGANAFAHESGIHQDGVLKNRLTYEIIDAKTVGLSDNKISLGKLSGRSAVRARLEEMGYDLSREDLNDAFARFKDLADRKREITDRDLEAIVSEQVQLPEAKFQLSLVQVSCGNASKPTATITLLNTEDNTEQTAVSIGTGPVDAVCEALNKLAKVPNELIEFSVKSVTEGIDALGEVTI

SEQ ID NO: 116003 - protein, 209 aa, Unknown
  Bacterial polypetide isolated from the Sargasso Sea
MKESREIIIFDTTLRDGEQAPGCSMTMGEKLKIAHALKELNVDVIEAGFAAASPGDFDAVNAIASEIDGPTICSLARCNESDIEKAYEALKVNKNRRVHVFVATSEIHLKHKLNMAKDEVLKAAYEGVKMAKSFCENVEFSPEDASRTDHGFLTEVVNAAIEAGATTINVPDTVGYTIPYEFGELFKHLISNCNDTENVIFSVHCHDDL

SEQ ID NO: 116004 - protein, 241 aa, Unknown
  Bacterial polypetide isolated from the Sargasso Sea
MSKDPGRILIFDTTLRDGEQSPGASLNLEEKLAIAHQLARLGVDVIEAGFPFASPGDFKAVNKIAEVVGGENGPIICGLARASTNDIKACYEAISPAPKKRIHTFIATSDIHLKHKLRKTRSDVLCIVPEMVSYAKSLVDDIEFSCEDASRSDPEFLYEVIQLAITSGATTINIPDTVGFTTPSEFGKLIFDINKNVPNIDEAIISVHGHNDLGLAVANFLEAAKNGARQLECTINGIGER

SEQ ID NO: 116005 - protein, 265 aa, Unknown
  Bacterial polypetide isolated from the Sargasso Sea
TIKLIKNNVPNIDKAIISAHCHNDLGLAVANALSGLSAGVRQIECTINGIGERAGNAALEEIVMAIKTRDDLLPYETGIKTELISKASKIVSNATGFPVQFNKAIVGKNAFAHESGIHQDGMLKNRETYEIMTPESVGVKKTSLVMGKHSGRHAFKDKLSDLGYADVTDDVVQAAFGKFKILADKKKHIYDEDIVALVDDSLIIDNKINAINLKSLKVFAGTGEPQRAEMTLDVFGDIKHTTQTGDGPVDAIFKCIKDLYPHDVK

SEQ ID NO: 116006 - protein, 282 aa, Unknown
  Bacterial polypetide isolated from the Sargasso Sea
IKNKVPNIDKAIISAHCHNDLGLAVANALAGLSAGVRQIECTINGIGERAGNAALEEIVMAIKTRNDLMPYETGIKTELISKASKIVSNATGFPVQFNKAIVGKNAFAHESGIHQDGMLKNRETYEIMTPESVGVKKTSLVMGKHSGRHAFKDKLNDLGYTDLTDDVIQNAFGKFKILADKKKHVYDEDILALVDDSLIVDNKINAINLKSLKVFAGTGEPQKAEMTLDVFGEIKKTSQTGDGPVDATFKCIKALYPHEMKLLLYQVHAVTEGTDAQATVSV

SEQ ID NO: 116007 - protein, 207 aa, Unknown
  Bacterial polypetide isolated from the Sargasso Sea
MDKTNKKYKPYKPLSKENRLWPSKIIEKAPIWCSVDLRDGNQALIEPMGDERKKRMFNLLCKIGFKQIEIGFPAASQTDFDFTRYLINEKVIPSDVSIQVLTQARPEIIKRTFEALDGAPNAILHFYNSTSTLQRKVVFDKDKEGVKKIATDAAKLIKELSSKYKNTNWSFEYSPESFTGTELDYAVEVCDEVVDILKGASNNAIII

SEQ ID NO: 116008 - protein, 130 aa, Unknown
  Bacterial polypetide isolated from the Sargasso Sea
MYISIIKNIYMAEKDKVFIFDTTMRDGEQSPGASMSVEEKIQISRVFDEMGIDIIEAGFPISSPGDFEAVSAISKSVKNSIPCGLARATKKDIDACYESLKFAKRFRIHTFISTSPVHMKHKLNMTDEQV

SEQ ID NO: 116009 - protein, 301 aa, Unknown
  Bacterial polypetide isolated from the Sargasso Sea
AVQYAKSPRIHTFIATSPLHMKYKLKKTEDEVLEAIKKTVSYARNLCDNIEWSCEDGGRSELDFLYKCIELAINCGASTINIPDTVGYTLPEEFGKIFKNVKNNVSNIDKAILSTHTHNDLGLATANNVAAIKEGARQVECTINGMGERAGNSSLEEIVMTLKVKKDLMPFHTDIKTESIMKASRLVSSITGFPVQPNKAIVGANAFAHEAGIHQDGMLKHAGTYEIMTPESIGLNKSSLVLGKHSGKHAFSEKLKELGYEPGDNALMELFGRFKDLADKKKEIFEEDLIALAEDRSASYD

SEQ ID NO: 116010 - protein, 177 aa, Unknown
  Bacterial polypetide isolated from the Sargasso Sea
MTDKIYIFDTTLRDGEQSPGASMNLDEKLQIAEVLESMKVDIIEAGFPIASNGDFEAVKEVSKNIKNSTIAGLARASLKDIDRAWEAVQYAKSPRIHTFIATSPLHMKFKLKKTEDEVLEAINKTVSHARNLCDNIEWSCEDGGRSELEFLYKCIELAIKSGASTINIPDTVGYTLP

SEQ ID NO: 116011 - protein, 238 aa, Unknown
  Bacterial polypetide isolated from the Sargasso Sea
NTKINTKHIVPISKLVSSITGFPIQPNKAIVGANAFAHESGIHQDGVLKHRETYEIMLAQDVGWDDNKIVLGKHSGRNALKTRLNELGYDFTEDNDLNKIFDNFKKLADIKHEIYDDDLHTLVSSKYSDQPSKYFKLINIQSSSNFNNKAESEVIIFYKNKENKTTASGGGAVDATFKAIEKIVKSNSLLRLYSVNNITDGTDSLGEVTVRLEKNNIIVNGLGADSDIVVASAKAYID

SEQ ID NO: 116012 - protein, 258 aa, Unknown
  Bacterial polypetide isolated from the Sargasso Sea
MSDKEKVYIFDTTMRDGEQSPGASMSVEEKIQISRVFDEMGIDIIEAGFPISSPGDFEAVSEISKSVKNSIPCGLSRALKKDIDACHESLKFAKRFRIHTFISTSPVHMKHKLDMTNDQVLDAIKESVTYARKFTNDVEWSCEDGTRTDLDFMCKTIELAIKCGATTINIPDTVGYSIPEEFARTITHIKNNVPNIDKAIISAHCHNDLGLAVANALAGLSAGVRQIECTINGIGERAGNAALEEIVMAIKTRNDLMP

SEQ ID NO: 116013 - protein, 264 aa, Unknown
  Bacterial polypetide isolated from the Sargasso Sea
ALTQARPELIKRTFEALEGAHSAIVHVYNSTSTLQRRVVFKSDEEGIKKIATDGAKWVLEQSEKYNETDWMFEYSPESFTGTELPYAVEVCNAVNEVWEPRKDKKTIINLPATVEMASPNTYADQIEWMCRNLDNRENVIVSLHPHNDRGTAVAATELGVMAGADRIEGTLFGNGERTGNVDLVTLALNMLTQGVDPHLDFSNINPIMREAEYCNQLPVHPRHPYAGDLVFTAFSGSHQDAIKKGLTEMRNSNQGNWEVPYLPI

SEQ ID NO: 116014 - protein, 140 aa, Unknown
  Bacterial polypetide isolated from the Sargasso Sea
MSDRVYIFDTTLRDGEQSPGATMNLDEKMQIAQLLEEMQVDIIEAGFPIASNGDFEAVSEISKNIKNSTIAGLSRAKIADIDRAWEAVKHAKSPRIHTFIATSPIHMKYKLMKTEDEVLESIKHTVSHARNLCDNIEWSC

SEQ ID NO: 116015 - protein, 224 aa, Unknown
  Bacterial polypetide isolated from the Sargasso Sea
MAQEKVIIFDTTLRDGEQSAGIGLTTNEKLEIARQLERLGVDVIEAGFAASSPGDLEAVKAISAEIKKPIVASLARCYIPDVDAAWEGVKDAKNPRLHVFISSSDNHIMNLLRKNPEEVLETAVASVEKAKSYCDDVEFSPMDATRTDPEYLFKMLEAVIDAGATTVNIADTVGYAIPSEFAQRIEDIKSNVPNIDKAIISVHCHNDLGLSVANSLAAVKARCE

SEQ ID NO: 116016 - protein, 269 aa, Unknown
  Bacterial polypetide isolated from the Sargasso Sea
CHNDLGLAVANSLAGVQAGARQIECTINGLGERAGNAALEEVVMAIKTRPDLMPYETGINTTLLSKASKIVSNATGFPVQYNKAIVGKNAFAHEAGIHQDGMLKNRQTYEIMTPESVGVKQTSLVMGKHSGRHAFKDKLNSLGYPDLTDDVVGNAFAKFKVLADKKKHVYDEDIIALVDDSLIVDNKVNAITLKSLKVFAGTGEPQKAEMTLDVYGDVKNAIETGDGPVDAIFKCIKTLYPHDVNLQLYQVHAVTEGTDAQATVSVKIE

SEQ ID NO: 116017 - protein, 131 aa, Unknown
  Bacterial polypetide isolated from the Sargasso Sea
MSRDNKITIFDTTLRDGEQSPGCSMNLEEKIKIFQALESLNVDVVEAGFAIASVGDYEAIKEISKLSKTSTICSLARANKEDIDRAYEALKYAKKYRIHTFIATSDLHIKYKLKLTKEKVVDYVRESVKTC

SEQ ID NO: 116018 - protein, 294 aa, Unknown
  Bacterial polypetide isolated from the Sargasso Sea
ISRVFDELGIDIIEAGFPIASPGDFEAVKAISKILKNSIPAGLSRANKKDIDACHEALKSAPRFRIHTFISTSPLHMKHKLNKTPEQVVDAIKESVTYARKFTDDVEWSCEDGTRTDMDFMCKIVELAIKSGAKTVNIPDTVGYTTPSEFTKIITTLKNKVPNIDKAILSVHCHNDLGLAVANSLAGVSAGARQVECTINGIGERAGNAALEEIVMAIRTRNDLMPYTTGIKTELLSKASKVVSNATFPVQFNKAIVGKNAFAHEAGIHQDGMLKNRETYEIMTPESVGVKKHP

SEQ ID NO: 116019 - protein, 235 aa, Unknown
  Bacterial polypetide isolated from the Sargasso Sea
TLRDGEQSPGASLNLEEKLAIAHQLARLGVDVIEAGFPFASPGDFKAVNKIANAVGKENGPIICGLARASKGDIKACYEAVSPAPKKRIHTFIATSDIHLKHKLKKSRKDVLQIVPEMVNYAKSLVDDIEFSCEDASRSDPDFLYEVIQLAISAGATTINIPDTVGFTTPSEFGKLIADINKNVPNINEAVISVHGHNDLGLAVANFLEAVKNGARQLECTINGIGERAGNASLE

SEQ ID NO: 116020 - protein, 284 aa, Unknown
  Bacterial polypetide isolated from the Sargasso Sea
WVLGERAGNAALEEIVMAIKTRDDLLPYETGIKTELISKASKIVSNATGFPVQFNKAIVGKNAFAHESGIHQDGMLKNRETYEIMTPESVGVKKTSLVMGKHSGRHAFKDKLNDLGYTDVTDDVVQAAFGKFKILADKKKHIYDEDIVALVDDSLIIDNKINAISLKSLKVFAGTGEPQRADMTLDVFGTVKKTSQTGDGPVDAIFKCIKDLYPHDVKLSLYQVHAVTEGTDAQATVSVKIEENDRTTVGQSADTDTLVASANAYLNALNKMLIKREKNHFIKI

SEQ ID NO: 116021 - protein, 292 aa, Unknown
  Bacterial polypetide isolated from the Sargasso Sea
ALAGVVAGARQVECTINGIGERAGNSALEEIVMAMKTRSDLMPFTTGINTKLISKASKVVSNATGFPVQFNKAIVGKNAFAHESGIHQDGMLKNRNTYEIMTPESVGMNKTSLVMGKHSGRHAFKDKLNDLGYINVTDDVIQEAFGKFKVLADKKKHVYDEDIAALVDDSMITEDNVIKLKSLKVFAGTGEPQKADMTLEVFGEIKKASETGDGPVDAIFKCIKKLYPHEVTLQLYNVHAVTEGTDAQATVSVRIEEKGKTTVGQAADTDTLVASANAYLSALNKMIIKRKK

SEQ ID NO: 116022 - protein, 139 aa, Unknown
  Bacterial polypetide isolated from the Sargasso Sea
MTNTRTIRIFDTTLRDGEQSPGASMNRTEKLEIAQALGSLGVDIIEAGFPIASPGDFESVREIASAVTSTTICGLARCNDADIDRAWEALQPAKQPRIHVFLATSSIHREFKLRMTEQEVLDRAVAGVRRARNLCADIE

SEQ ID NO: 116023 - protein, 306 aa, Unknown
  Bacterial polypetide isolated from the Sargasso Sea
MSENFKNRENICLSLHPHNDRGTAIAASEFGLMAGADRVEGTLFGNGERTGNVDIVTLALNMYSQGINPNLDFSQINNVMREVEYCNQLPVHPRHPYAGDLVFTAFSGSHQDAIKKGLNALRSSNEPQWEVPYLPIDPADLGRTYEAVVRINSQSGKGGVAFLLEKDHGVSLPRRLQISMSQKIQKIADETGKEISTSEIWEIFHTNFVMPKSGHSFKNYSLKTSDATDVSDHIKAEIEIDGKNHEISGSGNGPIDAFVNALNQKLSSDIKVSDYHQSAISSGSDAQAAAYIELQKGDKTSWGVGI

SEQ ID NO: 116024 - protein, 91 aa, Unknown
  Bacterial polypetide isolated from the Sargasso Sea
MDKDSVIIFDTTLRDGEQSAGAGLTVDEKLIIAKQLESLGVDVIEAGFAVSSTGDFNAVSLIAETVKNCKVASLARVVEKDIDKAAPALEK

SEQ ID NO: 116025 - protein, 271 aa, Unknown
  Bacterial polypetide isolated from the Sargasso Sea
MSDKNRIIIFDTTMRDGEQSPGATMSLEEKIQIARCFDELGIDVIEAGFPIASPGDFEAVTEISKVLKKSIPAGLSRATKKDIDACKDSLKHAKRFRIHTFISTSPLHMKHKLNKSPEEVLGLIKESVTYASKFTDDVEWSCEDGTRTDLDFMCKSVELAIKCGAKTINIPDTVGYSVPSEFKKIIETLINKVPNIDKAILSTHCHNDLGLAVANSLAGVMAGARQIECTINGIGERAGNAALEEVVMAMRTRNDLMPYTTGINTKLLSKA

SEQ ID NO: 116026 - protein, 304 aa, Unknown
  Bacterial polypetide isolated from the Sargasso Sea
NFKNSIPAGLSRHSVKDIDRAYEALKHAPRFRIHTFISTSPLHMKHKLNMSPEDVYESIGKHVAYARKFTDDVEWSCEDGTRTDMDYMCKTVELAIKNGATTINIPDTVGYTIPSEFTTIIDTLLNKVPNIDKAILSTHCHNDLGLAVANSLAGVQAGARQIECTINGLGERAGNAALEEVVMAIKTRPDLMPYETGINTTLLSKASKIVSNATGFPVQYNKAIVGKNAFAHEAGIHQDGMLKNRQTYEIMTPESVGVKQTSLVMGKHSGRHAFKDKLNSLGYPDLTDDVVGNAFAKFKVLADK

SEQ ID NO: 116027 - protein, 149 aa, Unknown
  Bacterial polypetide isolated from the Sargasso Sea
MKNQVEIFDTTLRDGEQVPGCKLDTKSKLILAEKIDQLGVDIIEAGFPISSPGDFKSVVEISKVIKNASVCALSRANEKDIDVAAESLKKAKKPRIHTGIGTSEVHIKYKFNSNKDSIIEIAKKSVAHARKYVDDVEFYAEDAGRTDNE

SEQ ID NO: 116028 - protein, 275 aa, Unknown
  Bacterial polypetide isolated from the Sargasso Sea
RLSVHCHNDLGLAVANSLAAVKSGARQVECTINGLGERAGNAAMEEIVMALRTRSDGLPYHNNINTEHITKASRLVSTITGFSIQPNKAIVGANAFAHEAGIHQDGVLKNAQTYEIMTPESVGLTESKLVMGKHSGRHAFRQKLEELGYELGDNAVQDAFKRFKDLADLKKDIFDEDIIALVDDAVVRSNDRIQLVSLEVLCGTEHRPPSAKLRLNFDGDEKYSETTGDGPVDAIFTGIKELTSQSPKLQLYQVHAVTQGTDAQAEVTVRLEENG

SEQ ID NO: 116029 - protein, 288 aa, Unknown
  Bacterial polypetide isolated from the Sargasso Sea
PGDFEAVTAISKILKKSTPAGLARHTKKDIDACYEALKAAPRFRIHTFISTSDLHMKHKLNKSPEEVIDSIKEHVTYARKFTDDVEWSCEDGTRTGMDFMCKTVELAINCGAKTINIPDTVGYSVPSEFKKIIETLINKVPNIDKAILSTHCHNDLGLAVANSLAGVAAGARQIECTINGIGERAGNAALEEIVMAMKTRSDLMPFKTGINTKLLSKASKVVSNATGFPVQFNKAIVGKNAFAHESGIHQDGMLKNRNTYEIMTPESVGNKKTSLVMGKHSGRHALKT

SEQ ID NO: 116030 - protein, 279 aa, Unknown
  Bacterial polypetide isolated from the Sargasso Sea
TMRDGEQSPGASMSVEEKIQISRVFDEMGIDIIEAGFPISSPGDFEAVSAISKGLKNSIPCGLSRALKKDIDACHESLKFAPRFRIHTFISTSPVHMKHKLDMTNDQVIDAIKESVTYARKFTDDVEWSCEDGTRTNLDFMCKTIELAIKCGATTINIPDTVGYSIPEEFARTITHIKNNVPNIDKAIISAHCHNDLGLAVANALAGLSAGVRQIECTINGIGERAGNAALEEIVMAIKTRNDLMPFDTGVKTELISKASKIVSNATGFPVQFNKASCR

SEQ ID NO: 116031 - protein, 215 aa, Unknown
  Bacterial polypetide isolated from the Sargasso Sea
LTYEIIDAKTVGLSDYRISLGKLSGRSAVRARLEELGYDLTREDLDEAFARFKDLADRKREITDRDLEAIVSEQVQQPEARYQLQLVQVSCGTRLKPTATVTLSEENGPQQTVSAVGTGPVDAVCRALNQLAGVPNELIEFSVKSVTEGIDAMGEVTIRLRRDGSLYSGHAADTDVVVAAAMAFINALNRLVAAQEHQPLHPQRDVVVLDARPTL

SEQ ID NO: 116032 - protein, 197 aa, Unknown
  Bacterial polypetide isolated from the Sargasso Sea
MDNPIDKYSPFVPIDLENRKWPGKTIKQAPVWCSVDLRDGNQALIEPMGSERKNRMFDLLCKLGFKEIEVGFPSASQTDFDFVRDLIENKKIPSDVSIQVLTQAREELIHKTFESLKGASKGIIHFYNSTSTLQREVVFNKDKGGIKKIATDAAMLIKSLAKENPDTDWSFEYSPESFTGTELDYARDVCDDVVEIL

SEQ ID NO: 116033 - protein, 237 aa, Unknown
  Bacterial polypetide isolated from the Sargasso Sea
MSTKDKVYIFDTTMRDGEQSPGASMSVEEKIQISRVFDEMGIDIIEAGFPISSPGDFEAVSAISKSVKNSIPCGLARATKKDIDACHESLKFAKRFRIHTFISTSPVHMKHKLNMTDEQVLKAIKESVTYARNFTDDVEWSCEDGTRTNLDFMYKTIELAIKCGAKTINIPDTVGYSIPEEFARTITGIKNNVPNIDKAIISAHCHNDLGLAVANALSGLSAGVRQIECTINGIGKE

SEQ ID NO: 116034 - protein, 157 aa, Unknown
  Bacterial polypetide isolated from the Sargasso Sea
MADKDKVFIFDTTMRDGEQSPGASMSVEEKIQISRVFDEMGIDIIEAGFPISSPGDFEAVSAISKSVKNSIPCGLARATKKDIDACHESLKFAKRFRIHTFISTSPVHMKHKLNMTDEQVLGAIKESVTYAKKFTDDVEWSCEDGTRTNLEFMYKTI

SEQ ID NO: 116035 - protein, 293 aa, Unknown
  Bacterial polypetide isolated from the Sargasso Sea
IDKAILSTHCHNDLGLAVANSLAGVQAGARQIECTINGIGERAGNAALEEVVMAMKTRPDLMPYETGINTTLLSKASKIVSNATGFPVQYNKAIVGKNAFAHEAGIHQDGMLKNRQTYEIMTPESVGVKQTSLVMGKHSGRHAFKDKLISLGYVDVTDDVISNAFGKFKVLADKKKHVYDEDIIALVDDSLIIDNKVNAISLKTLKVFAGTGEPQRADMTLDVFGEVKKASETGDGPVDAIFKCIKKLYPHEVNLQLYQVHAVTEGTDAQATVSVRIEENGKTTVGQAADTDT

SEQ ID NO: 116036 - protein, 292 aa, Unknown
  Bacterial polypetide isolated from the Sargasso Sea
MSPEDVYESIGKHVAYARKYTDDVEWSCEDGTRTDLDYMCKTVELAIKSGATTINIPDTVGYTIPSEFTTIIETLLNKVPNIDKAVLSTHCHNDLGLAVANSLAGVQAGARQVECTINGLGERAGNAALEEIVMAIKTRPDLMPYETGINTKLLSKASKIVSNATGFPVQYNKAIVGKNAFAHEAGIHQDGMLKNRQTYEIMTPESVGVKQTSLVMGKHSGRHAFKDKLNSMGYPDLTDDVISNAFAKFKVLADKKKHVYDEDIIALVDESLIIDNKVNAINLKSLKVYAGT

SEQ ID NO: 116037 - protein, 241 aa, Unknown
  Bacterial polypetide isolated from the Sargasso Sea
TINGLGERAGNAALEEIVMSVRTRRDVFTCDTNIDTSQIVNCSRLVSTITGFPVQPNKAIVGANAFAHESGIHQDGVLKSRETYEIMRAEDVGWNTNRMVLGKHSGRNAFRTRLEELGITFTEEEELNAVFSQFKELADKKHEVYDDDLQALVSDTIQGSADERIKLVSLKVGSETGVKPKALVTLSIDGEEKCANAEGGGPVDATYKAIENMVESGCNLQLYSVNNITDGTDSQGEVTVR

SEQ ID NO: 116038 - protein, 289 aa, Unknown
  Bacterial polypetide isolated from the Sargasso Sea
SPGASMSLEEKLQISRVFDELGVDIIEAGFPIASPGDFEAVTEISKTLKRSIPAGLARATKKDIDACHQALKHAKNFRIHTFISTSPLHMKHKLNKSPEEVLESIKESVTYARKFTDDVEWSCEDGTRTDMDYMCKTVELAIKSGAKTINIPDTVGYTVPSEFKKIIETLMNKVPNIDKAILSTHCHNDLGLAVANSLAGVMAGARQIECTINGIGERAGNAALEEVVMAMRTRHDLMPYTTNINTKLLSKASKVVSNATGFPVQFNKAIVGKNAFAHESGIHQDGMLK

SEQ ID NO: 116039 - protein, 250 aa, Unknown
  Bacterial polypetide isolated from the Sargasso Sea
ASKVVSSATFPVQFNKAIVGKNAFAHEAGIHQDGMLKNRETYEIMTPESVGVKKTSLVMGKHSGRHAFKEKLSDLGYVDVTDDVIQTAFGKFKILADKKKHVYDDDIAALVDDSMVLEKNIINLKSLKVFAGTGEPQRAEMTLDVYGEVKKTSETGDGPVDAIFKCIKVLYPHDVKLLLYQVHAVTEGTDAQATVSVRIEENGKTTVGQAADTDTLVASANAYLSALNKMIIKRDKTAPMEQGIEKMRGI

SEQ ID NO: 116040 - protein, 189 aa, Unknown
  Bacterial polypetide isolated from the Sargasso Sea
MSGKDRVIIFDTTMRDGEQSPGASMSLEEKIQIARVFDELGIDIIEAGFPIASPGDFEAVTEVSKILKKSIPAGLSRHSKKDIDRAYEALKHAPRFRIHTFISTSPLHMKHKLNMSPEDVYESIGQHVAYARKFTDDVEWSCEDGTRTDMDFMCETVELAIKNGATTINIPDTVGYTIPSEFTKIFKHY

SEQ ID NO: 116041 - protein, 253 aa, Unknown
  Bacterial polypetide isolated from the Sargasso Sea
NLQKLFKLYLNKVPNIDKAILSTHCHNDLGLAVANSLAGVQAGARQIECTINGIGERAGNAALEEVVMAMKTRPDLMPYETGINTTLLSKASKVVSNATGFPVQYNKAIVGKNAFAHESGIHQDGMLKNRNTYEIMTPESVGVKQTSLVMGKHSGRHAFKDKLTSLGYKDVTDDVIESAFGKFKVLADKKKHVYDEDIIALVDDSLIIDNKVNAINLKSLKVYAGTGEPQKAEMILDVYGDVKNATETGDGPS

SEQ ID NO: 116042 - protein, 193 aa, Unknown
  Bacterial polypetide isolated from the Sargasso Sea
MSNKERVFIFDTTMRDGEQSPGASMSVEEKIQISRVFDEMGIDIIEAGFPISSPGDFEAVSAISKGIKNSIPCGLARAMRKDIDACHESLKYAKRFRIHTFISTSPVHMKHKLNMSNDQVVDAVKDSVTYARKFTDDVEWSCEDGTRTSLDFMCKTIELAIKCGATTINIPDTVGYSIPEEFAKTITHIKNNV

SEQ ID NO: 116043 - protein, 268 aa, Unknown
  Bacterial polypetide isolated from the Sargasso Sea
ARASLKDIDRAWEAVKYARSPRIHTFIATSPLHMKYKLKKTESEVLDAINKTVSHARNLCDNIEWSCEDGGRSELDFLYKCIELAINCGASTINIPDTVGYTLPEEFGKIFKNVIENVPNIDKAILSTHTHNDLGLATANNVAAIKEGARQVECTINGMGERAGNSSLEEIVMTLKVKKDLMPFHTDIKTESIMKASRLVSSITGFPVQPNKAIVGANAFAHEAGIHQDGMLKHSGTYEIMTPESIGLNKSSLVLGKHSGKHAFSEKL

SEQ ID NO: 116044 - protein, 52 aa, Unknown
  Bacterial polypetide isolated from the Sargasso Sea
QDSPTPLTAFRTEEITKTSRLVSNLTGMVVQPNKAIVGANAFAHESGIHQDG

SEQ ID NO: 116045 - protein, 263 aa, Unknown
  Bacterial polypetide isolated from the Sargasso Sea
MDNPIDKYSAYEPINLKNRKWPTKLIKNAPIWCSVDLRDGNQALIEPMGSERKNRMFNLLCKLGFKEIEVGFPSASQTDFDFVRDLIENKKIPNDVNIQVLTQAREELIIKTFESLKDVPKAIVHFYNSTSTLQRRVVFDQNKKGIKRIATDAAELIKNLAEQNQDTDWTFEYSPESFTGTELEYAREVCDEVVEILKPITRNKIIINLPATVEMSTPNIYGDQIEWMNENLKNRNDICLSLHPHNDRGTAVAASEFGLMAGA

SEQ ID NO: 116046 - protein, 269 aa, Unknown
  Bacterial polypetide isolated from the Sargasso Sea
SLGDFEAVTEVSKILKNSIPAGLSRHSKKDIDRCYEALKHAPRFRIHTFISTSPLHMKHKLNKTPEQVYDSIKEHVTYARKFTDDVEWSCEDGTRTDMDYMCKTVELAIQCGAKTINIPDTVGYTVPSEFTKIIQTLMNKVPNIDKAILSTHCHNDLGLAVANSLAGVQAGARQIECTINGIGERAGNAALEEVVMAMKTRSDLMPYSTGINTTLLSKASKIVSNATGFPVQFNKAIVGKNAFAHEAGIHQDGMLKNRQTYEIMTPEKV

SEQ ID NO: 116047 - protein, 290 aa, Unknown
  Bacterial polypetide isolated from the Sargasso Sea
MKHKLNKSPEEVYEAIKENVTYARNFTDDVEWSCEDGTRTDIDYMCKTVELAIKCGAKTINIPDTVGYTIPSEFTTIIETLLNKVPNIDKAILSTHCHNDLGLAVANSLAGVQAGARQIECTINGLGERAGNAALEEVVMAMKTRPDLMPYETGINTTLLSKASKIVSNATGFPVQYNKAIVGKNAFAHEAGIHQDGMLKNRQTYEIMTPESVGVKQTSLVMGKHSGRHAFKDKLNSLGYPDLTDDIVSNAFAKFKVLADKKKHVYDEDIIALVDDSLIIDNKVNAFNLK

SEQ ID NO: 116048 - protein, 282 aa, Unknown
  Bacterial polypetide isolated from the Sargasso Sea
MYNKWGLGERAGNAALEEVVMAIKTRPDLMPYETGINTILLSKASKIVSNATGFPVQYNKAIVGKNAFAHEAGIHQDGMLKNRQTYEIMTPESVGVKQTSLVMGKHSGRHAFKDKLNSLGYPDLTDDVVGNAFAKFKVLADKKKHVYDEDIIALVDDSLIVDNKVNAITLKSLKVFAGTGEPQKAEMTLDVYGDVKNATETGDGPVDAIFKCIKTLYPHDVNLQLYQVHAVTEGTDAQATVSVKIEENGKTTVGQAADTDTLVASANAYINALNKMIIKRDK

SEQ ID NO: 116049 - protein, 296 aa, Unknown
  Bacterial polypetide isolated from the Sargasso Sea
MTEKIYIFDTTLRDGEQSPGASMNLEEKIQIAEVLADLKVDIIEAGFPIASNGDFEAVSEISKNIKGPTIAGLARAKLADIERAWEAVKFSDSPRIHTFIATSPIHMKYKLMKSENEVLEAIKQTVTFARNLCPNIEWSCEDGGRSKLDFLYQCIELAIKCGATTINIPDTVGYTLPTEFGSIFKSVKNNVTNIDKAILSTHTHNDLGLAVANSISAIQEGARQVECTINGLGERAGNAALEEIVMALKVKKDLIPFHTDIKTQSITKASRLVSSITGFSVQPNKAIVGANAFAHE

SEQ ID NO: 116050 - protein, 142 aa, Unknown
  Bacterial polypetide isolated from the Sargasso Sea
MSDKEKVYIFDTTMRDGEQSPGASMSVEEKIQISRVFDEMGIDIIEAGFPISSPGDFEAVSEISKSVKNSIPCGLSRALKKDIDACHESLKFAKRFRIHTFISTSPVHMKHKLDMTNDQVLDAIKESVTYARKFTNDVEWSC

SEQ ID NO: 116051 - protein, 277 aa, Unknown
  Bacterial polypetide isolated from the Sargasso Sea
MSNNKNRVYIFDTTMRDGEQSPGASMSLEEKIQISRIFDELGVDIIEAGFPIASPGDFEAVSEVSKVLKKSIPCGLSRHTKKDIDACHEALKSAKRFRIHTFISTSPLHMKHKLNKSPEEVIEAIKENVTYARKFTDDVEWSCEDGTRTDMDFMFKAVELAIKCGAKTINIPDTVGYSVPSEFKKIIEALINKVPNIDKAILSTHCHNDLGLAVANSLAGVSAGARQIECTINGIGERAGNAALEEIVMAMKTRHDLMPFNTGINTKLLSKASKVVS

SEQ ID NO: 116052 - protein, 270 aa, Unknown
  Bacterial polypetide isolated from the Sargasso Sea
VVFDKDKEGVKKIATDAAKLIKELSSEYKNTNWSFEYSPESFTGTELDYAVEVCDDVVDVLKESSNNKIIINLPATVEMSTANIYGDQIEWMSENFKNRENICLSLHPHNDRGTAIAASEFGLMAGADRVEGTLFGNGERTGNVDIVTLALNMYSQGINPNLDFSQINNVMREVEYCNQLPVHPRHPYAGDLVFTAFSGSHQDAIKKGLNALRSSNDPQWEVPYLPIDPADLGRTYEAVVRINSQSGKGGVAFLLEKDHGVSLPRRLQIS

SEQ ID NO: 116053 - protein, 270 aa, Unknown
  Bacterial polypetide isolated from the Sargasso Sea
VPNIDKAILSTHCHNDLGLAVANSLAGVQAGARQIECTINGIGERAGNAALEEVVMAMKTRPDLMPYETGINTTLLSKASKIVSNATGFPVQYNKAIVGKNAFAHEAGIHQDGMLKNRQTYEIMTPESVGVKQTSLVMGKHSGRHAFKDKLISLGYVDVTDDVIGNAFGKFKVLADKKKHVYDEDIIALVDDSLIIDNKVNAINLKSLKVYAGTGEPQRAEMTLDVFGDVKQATQTGDGPVDAIFKCIKSLYPHNVNLQLYQVHAVTEGT

SEQ ID NO: 116054 - protein, 267 aa, Unknown
  Bacterial polypetide isolated from the Sargasso Sea
MVRDEISRLSKSNIRLQYSPESFTGTELEFALEVCEAVMDIWQPTPENKVILNLPATVEMSTPNIYADQIEWFSKNISRRDSVILSAHCHNDRGTAVAATELAIMAGIDRVEGTLFGNGERTGNVDIVTLALNMFTQGVDPKLELQDINEIVEVFEECNKLPVPPRHPYAGEFVYTAFSGSHQDAINKGFKAYDDSDSKIWGVPYLPIDPKDVGRSYESIIRVNSQSGKGGVAYVMGTEFGFNLPKQMHPEFSKIVQAVCDAEGREI

SEQ ID NO: 116055 - protein, 155 aa, Unknown
  Bacterial polypetide isolated from the Sargasso Sea
MYISSIKNIYMAEKDKVFIFDTTMRDGEQSPGASMSVEEKIQISRVFDEMGIDIIEAGFPISSPGDFEAVSAISKSVKNSIPCGLARATKKDIDACHESLKFAKRFRIHTFISTSPVHMKHKLNMTDEQVLGAIKESVTYAKKFTDDVEWSCEDG

SEQ ID NO: 116056 - protein, 269 aa, Unknown
  Bacterial polypetide isolated from the Sargasso Sea
NIDKAILSTHCHNDLGFAVANSLAGVQAGARQIECTINGLGERAGNAALEEVVMAIKTRPDLMPYETRINTTLLSKASKIVSNATGFPVQYNKAIVGKNAFAHEAGIHQDGMLKNRQTYEIMTPESVGVKQTSLVMGKHSGRHAFKDKLNSLGYPDLTDDVVGNAFAKFKVLADKKKHVYDEDIIALVDDSLIVDNKVNAITLKSLKVFAGTGEPQKAEMTLDVYGDVKQASETGDGPVDAIFKCIKTLYPHDVNLQLYQVHAVTEGTD

SEQ ID NO: 116057 - protein, 295 aa, Unknown
  Bacterial polypetide isolated from the Sargasso Sea
ILSTHTHNDLGLATANNVAAIKEGARQVECTINGMGERAGNSSLEEIVMTLKVKKDLMPFHTDIKTESIMKASRLVSSITGFPVQPNKAIVGANAFAHEAGIHQDGMLKHSGTYEIMTPESIGLNKSSLVLGKHSGKHAFSEKLKELGYEVGDNALMELFGRFKDLADKKKEIFEEDLIALAEDRTSSYDEHIKFVSLEVNAGSVEKAEAKLKIEINEKVENTIINGNGPVDATFNAIKKLTNTQFKLKLYQVNAITAGTDAQGEVTVRLEDDNLSSQAKGSDPDIIVASAKAYI

SEQ ID NO: 116058 - protein, 135 aa, Unknown
  Bacterial polypetide isolated from the Sargasso Sea
MGSLKDNIIIFDTTMRDGEQSPGASMNLEEKLKIAELLSQLGVDVIEAGFPISSNGDFEAVNEISKLVKDSVICGLSRASIKDIECAAEALAPAKMKRIHTFIATSDLHMKYKLQMTADEVHQSVIESVSYARNL

SEQ ID NO: 116059 - protein, 318 aa, Unknown
  Bacterial polypetide isolated from the Sargasso Sea
AIASEIDVPTICSLARCNESDIEKAYEALKVNKNRRVHVFVATSEIHLKHKLNMAKDEVLKAAYEGVKMAKSFCENVEFSPEDASRTDHGFLTEVVNAAIEAGATTINVPDTVGYTIPYEFGELFKHLISNCNDAENVIFSVHCHDDLGLSVANSLAAVESGARQIECTINGIGERAGNTSLEEVCMAIRTREEYFDFKTSIDSTKLYPTSRLVSSITGMHVPRNKAIVGDNAFAHEAGIHQHGMLRDSSTYEIMKPQDVGIARSNLVLGKHSGRHAFLDRIDELGFALEKDEIDPAFQEFKKLADKKKEIFDTDIEA

SEQ ID NO: 116060 - protein, 290 aa, Unknown
  Bacterial polypetide isolated from the Sargasso Sea
QSVKNSIPCGLARATKKDIDACHESLKFAKRFRIHTFISTSPVHMKHKLNMTDEQVLAAIKESVTYARKFTDDVEWSCEDGTRTNLDFMYKTIELAINCGAKTINIPDTVGYSIPEEFARTITSIKNNVPNIDKAIISAHCHNDLGLAVANALSGLSAGVRQIECTINGIGERAGNAALEEIVMAIKTRDDLLPYETGIKTELISKASKIVSNATGFPVQFNKAIVGKNAFAHESGIHQDGMLKNRETYEIMTPESVGVKKTSLVMGKHSGRHAFKDKLSDLGYADVTDD

SEQ ID NO: 116061 - protein, 296 aa, Unknown
  Bacterial polypetide isolated from the Sargasso Sea
QKTKIRIFDTTLRDGEQSPGASMNLSEKIRIAELLEEMGVDIIEAGFPIASEGDFESVSEIAKIVKGSIVCGLARSSMGDIERCAEAIKPAAKGRIHTFISTSPLHMKYKLQMQPEDVYQAVIDSVTYARKFTDDVEWSCEDGSRTEHDFMCRTIEAAINAGATTINIPDTVGYAMPTEYAALIEMVKNRVPNIDKAIISVHCHNDLGLAVANSLAAVHSGARQVECTINGLGERAGNAAMEEIIMGLRTRPDHLPFNVSVKSELITKASKLVSTITGFAVQPNKAIVGANAFAHE

SEQ ID NO: 116062 - protein, 119 aa, Unknown
  Bacterial polypetide isolated from the Sargasso Sea
MKITADKDRVVIFDTTLRDGEQSPGATMTHEEKLEIAELLDEMGVDIIEAGFPIASEGDFKAVSEIAKRSKTAVICGLARANFGDIDRCWDAVKNSENPRIHTFIGTSPLHRAIPNLDK

SEQ ID NO: 116063 - protein, 135 aa, Unknown
  Bacterial polypetide isolated from the Sargasso Sea
MADKLIIFDTTLRDGEQSPGASMTKDEKLRIARQLERLKVDVIEAGFAASSNGDFEAVQAIANAIKDSTICSLSRANDRDISRAAEALRGANSARIHTFIATSPLHMEKKLRMTPEQVLEQAKQWVRFARNLVSD

SEQ ID NO: 116064 - protein, 95 aa, Unknown
  Bacterial polypetide isolated from the Sargasso Sea
MSNRVIIFDTTLRDGEQALAASLSVKEKLQIAMALERLGVDVMEVGFPVSSPGDFESVQTIARTIKNSRVCALSRAWKKISMPPPKHYRLPNSSV

SEQ ID NO: 116065 - protein, 253 aa, Unknown
  Bacterial polypetide isolated from the Sargasso Sea
MKNKYEKYNAYPTVKNLERTWPNKTITSAPIWCSVDLRDGNQALIEPMDSVRKMRMFKHLVKIGFKEIEIGFPSASETDFNFVRELITDDHIPEDVTVQVLTQSRKPLIEKTVESLKDCKNAIIHLYNSTSTLQREVVFKESMDGVKNIATDGAKIILDQLCKLENSNIRLQYSPESFTGTELPYALDVCESVLDIWQASEKNPVIINLPATVEMSTPNIHADQIEWMGNNFSNRKRVILSLHPHHDRSTAFA

SEQ ID NO: 116066 - protein, 216 aa, Unknown
  Bacterial polypetide isolated from the Sargasso Sea
FTKIIETLLNKVPNIDKAILSTHCHNDLGLAVANSLAGVQAGARQIECTINGLGERAGNAALEEVVMAMKTRPDLMPYETGIETTLLSKASKIVSNATGFPVQYNKAIVGKNAFAHEAGIHQDGMLKNRQTYEIMTPESVGVKQTSLVMGKHSGRHAFKDKLTSLGYPDLTDDVVDNAFAKFKILADKKKHVYDEDIIALIDDSLITDNKVSAINL

SEQ ID NO: 116067 - protein, 221 aa, Unknown
  Bacterial polypetide isolated from the Sargasso Sea
ETVRTLLSKIPNADKAIFSVHCHNDLGVAVANSLAAVRAGCRQIECTINGLGERAGNTSLEEVVMAVKTRSDIVDVETHIDTQHIVPTSRLVSSITGFPVQPNKAIVGANAFAHESGIHQDGVLKHRETYEIMRAEDVGWNANKMVLGKHSGRAAFKSRLDELGIILADDQALNEAFARFKDLADRKHEIFDEDLQALMNGQKMEADSARYDLADLSVTSK

SEQ ID NO: 116068 - protein, 298 aa, Unknown
  Bacterial polypetide isolated from the Sargasso Sea
KNRIIIFDTTMRDGEQSPGASMSLEEKIQISRVFDELGIDVIEAGFPIASPGDFEAVTAISKILKKSVPAGLARHTKKDIDACYESLRSAKRFRIHTFISTSSLHMKHKLNKTPEQVIDSIKEHVTYARKFTDDVEWSCEDGTRTDMDFMCKTVELAIKSGAKTINIPDTVGYTVPSEFKKIIETLKNKVPNIDKAILSVHCHNDLGLAVANSLAGVTAGARQVECTINGIGERAGNAALEEIVMAMKTRSDLMPYKTGINTQLISKASKTVSNATGFPVQFNKAIVGKNAFAHESGI

SEQ ID NO: 116069 - protein, 315 aa, Unknown
  Bacterial polypetide isolated from the Sargasso Sea
VSNSLSAIIGGARQVECTINGIGERAGNAALEEIVMCLKTRKDSLPYYSDVDTKKITNISHLVSTITGFSVQPNKAIVGKNAFAHESGIHQDGMLKHSNTYEIMTPESVGLSSSELVLGKHSGRHAFKVKLNELGYEFSENKINLLFKKFKELADKKKQVFEEDLLALADEQQSISKLKHIDLLDISIKCGSNQRSLAHVKLKYLNKTLEIELEGTGPIDAVFKAIKSLITTKAHLAVYQVNAITKGTDAQAEVSVRLEEDGVSVLGTGNDIDTIVASGKAYINGLNKLINKKSKAKDSKKILSSSNSTIDKHVI

SEQ ID NO: 116070 - protein, 290 aa, Unknown
  Bacterial polypetide isolated from the Sargasso Sea
STSSLHMKHKLNKTPEQVIDSIKEHVTYARKFTDDVEWSCEDGTRTDMDFMCKTVELAIKSGAKTINIPDTVGYTVPSEYKKIIETLKNKVPNIDKAILSVHCHNDLGLAVANSLAGVTAGARQVECTINGIGERAGNAALEEIVMAMKTRSDLMPYKTGINTQLISKASKTVSNATGFPVQFNKAIVGKNAFAHESGIHQDGMLKNRNTYEIMTPESVGVKKTSLVMGKHSGRHAFKDKLSDLGYAGVTDDVIQTAFGKFKILADKKKHVYDEDKIALVDDSLIKESNV

SEQ ID NO: 116071 - protein, 198 aa, Unknown
  Bacterial polypetide isolated from the Sargasso Sea
MSNKDRVFIFDTTMRDGEQSPGASMSLEEKIQIARVFDELGIDIIEAGFPIASPGDFEAVSEVSKILKNSIPAGLSRHSVKDIDRAYEALKHAPRFRIHTFISTSPLHMKHKLNMSPEDVYESIGKHVAYARKFTDDVEWSCEDGTRTDMDYMCKTVELAIKNGATTINIPDTVGYTIPSEFTTIIETLLNKVPNIDK

SEQ ID NO: 116072 - protein, 304 aa, Unknown
  Bacterial polypetide isolated from the Sargasso Sea
REGVRQIECTINGIGERAGNAALEEVVMAIKTRNDLMPYNTGIKTELISKASKIVSNATGFPVQFNKAIVGKNAFAHESGIHQDGMLKNRETYEIMTPESVGVKKTSLVMGKHSGRHAFKDKLSDLGYSDLTDDIIQAAFGKFKVLADKKKHIYDEDIVALVDDSLIVDNKINAINLKSLKVFAGTGEPQKAEMTLDVYGDIKNTTETGDGPVDAIFKCIKKLFPHDVKLSLYQVHAVTEGTDAQATVSVKIEENDRTTVGQSADTDTLVASANAYLNALNKMLIKREKKAPSQNIKHQKVKGI

SEQ ID NO: 116073 - protein, 116 aa, Unknown
  Bacterial polypetide isolated from the Sargasso Sea
MSKKEKVFIFDTTMRDGEQSPGASMSVEEKIQISRVFDEMGIDIIEAGFPISSPGDFEAVSAISKGIKNSIPCGLARAMRKDIDACHESLKYAKRFRIHTFISTSPVHMKHKLNMS

SEQ ID NO: 116074 - protein, 269 aa, Unknown
  Bacterial polypetide isolated from the Sargasso Sea
DVEWSCEDGTRTDMDYMCRTVELAIKCGAKTINIPDTVGYTVPSEFTKIIQTLLNKVPNIDKAILSTHCHNDLGLAVANSLAGVQAGARQIECTINGIGERAGNAALEEVVMAMKTRSDLMPYTTGINTTLLSKASKIVSNATGFPVQFNKAIVGKNAFAHEAGIHQDGMLKNRNTYEIMTPESVGVKQTSLVMGKHSGRHAFKDKLLSLGYADLTDDVIENAFGKFKILADKKKHVYDEDIVALVDDSLIKEDNVITLKSLKVFAGYR

SEQ ID NO: 116075 - protein, 263 aa, Unknown
  Bacterial polypetide isolated from the Sargasso Sea
YINTSAISKTSKLVSSITGFPIQPNKAIVGANAFAHESGIHQDGVLKNVQTYEIMSPETIGLKKSSLVLGKHSGKHAFKEKLKILGYEVGDNYINEIFERFKLLADKKKDVYDEDLIALVDDTHFNKSNILKLKNLSIMSGTNSKHVASLELNFKKEPKEISGSGNGPVDAVFSCISKVVGFSPKLVLYHINAITPDSDAQGEVTVKLEYFNKEFIGKASDIDIIVASAKSYINACNKILNFEKNSKTQEGVSEISISNIKGI

SEQ ID NO: 116076 - protein, 246 aa, Unknown
  Bacterial polypetide isolated from the Sargasso Sea
MTDKNRIIIFDTTMRDGEQSPGASMSLEEKLQISRVFDELGVDIIEAGFPIASPGDFEAVTEISKTLKCSVPAGLARATKKDIDACHQALKHAKNFRIHTFISTSPLHMKHKLNKSPEEVLESIKESVTYARKFTDDVEWSCEDGTRTDMDYMCKTVELAIKSGAKTINIPDTVGYTVPSEFKKIIETLINKVPNIDKAILSTHCHNDLGLAVANSLAGVMAGARQIECTINGIGERAGNAAWKKL

SEQ ID NO: 116077 - protein, 116 aa, Unknown
  Bacterial polypetide isolated from the Sargasso Sea
MKDKIKIFDTTLRDGEQVPGCKLETKEKLKIAEKLDNLGVDIIEAGFPVSSPGDFKSVLEISKVVKNASVCGLTRAVKNDIDVAVDALKYAKKPRLHTGIGTSKSHILHKFNSTPE

SEQ ID NO: 116078 - protein, 301 aa, Unknown
  Bacterial polypetide isolated from the Sargasso Sea
KAAQALEKASNPRIHTFVSSSAIHMEHQMRKDPEEIIEMAVKAVSKAKYYVDDVEFSPMDATRTDIDFLVTLLEATIDAGATTINIPDTVGYAVSKEFGESIKILRDRIRNIDNVIVSVHCHNDLGLAVSNSLAAVENGARQIEGCINGLGERAGNAALEEVIMGLEVRKDHFNVETKVNTSEIGPTSRLVSNLFGFPMQANKAIVGQNAFRHSSGIHQDAFLKDRSTFEIMEPETVGWRGEALVLGKLSGRAGLKSRLNDLGYDFDNDQLNTLFIKFKDLADSKKEVTDVDLEALILNNQ

SEQ ID NO: 116079 - protein, 302 aa, Unknown
  Bacterial polypetide isolated from the Sargasso Sea
MARLGVDVIEAGFPFASPGDFAAVQRIAQQVGGDNGPIICGLARASRADIKACADAVAPAPRRRIHTFIATSDIHLEHKLRKSRADVLGIVPEMVSYARSLVEDVEFSCEDAGRSDPEFLYEVIEAAIAAGATTINIPDTVGYTTPSEFGALIAGINQHVPNIADAVISVHGHNDLGLAVANFLEAVKNGARQLECTINGIGERAGNASLEELVMALHVRRRYYNPFFGRDEESPTPLTAVRTEELTKTSRLVSNLTGMVVQPNKAIVGANAFAHESGIHQDGVLKNRLTYEIIDAKTVGVV

SEQ ID NO: 116080 - protein, 291 aa, Unknown
  Bacterial polypetide isolated from the Sargasso Sea
TINGLGERAGNTSLEEVVMTLKVKKDLIPYHTNVKSEYITKASRLVSSITGFSVQPNKAIVGANAFAHEAGIHQDGMLKNSETYEIMTPESVGLTKSSLVLGKHSGKHAFSEKLKELGYDFGDNALMELFGRFKDLADKKKEIFDEDLIALAGERSSSYDEHIKFVSLKVNAGSLEKHEAILSLEIDNEKKQKKSMGNGPVDATFNAIKDLTNTKFRLKLYQVHAITEGTDAQGEVTVRLEDDTLSSQAKGSDPDIIVASAKAYINSLNRLIFKKSKSIANEVSELKIKGV

SEQ ID NO: 116081 - protein, 289 aa, Unknown
  Bacterial polypetide isolated from the Sargasso Sea
SSPGDFEAVSAISKSVKNSIPCGLARATKKDIDACYESLKFAKRFRIHTFISTSPVHMKHKLNMTNDQVLGAIKESVTYAKKFTDDVEWSCEDGTRTDLDFMYKTIELAINCGATTINIPDTVGYSIPEEFAKKIESIKNNVPNIDKAIISAHCHNDLGLAVANALSGLSAGVRQIECTINGIGERAGNAALEEIVMAIKTRDDLLPYETGIKTELISKASKIVSNATGFPVQYNKAIVGKNAFAHESGIHQDGMLKNRETYEIMTPESVGVKKTSLVMGKHSGRHAFK

SEQ ID NO: 116082 - protein, 317 aa, Unknown
  Bacterial polypetide isolated from the Sargasso Sea
QCGAKTINIPDTVGYTVPSEFTKIIETLKNKVPNIDKAILSTHCHNDLGLAVANSLAGVQAGARQIECTINGIGERAGNAALEEVVMAMKTRPDLMPYETGINTTLLSKASKIVSNATGFPVQYNKAIVGKNAFAHESGIHQDGMLKNRQTYEIMTPESVGVKQTSLVMGKHSGRHAFKDKLISLGYVDVTDDVIENAFGKFKILADKKKHVYDEDIIALVDDSLIIDNKVNAINLKSLKVFAGTGEPQRAEMTLDVFGEVKKASETGDGPVDAIFKCIKKLYPHDVKLQLYQVHAVTEGTDAQATVSVRIEENGKT

SEQ ID NO: 116083 - protein, 280 aa, Unknown
  Bacterial polypetide isolated from the Sargasso Sea
LEEKIQIARVFDELGIDIIEAGFPIASPGDFEAVSEVSKILKNSIPAGLSRHSVKDIDRAYEALKHAPRFRIHTFISTSPLHMKHKLNMSPEDVYESIRKHVAYARKFTDDVEWSCEDGTRTDMDYMCKTVELAIKNGAKTINIPDTVGYTIPSEFTKIIETLLNKVPNIDKAILSTHCHNDLGLAVANSLAGVQAGARQIECTINGLGERAGNAALEEVVMAIKTRPDLMPYETGINTTLLSKASKIVSNATGFPVQYNKAIVGKMPLLMKQEFIRMEG

SEQ ID NO: 116084 - protein, 277 aa, Unknown
  Bacterial polypetide isolated from the Sargasso Sea
SPGDFEAVSAISKILKKSVPAGLSRHTKKDIDACYDALKSAKRFRIHTFISTSSLHMKHKLNKTPEQVIESIKEHVTYARKFTDDVEWSCEDGTRTDMDFMCKTVELAIKCGAKTINIPDTVGYTVPSEFKKIIETLKNKVPNIDKAVLSVHCHNDLGLAVANSLAGVSAGARQVECTINGIGERAGNAALEEIVMAMKTRADLMPFKTGINTKLISKASKTVSNATGFPVQFNKAIVGKNAFAHESGIHQDGMLKNRNTYEIMTPESVGVKKTSLV

SEQ ID NO: 116085 - protein, 291 aa, Unknown
  Bacterial polypetide isolated from the Sargasso Sea
SPLHMKHKLNKSSEEVYESIKEHVTYARKFTDDVEWSCEDGTRTDMDYMCKTVELAIKCGAKTINIPDTVGYTVPSEFTKIINTLMNKVPNIDKAILSTHCHNDLGLAVANSLAGVQAGARQIECTINGIGERAGNAALEEVVMAMKTRNDLMPYKTGINTTLLSKASKVVSNATGFPVQFNKAIVGKNAFAHESGIHQDGMLKNRNTYEIMTPESVGVKQTSLVMGKHSGRHAFKDKLNSLGYVDVTDDVIENAFGKFKVLADKKKHIYDEDIIALVDDSLIIDNKVNAI

SEQ ID NO: 116086 - protein, 316 aa, Unknown
  Bacterial polypetide isolated from the Sargasso Sea
VGNTIPSEFTTIIETLLNKVPNIDKAILSTHCHNDLGLAVANSLAGVQAGARQVECTINGLGERAGNAALEEIVMAIKTRPDLMPYETGINTKLLSKASKIVSNATGFPVQYNKAIVGKNAFAHEAGIHQDGMLKNRQTYEIMTPESVGVKQTSLVMGKHSGRHAFKDKLNSLGYPDLTDDIISNAFAKFKVLADKKKHVYDEDIIALIDDSLIIDNKVNAINLKSLKVYAGTGEPQKAEMTLDVYGDVKQATETGDGPVDAIFKCIKILYPHDVNLQLYQVHAVTEGTDAQATVSVKIEENGKTTVGQAADTDTL

SEQ ID NO: 116087 - protein, 236 aa, Unknown
  Bacterial polypetide isolated from the Sargasso Sea
MEDKNRIIIFDTTMRDGEQSPGASMSLEEKIQISRVFDELGIDIVEAGFPIASPGDFESVTAISKILKKSIPAGLARHTKKDIDACYEALRSAKKFRIHTFISTSSLHMKHKLNKTPEQVIESIKEHVTYARKFTDDVEWSCEDGTRTDMDFMCKTVELAIKCGAKTINIPDTVGYTVPSEFKKIIETLKNKVPNIDKAILSVHCHNDLGLAVANSLAGVYAGARQVECTINGIGE

SEQ ID NO: 116088 - protein, 321 aa, Unknown
  Bacterial polypetide isolated from the Sargasso Sea
VASLARVVEKDIDKAAQALEKAMDPRIHTFVSSSAIHMEHQMRKDPEEIIEMAVKAVSRAKKYVDDVEFSPMDATRTDMDFLITLLEETISAGATTINIPDTVGYSVSKEFGESIKLIINKVKNIDGVIVSVHCHNDLGLAVSNSLSAVENGARQIEGCINGLGERAGNAALEEVIMGLEVRKDHFNLKTRVNTSEIGPTSRMVSNIFGFPMQANKAIVGQNAFRHSSGIHQDAFLKDKSTFEIMEPETVGWRGEALVLGKLSGRAGLKSRLKDLGYDFDEDQLNSLFIKFKDLADSKKEVTDMDLESIILEHSRSDKNKQ

SEQ ID NO: 116089 - protein, 204 aa, Unknown
  Bacterial polypetide isolated from the Sargasso Sea
MSKKDRVIIFDTTMRDGEQSPGASMSLEEKIQIARVFDELGIDIIEAGFPIASPGDFEAVSEVSKILKNSIPAGLSRHSIKDIDRAYEALKHAPRFRIHTFISTSPLHMKHKLNMSPEDVYESIGKHVTYARKFTDDVEWSCEDGTRTDMDYMCRTVELAIKNGATTINIPDTVGYTIPSEFTTIIETLLNKVPNIDKAILSTH

SEQ ID NO: 116090 - protein, 69 aa, Unknown
  Bacterial polypetide isolated from the Sargasso Sea
MSDDKLVIFDTTLRDGEQSPGIALTPSEKLLIAQQLEKLKVDVIEAGFAASSPGDWEGVNLIAKNIKNS

SEQ ID NO: 116091 - protein, 196 aa, Unknown
  Bacterial polypetide isolated from the Sargasso Sea
MTDKNRVFIFDTTMRDGEQSPGASMSLEEKIQIARVFDELGVDIIEAGFPIASPGDFEAVTEVSKILKNSIPAGLARHSKKDIDRCHEALKHAPRFRIHTFISTSPLHMKHKLNKTPEQVYESIKEHVSYARKFTDDVEWSCEDGTRTDMDYMCKTVELAIKCGAKTINIPDTVGYTVPSEFTKIIQNLLNKVPNI

SEQ ID NO: 116092 - protein, 278 aa, Unknown
  Bacterial polypetide isolated from the Sargasso Sea
AALEEVVMAMRTRNDLMPYTTNINTKLLSKASKVVSNATGFPVQFNKAVVGKNAFAHESGIHQDGMLKNRNTYEIMTPESVGVHKTSLVMGKHSGRHAFKDKLNDLGYVGVTDDVIQTAFGKFKVLADKKKHIYDEDIAAIVDDSLVTEDNVIKLKSLKVFAGTGEPQKAEMTLEVFGEVKNASETGDGPVDAIFKCIKKLYPHEVKLLLYNVHAVTEGTDAQATVSVRIEEKGKTTVGQAADTDTLVASANAYLSALNKLIIKREKTAPDPSLSAQI

SEQ ID NO: 116093 - protein, 254 aa, Unknown
  Bacterial polypetide isolated from the Sargasso Sea
MSDRVYIFDTTLRDGEQSPGATMNLDEKMQIAQLLEEMQVDIIEAGFPIASNGDFDAVTEISKNIKNSTITGLARAKLSDIDRAWEAVKHANSPRIHTFIATSPIHMKYKLKKTEQEVLDAIKHTVTHARNLCDNIEWSCEDGGRSNLEFLYKCIELAITSGASTINIPDTVGFTLPSEFGLIFKAVKNNVPNIDKAILSTHTHNDLGLAVANSVAAIQEGARAVECTINGLGERAGNAALEEVVMTLKGKKDL

SEQ ID NO: 116094 - protein, 237 aa, Unknown
  Bacterial polypetide isolated from the Sargasso Sea
EAGFPIASPGDFEAVSEVSKILKNSIPAGLSRHSVKDIDRAHEALKHAPRFRIHTFISTSPLHMKHKLNMSPEDVYESIGKHVAYARKFTDDVEWSCEDGTRTDMDYMCKTVELAIKNGATTINIPDTVGYTIPSEFTSIIETLLNKVPNIDKAILSTHCHNDLGLAVANSLAGVQAGARQIECTINGLGERAGNAALEEVVMAIKTRPDLMPYETGINTTLLSKASKIVSNATGFP

SEQ ID NO: 116095 - protein, 282 aa, Unknown
  Bacterial polypetide isolated from the Sargasso Sea
CDNIEWSCEDGGRSELEFLYQCIELAINSGASTINIPDTVGYTLPEEFGKIFKNVKNNVPNIDKAILSTHTHNDLGLATANNVAAIKEGARQVECTINGMGERAGNSSLEEIVMTLKVKKDLMPFHTDIKTESIMKASRLVSSITGFPVQPNKAIVGANAFAHEAGIHQDGMLKHAGTYEIMTPESIGLNKSSLVLGKHSGKHAFSEKLKELGYEVGDNALMELFGRFKDLADKKKEIFEEDLIALAEDRTSSYDEHIKFVSLEVNAGSVEKAEAKLKIEIN

SEQ ID NO: 116096 - protein, 310 aa, Unknown
  Bacterial polypetide isolated from the Sargasso Sea
SSNIDKAILSTHCHNDLGLAVANSLAGVQAGARQIECTINGLGERAGNAALEEVVMAIKTRPDLMPYETGINTKLLSKASKIVSNATGFPVQYNKAIVGKNAFAHEAGIHQDGMLKNRQTYEIMTPESVGVKQTSLVMGKHSGRHAFKDKMNSLGYPNLTDDVVSNAFAKFKVLADKKKHVYDEDIIALVDDSLIVNNKVNAISLKSLKVFAGTGEPQKAEMTLDVYGDIKQASETGDGPVDAIFKCIKTLYPHDVNLQLYQVHAVTEGTDAQATVSVKIEEKGKTTVGQAADTDTLVASANAYINALNK

SEQ ID NO: 116097 - protein, 233 aa, Unknown
  Bacterial polypetide isolated from the Sargasso Sea
MRDGNQSLIEPMDTPKKLKLFKTLVSMGFKEIEIGFPAASETDYNFCRYLIENKLIPNDVTIQVLTQAREHLIDNTFEALIGCNSAIVHLYNSVSTLQRRVVFKQDRIGVKNIALDGAKYILNKLDKFDQGVIKLQYSPESFTGTELDYALEVCEEVLDCWKANQKNPVIINLPATVEMSTPNIYADQIEWMSNNFSNRDRVILSLHPHNDRGTGVAATELALMAGADRVEGT

SEQ ID NO: 116098 - protein, 132 aa, Unknown
  Bacterial polypetide isolated from the Sargasso Sea
MNKNNLIIFDTTLRDGEQSPGASMDMHEKLQIAHTLEELNVDVIEAGFPIASAGDFESVSEIANSIKQSSVCALARALDKDIDRAAEALKNSSKPRIHTFIATSPIHMEKKLRMSPNEVITSATKAINLAKE

SEQ ID NO: 116099 - protein, 263 aa, Unknown
  Bacterial polypetide isolated from the Sargasso Sea
MDNPTDKYSPFKPIDLKDRKWPNQLINKTPIWCSVDLRDGNQALIEPMGSDRKNRMFDLLCNLGFKEIEVGFPSASKTDFDFVRNLIENKKIPSDVNIQVLTQAREELIIKTFESLDGASKGIIHFYNSTSTLQRKVVFGQDKKGIKKIATDAATLIRDLAIKKSQTEWTFEYSPESFTGTELDFASEVCDEVVDILESATKNKIIINLPATVEMSTPNIYGDQIEWMHNNLKNRENICLSLHPHNDRGTAVAATRIWTDGWS

SEQ ID NO: 116100 - protein, 283 aa, Unknown
  Bacterial polypetide isolated from the Sargasso Sea
MKNQVKIFDTTLRDGEQVPGCKLDTKSKLILAEKIDMLGVDIIEAGFPISSPGDFKSVVEISKIIENASVCALSRANEKDIDVAAESLKYAKKPRIHTGIGTSEIHIKHKFNSNKDSIIDLAKKAVSHAKKYVEDIEFYAEDAGRTENDFLAKVCEEVIKSGATVLNIPDTTGYCLPSEYGEKIKYLVENVKGVDKVTISCHCHNDLGLATANSIYGVLNGARQVECTINGIGERAGNTSLEEVVMILRQHSDLNLDTNINSKLLNVTSQKVSELMGMPVQPQ

SEQ ID NO: 116101 - protein, 241 aa, Unknown
  Bacterial polypetide isolated from the Sargasso Sea
KVPNIDKAILSTHCHNDLGLAVANSLAGVQAGARQIECTINGLGERAGNAALEEVVMAMKTRPDLMPYETGIETTLLSKASKIVSNATGFPVQYNKAIVGKNAFAHEAGIHQDGMLKNRQTYEIMTPESVGVKQTSLVMGKHSGRHAFKDKLTSLGYPDLTDDVVDNAFAKFKILADKKKHVYDEDIIALIDDSLITDNKVSAINLKSLKVFAGTGEPQRAEMTLDVFGEVKKASETGDGP

SEQ ID NO: 116102 - protein, 223 aa, Unknown
  Bacterial polypetide isolated from the Sargasso Sea
MEKIKFLDTTLRDGEQSPGCSMSASEKLTLAKQLERLGVNTIEAGFAASSPGDFNSVRDIGQQIQNSTVVSLCRASKNDIDSAVDALRDAKNWGIHTFISTSDLHMKHKLQMDSKEVKSLAVAAVERAKKSTENVEFSPEDATRSNPEFLVEILSEVVRAGATILNIPDTVGYTTPDEMFELITRLLNEVYNAEKVVFSVHCHNDLGLGVANSLAAVRAGARQ

SEQ ID NO: 116103 - protein, 160 aa, Unknown
  Bacterial polypetide isolated from the Sargasso Sea
MNHSTHPEKITIFDTTLRDGEQSPGASMNLDEKLRIAELLEEMGVDVIEAGFPVASNGDFEAVNEVSKLIKSSIVCGLARSGRGDIQRAAEALKPSARNRIHTFISTSPLHMKYKLQMEPDDVYEAVIESVTYARNFTDDVEWSPEDGSRSEPDFLCPMR

SEQ ID NO: 116104 - protein, 174 aa, Unknown
  Bacterial polypetide isolated from the Sargasso Sea
IPDTVGYTVPSEFKKIIETLINKVPNIDKAILSTHCHNDLGLAVANSLAGVMAGARQIECTFNGIGERAGNAALEEVVMAMRTRHDLMPYTTNINPKLLSKASKVVSNATGFPVQFNKAVVGKNAFAHESGIHQDGMLKNRNTYEIMTPESVGVHKTSLVMGKPSGRPAFKDKL

SEQ ID NO: 116105 - protein, 179 aa, Unknown
  Bacterial polypetide isolated from the Sargasso Sea
EVGFPVSSPGDFQSVQTIARHIKLSRVCALARALPKDIDAAGEALRVAEAFRIHTFISTSSIHVESKLKKSFEDVLEMGVNAIKHARRYTDDVEFSCEDAGRTPIDNLCRMVEAAIKAGARTINIPDTVGYTVPTEFSGIIQTLFNRVPNIDQAIISVHCHDDLGLSVANSIGAARMVS

SEQ ID NO: 116106 - protein, 312 aa, Unknown
  Bacterial polypetide isolated from the Sargasso Sea
KHKLNKSPEEVYESIKEHVAYARNLTDDVEWSCEDGTRTDMDYMCKTVELAISCGAKTINIPDTVGYTVPSEFTKIIETLINKVPNIDKAILSTHCHNDLGLAVANSLAGVQAGARQIECTINGIGERAGNAALEEVVMAMKTRSDLMPYSTGINTTLLSKASKIVSNATGFPVQFNKAIVGKNAFAHESGIHQDGMLKNRNTYEIMTPESVGVKQTSLVMGKHSGRHAFKDKLTSLGYADLTDDIIENAFGKFKVLADKKKHIYDEDIFALVDDSLIKEDNVINLKSLKVFAGTGEPQRAEMTLEIHGEIK

SEQ ID NO: 116107 - protein, 128 aa, Unknown
  Bacterial polypetide isolated from the Sargasso Sea
MTKEKVYIFDTTMRDGEQSPGASMSVEEKIQISRVFDEMGIDIIEAGFPISSPGDFEAVSAISKIVKNSIPCGLSRALKKDIDACHESLQYASRFRIHTFISTSPVHMKHKLDMTKDQVLDAIKESVT

SEQ ID NO: 116108 - protein, 310 aa, Unknown
  Bacterial polypetide isolated from the Sargasso Sea
VWEASEQNPVIINLPATVEMSTPNTHADQIEWMGDNFSNRKRVILSLHPHNDRGTAVAATELGLMAGADRVEGTLFGNGERTGNVDLVTLGLNLFTQGIDPKIDFSKINDLIDTAEFCNRLPVHQRHPYAGSLVHTAFSGSHQDAIRKGMENMEKSPTKKWAVPYLPIDPADIGRTYEAIIRVNSQSGKGGTAWLLETDYQIRLPKGAEVELSKKVQKIADETGNEITSDIIWKTFNENFILQKPFELIEFKVEGANRENNLEIINAKVKFKDELHQFSSQGNGPISAFVNGMRENFDLHFTLEDFSQNT

SEQ ID NO: 116109 - protein, 221 aa, Unknown
  Bacterial polypetide isolated from the Sargasso Sea
MAKDPGRVLIFDTTLRDGEQSPGASLNLEEKLAIAQQLARLGVDVIEAGFPFASPGDFAAVQKIAENVGGEEGPIICGLSRASKPDIKACADAIAPAPKKRIHTFIATSDIHLEHKLRKSRKEVLDIVPDMVGYAKSFVDDVEFSCEDAARSDLDFLYEVIELAISSGANTINIPDTVGYITPSEFGDLILNINKNVPNINEAVLSVHGHNDLGLAVANFP

SEQ ID NO: 116110 - protein, 265 aa, Unknown
  Bacterial polypetide isolated from the Sargasso Sea
MIFDTTLRDGEQSPGASLNLEEKLAIAHQLARLGVDVIEAGFPFASPGDFKAVNKIANVVGKENGPIICGLARASKGDIKACYEAVSPAPKKRIHTFIATSDIHLKHKLKKSRKDVLQIVPEMVNYAKSLVDDIEFSCEDASRSDPEFLYEVIQLAITAGATTINIPDTVGFTTPSEFGNLIADINKNVPNIDEAVISVHGHNDLGLAVANFLEAVKNGARQLECTINGIGERAGNASLEELVMALHVRKSFFNSFFKKNPDSPT

SEQ ID NO: 116111 - protein, 252 aa, Unknown
  Bacterial polypetide isolated from the Sargasso Sea
MTEKIYIFDTTLRDGEQSPGASMNLEEKIQIAEVLADLKVDIIEAGFPIASNGDFEAVSEISKNIKGPTIAGLARAKLADIERAWEAVKFSDSPRIHTFIATSPIHMKYKLMKSENEVLEAIKQTVTFARNLCPNIEWSCEDGGRSNLDFLYQCIELAIECGATTINIPDTVGYTLPTEFGSIFKSVKNNVTNIDKAILSTHTHNDLGLAVANSIAAIQEGARQVECTINGLGERAGNAALEEIVMALKVKK

SEQ ID NO: 116112 - protein, 304 aa, Unknown
  Bacterial polypetide isolated from the Sargasso Sea
EWSCEDASRSKRDFVYKCIELAIDSGARTINIPDTVGYSIPFEFAELINDVKENVSNIDKAIISVHCHNDLGLAVSNSIFAINSGARQVECTINGLGERAGNASMEEIVMAIKTRNDLLPFKTGIQTKMITKTSKLVSKITGFEVQPNKAIVGANAFAHESGIHQDGMLKHSNTYEIMTPESVGLKETKLVLGKHSGKHAFSVKLQELGYKINKKNIDKIFSSFKELADRKKDLYEEDIVALVEDEIIRVNNHIKFVSLDVHCGSTGAQKAELELEVNGFVKKTSSTGQGPVDAVFNCINKLVP

SEQ ID NO: 116113 - protein, 153 aa, Unknown
  Bacterial polypetide isolated from the Sargasso Sea
RHVIKHRMEEMGYSEQDFNLDALYEQFLHLADKKGQVFDYDLEALAFMEAQAAEDNFYQLQQLVVQSDSTEGVATATVRIDVGGEIKTEAATGNGPVDAAYNAIARATDRRIDIISYKLGAKGEGQNALGQVDITAVYHEQNFHGVGLATDVV

SEQ ID NO: 116114 - protein, 255 aa, Unknown
  Bacterial polypetide isolated from the Sargasso Sea
MQSTREVVLSKSKILKKMSSKEKVFIFDTTMRDGEQSPGASMSVEEKIQISRVFDEMGIDIIEAGFPISSPGDFEAVSAISKSLKNSIPCGLSRAMKKDIDACYESLKYAPRFRIHTFISTSPVHMKHKLDMSNDQVLDAIKESVTYARKFTDDVEWSCEDGTRTDLDFMCKTVELAINCGATTINIPDTVGYSIPEEFARTIIHLKNKVPNIDKAILSAHCHNDLGLAVANALAGLSAGVRPIECTINGIGERA

SEQ ID NO: 116115 - protein, 123 aa, Unknown
  Bacterial polypetide isolated from the Sargasso Sea
MSKDPGRILIFDTTLRDGEQSPGASLNLEEKLAIAHQLARLGVDVIEAGFPFASPGDFKAVNKIANSVGKENGPIICGLARASKGDIKACYEAVSPAPKKRIHTFIATSDIHLKHKLKKSRKD

SEQ ID NO: 116116 - protein, 282 aa, Unknown
  Bacterial polypetide isolated from the Sargasso Sea
ATSDIHMKYKLRMNPEDVLEAIKESVSYAKNYFEDVEWSCEDGTRSNIDFLYKCFDVAIKSGATTVNIADTVGYSMPGEFQNLIKKIRNNVTNIDKVFFSVHCHNDLGFAVSNSIASLDSGVRQIECTINGLGERAGNASLEEIVMTLNTRSDLYPYKTSVLTEHLTEVSKKVSECSGFIVPPNKAIVGKNAFAHESGIHQHGVIVNPNTYEIIKPDKVGAAGSKILMGKHSGRHAFKHKLLEMGFKLGNNELEQAFYLFKRMADTKKDISDKQIIKLIKSI

SEQ ID NO: 116117 - protein, 276 aa, Unknown
  Bacterial polypetide isolated from the Sargasso Sea
ILSTHCHNDLGLAVANSLAGVMAGARQIECTINGIGERAGNAALEEVVMAMRTRHDLMPYTTNINTKLLSKASKVVSNATGFPVQFNKAIVGKNAFAHESGIHQDGMLKNRNTYEIMTPESVGVKKTSLVMGKHSGRHAFRDKLSDMGYVNVTDDIINTAFGKFKILADKKKHIYDEDIAALVDDSLVTEDNVIKLKSLKVFAGTGEPQKAEMTLEIFGEVKNATETGDGPVDAIFKCIKKLYAHDVKLLLYNVHAVTEGTDAQATVSVRIEEKGK

SEQ ID NO: 116118 - protein, 309 aa, Unknown
  Bacterial polypetide isolated from the Sargasso Sea
IFFDTTLRDGEQSPGASMNLDEKIQIAEVLESMKVDIIEAGFPIASNGDFEAVTEVSKNIKNSTIAGLARASLKDIDRAWEAVQYAKSPRIHTFIATSPLHMKYKLKKTEDEVLEAIEKTVSHARNLCDNIEWSCEDGGRSKLDFLYKSIELAINCGASTINIPDTVGYTLPEEFGQIFRNVKNNVPNIDKAILSTHTHNDLGLATANNVAAIKEGARQVECTINGMGERAGNSSLEEIVMTLKVKKDLMPFHTDIKTQSIIKASRLVSSITGFPVQPNKAIVGANAFAHEAGIHQDGMLKHSGTYEIM

SEQ ID NO: 116119 - protein, 246 aa, Unknown
  Bacterial polypetide isolated from the Sargasso Sea
CRYLIDNNLIPEDVTVQVLTQAREHLIDKTFEALSGCKSAILHLYNSVSTLQRRVVFNQDREGVKKIALDGAQMVFDRLNKLQETKLQLQYSPESFTGTELDYALDVCETVLDCWKASKSNRVIINLPATVEMSTPNIYADQIEWMLQNFSDRDRIILSLHPHNDRGTGVAATELALMAGADRVEGTLFGNGERTGNVDIVTLGLNMFTQGIDPNLDFSDINKLIETAEFCNQLPVHQRHPYAGSL

SEQ ID NO: 116120 - protein, 303 aa, Unknown
  Bacterial polypetide isolated from the Sargasso Sea
MRAELPQDRLHQDKAGVKAIAVAAGSTIKRLADAAPETQWGFEYSPEVFSSTEIDFAVEVCNAVIGVFQPTPANKLILNLPATIECATPNNYADQIEWFGRHVDRRDSVLISVHTHNDRGTGVAASELAVMAGADRVEGCLFGNGERTGNVCLVTLALNLYTQGIDPELDFSDIDAVRKVVEDCNQIPVHPRHPYVGDLVHTAFSGSHQDAIRKGFAQQDPEAVWEVPYLPIDPADIGRDYEAVIRVNSQSGKGGITFLLEQEYGINLPRRMQIEFSQVVQRETDRLGLEMTASQIHQLLESE

SEQ ID NO: 116121 - protein, 301 aa, Unknown
  Bacterial polypetide isolated from the Sargasso Sea
AGVMAGARQIECTINGIGERAGNAALEEVVMAMRTRHDLMPYTTNINTKLLSKASKVVSNATGFPVQFNKAVVGKNAFAHESGIHQDGMLKNRNTYEIMTPESVGVHKTSLVMGKHSGRHAFKDKLNDLGYVGVTDDVIQIAFGKFKVLADKKKHIYDEDIAAIVDDSLVTEDNVIKLKSLKVFAGTGEPQKAEMTLEVFGEVKKASETGDGPVDAIFKCIKKLYPHEVKLLLYNVHAVTEGTDAQATVSVRIEEKGKTTVGQAADTDTLVASANAYLSALNKLIIKRKKTAPDPSLSAQI

SEQ ID NO: 116122 - protein, 392 aa, Unknown
  Bacterial polypetide isolated from the Sargasso Sea
MSDKLIIFDTTLRDGEQSPGASMTKEEKIRIAKQLERMKVDVIEAGFAASSNGDFDSIQTIAGLIKDSTICSLARANDKDIQRAADALKPADHFRIHTFIATSPLHMEKKLRMTPDQVFEQAKLAVRFARKFTDDVEFSPEDGSRSDMDFLCRVLEAVIAEGATTINIADTVGYGVPELYGQLVKTLRERIPNSHKAVFSVHCHNDLGMAVANSLAGVQIGGARQVECTINGLGERAGNTSLEEIVMAVKTRKDYFGLDIGLDTTQIVPASKLVSQITGFVVQPNKAVVGANAFAHASGIHQDGVLKARDTYEIMRAEDVGWSANKIVLGKLSGRNAFKQRLQELGIALDSEGELNTAFARFKELADRKSEIFDEDIIAIVTEESAEAQEKE

SEQ ID NO: 116123 - protein, 215 aa, Unknown
  Bacterial polypetide isolated from the Sargasso Sea
MSKDPGRILIFDTTLRDGEQSPGASLNLEEKLAIAHQLARLGVDVIEAGFPFASPGDFKAVNKIANAVGKENGPIICGLARASKGDIKACFEAVSPAPKKRIHTFIATSDIHLKHKLKKSRKDVLQIVPEMVNYAKSLVDDIEFSCEDASRSDPEFLYEVIQLAISAGATTINIPDTVGFTTPSEFGKLIADINKNVPNIDEAVISVHGHNDLGL

SEQ ID NO: 116124 - protein, 436 aa, Unknown
  Bacterial polypetide isolated from the Sargasso Sea
MTEKIYIFDTTLRDGEQSPGASMNLDEKLQIADVLDSMNVDIIEAGFPIASNGDFEAVSEVSKNVKNSTIAGLARASLKDIDRAWEAVQHAKSPRIHTFIATSPLHMKYKLKKTEEEVIEAIKKTVSHARNLCENIEWSCEDAGRSELNFLYRCIELAIDCGASTINIPDTVGYTLPEEFGKIFKNVKNNVSNIDKAILSSHTHNDLGLATANNVAAIKEGARQVECTINGMGERAGNSSLEEIVMTLKVKKDLMPYHTDIKTESIMKASRLVSSITGFPVQPNKAIVGANAFAHEAGIHQDGMLKHAGTYEIMTPESVGLNKSSLVLGKHSGKHAFSEKLKELGYEPGDNALMELFGRFKDLADKKKEIFEEDLIALAEDRSASYDEHIKFVSLEVNAGSVEKPEADLKINMEDKIKSVKINGNGPVDATFNAIK

SEQ ID NO: 116125 - protein, 384 aa, Unknown
  Bacterial polypetide isolated from the Sargasso Sea
DGTRTDMDYMCKTVELAIKCGAKTINIPDTVGYTVPSEFTKIIQTLLNKVPNIDKAILSTHCHNDLGLAVANSLAGVQAGARQIECTINGIGERAGNAALEEVVMAMKTRPDLMPYETGINTTLLSKASKIVSNATGFPVQYNKAIVGKNAFAHEAGIHQDGMLKNRQTYEIMTPESVGVKQTSLVMGKHSGRHAFKDKLISLGYVDVTDDVISNAFGKFKVLADKKKHVYDEDIIALVDDSLIIDNKVNAISLKTLKVFAGTGEPQRADMTLDVFGEVKKASETGDGPVDAIFKCIKKLYPHEVNLQLYQVHAVTEGTDAQATVSVRIEENGKTTVGQAADTDTLVASANAYINALNKMIIKRDKTAPGYSPEQKKEEKVKGI

SEQ ID NO: 116126 - protein, 486 aa, Unknown
  Bacterial polypetide isolated from the Sargasso Sea
MSEKERVYIFDTTMRDGEQSPGASMSLEEKIQIARVFDELGIDIIEAGFPIASPGDFEAVTEISKILKKSIPAGLSRHSKKDIDRCYEALRHAPRFRIHTFISTSPLHMKHKLNKSSEEVYDSIKEHVTYARKFTDDVEWSCEDGTRTDMDYMCKTVELAITCGAKTINIPDTVGYTVPSEFTKIIQTLLNKVPNIDKAILSTHCHNDLGLAVANSLAGVQAGARQIECTINGIGERAGNAALEEVVMAMKTRPDLMPYETGINTKLLSKASKIVSNATGFPVQYNKAIVGKNAFAHESGIHQDGMLKNRQTYEIMTPESVGVKQTSLVMGKHSGRHAFKDKLTSLGYVDVTDDIVENAFGKFKVLADKKKHIYDEDIIALVDDSLIIDNKVSAINLKSLKVFAGTGEPQRADMTLDVFGEVKEATETGDGPVDAIFKCIKTLYPHNINLQLYQVHAVTEGTDAQATVSVRIEENGKNTVGSSGRY

SEQ ID NO: 116127 - protein, 386 aa, Unknown
  Bacterial polypetide isolated from the Sargasso Sea
MYNQVQIFDTTLRDGEQVPGCKLDTKSKLILAEKIDLLGVDIIEAGFPISSPGDFKSVVEISKIIKNASVCALSRANEKDIDVAAESLKNAKKPRIHTGIGTSEVHIKYKFNSNKDSIIEIAKKSVAHARKYVDDVEFYAEDAGRTDNEFLAKVCEEVIKSGATVLNIPDTTGYCLPSEYGDKIKFLMNNVKGIENVTVSCHCHNDLGLATANSIYGVINGARQIECTVNGIGERAGNTSLEEVVMILRQHTDLNLDTNINSKLLNETSQKVSELMGMPVQPNKAIVGSNAFAHSSGIHQDGVIKKRETYEIIDPLDVGVDKSSIVLTARSGRAALAFRMKQYGVNLTKKELDDVYNEFLIVADKKKEVTDTDFPEILQNKNISYG

SEQ ID NO: 116128 - protein, 471 aa, Unknown
  Bacterial polypetide isolated from the Sargasso Sea
MTNPGEKYRPWPPISLPDRRWPDNPITHAPRWLSTDLRDGNQALAEPMDSARKLQFWELLLECGFKEIEVAFPSASQTDFNFVRQLIEERRIPEDVTIQVLTQAREDLILRTFESLRGAHCATVHLYNATAPLFRKLVFGMDKSQVIELATRATRLIRQQCEEQPQTRWQYEYSPETFCFTEPEFALAICEAVADIWQPCAQRPMIINLPATVEVSTPNVYADQIEFFCRHFSRRADVCISVHPHNDRGTGVASAELAVMAGADRVEGCLFGNGERTGNVCLVTLAMNLYSQGITPRLSFPEMKRVVEVVENCNQLPVHPRHPWAGSLAYTAFSGSHQDAIKKGFDARQPGDRWEMPYLPVDPQDIGCSYEAVIRVNSQSGKSGSAWLIEQNHGLKLPRALQQDFSLHVQRETDTHGKEMTQNALWQLFRSRYGLVAQPPLALLEYKTDSRQDGQLALQGTLRVNGETRRL

SEQ ID NO: 116129 - protein, 305 aa, Unknown
  Bacterial polypetide isolated from the Sargasso Sea
ARQIECTINGIGERAGNAAWEEVVMAMRTRNDLMPYTTGINTKLLSKASKIVSNATGFPVQFNKAVVGKNAFAHESGIHQDGMLKNRNTYEIMTPESVGVKKTSLVMGKHSGRHAFRDKLSDMGYVDVTDDIIDIAFGKFKVLADKKKHVYDEDIAALVDDSLIKEDNVIRLKSLKVYAGTGEPQKAVMKLEVFGDVKEATESGDGPVDAIFKCIKKLYPHEVNLQLYNVHAVTEGTDAQATVSVRIEENGKTTVGQAANTDTLVASADAYLNALNKLIIKRKKTAPEPMDLSGSKYIREKDGTI

SEQ ID NO: 116130 - protein, 438 aa, Unknown
  Bacterial polypetide isolated from the Sargasso Sea
GRVVSLCRMVENDVDRGAEALKDAHNWGLHTFIASSPLHMKHKLQMEPDEVLKATTKCVERAKKYTDNVEFSAEDATRSEPEFLVQLFSEAVRAGAVVLNVPDTVGYTTPDEMYELITRLMNEVYQAEKVVFSAHCHNDLGMAVANSMSAVRAGARQIECTINGIGERAGNASLEELVMAINTRQQYYQYETRITTEQIFPSSKLLSQITGVSVQPNKAIVGANAFAHEAGIHQHGVLKNSLTYEIMTPQSVGIKASNLVLGKHSGRHALSDRIKELGFELNDVELNQVFKEFKRLADIKKQIFDEDLEALVTHGIRKHTDRFQLEQLNITSGTSVIPTATVIMKIDGEQVKKAGFGDGPVDAALNTIRDMTGIDCRLTSYVVKAITGGTDAQGEVSVGVDQDGMQLTGRGAHTDIVVASAMAFINALNRIQARSNAI

SEQ ID NO: 116131 - protein, 270 aa, Unknown
  Bacterial polypetide isolated from the Sargasso Sea
DLMPYETGINTTLLSKASKLVSNVTGFPVQFNKAIVGKNAFAHESGIHQDGMLKNRNTYEIMTPESVGVKQTSLVMGKHSGRHAFKDKLISLGYADLTDDVIENAFGKFKVLADKKKHIYDEDIIALVDDSLVLDNKANNLVLKSLKVFAGTGEPQKADMTLDVNGQIKSATETGDGPVDAIFKCIKSLYPHDVNLQLYQVHAVTEGTDAQATVSVRIEENGKTTVGQAADTDTLVASANAYIAALNKMILKREKTAPMMEQQEEKMRGI

SEQ ID NO: 116132 - protein, 301 aa, Unknown
  Bacterial polypetide isolated from the Sargasso Sea
AAEFGVMAGADRVKGTLFGNGERTGNVDIVTLAMNLFSQGVDPELDISHIDNLRRITEYCNQLPVHPRHPYGGDLVYTAFSGSHQDAIKKGFEALSDDYDVWEVPYLPIDPAHVGRTYQDVIRVNSQSGKGGVAYVMKNNFGLDLPRRLQIEFSQVIQSITDEGGEILPETIKKTFDETYLHTTQPFTYLGHKSTFDSESSDLSTVSATLNVSGEKQTITGEGNGPLSAFKTALATDCGLDLRLVDYQEHAVGTGADATAAAYVEIEAADRRVYWGVGMNPNIVTASFHALLSAINRSESS

SEQ ID NO: 116133 - protein, 189 aa, Unknown
  Bacterial polypetide isolated from the Sargasso Sea
MTDKNRIIIFDTTMRDGEQSPGASMSLEEKIQISRVFDELGIDVIEAGFPIASPGDFEAVSAISKILKKSIPAGLARHTKKDIDACHESLKSAKQFRIHTFISTSSLHMKHKLNKTPDQVIESIKEHVTYARKFTDDVEWSCEDGTRTDMDFMCKTVELAIKSGAKTINIPDTVGYTVPSEFKKIIETL

SEQ ID NO: 116134 - protein, 295 aa, Unknown
  Bacterial polypetide isolated from the Sargasso Sea
AGADRVEGTLLGNGERTGNMDIMTMAMNLYSQGVDPLLDFTHMDEICTVARECTQLPVHPRHPYAGELVFTAFSGSHQDAIHKCLSKRDADDAWDVAYLPIDPADIGRTYQEVIRINSQSGKGGVAHVLRRDYGLELPRWLQVDFSTAVQGLAEDSEAEVYSDDIFALFSETYLSTADRWQLGNYQLSRRDESDGLEVMLHGPQGEVTLTGQGNGVVDAFVQAMETFTGRHIVVVEYSEHTLGQSADAEAVCYVQLNIDGERPCGVGRSHDIVQASLAAILSALDGRGQVLANAA

SEQ ID NO: 116135 - protein, 500 aa, Unknown
  Bacterial polypetide isolated from the Sargasso Sea
MADKNRIIIFDTTMRDGEQSPGASMSLEEKLQISRVFDELGVDIIEAGFPIASPGDFEAVTEISKTLKRSIPAGLARATKKDIDACHQALKHAKNFRIHTFISTSPLHMKHKLNKSPEEVLESIKESVTYARKFTDDVEWSCEDGTRTDMDYMCKTVELAIKSGAKTINIPDTVGYTVPSEFKKIIETLINKVPNIDKAILSTHCHNDLGLAVANSLAGVMAGARQIECTINGIGERAGNAALEEVVMAMRTRHDLMPYTTNINTKLLSKASKVVSNATGFPVQFNKAIVGKNAFAHESGIHQDGMLKNRNTYEIMTPESVGVKKTSLVMGKHSGRHAFRDKLSDMGYVDVTDDIINTAFGKFKILADKKKHIYDEDIAALVDDSLVTEDNVIKLKSLKVYAGTGEPQKAEMTLEVFGEVKTASETGDGPVDAIFKCIKKLYAHDVKLLLYNVHAVTEGTDAQATVSVRIEEKGKTTVGQAADTDTLVASANAYLNALNK

SEQ ID NO: 116136 - protein, 469 aa, Unknown
  Bacterial polypetide isolated from the Sargasso Sea
FEAVSAISKSLKNSIPCGLARATKKDIDACNESLKYAKRFRIHTFISTSPVHMKHKLNMTDNEVLGAIKESVTYARKFTDDVEWSCEDGTRTNLDFMYKTIELAINCGAKTINIPDTVGYSIPEEFAKTITLIKNNVPNIDKAIISAHCHNDLGLAVANALSGLSAGVRQIECTINGIGERAGNAALEEIVMAIKTRDDLLPYETGIKTELISKASKIVSNATGFPVQFNKAIVGKNAFAHESGIHQDGMLKNRETYEIMTPESVGVKKTSLVMGKHSGRHAFKDKLSDLGYTDVTDDVVQAAFGKFKILADKKKHIYDEDIVALVDDSLIIDNKINAINLKSLKVFAGTGEPQRADMTLDVFGDVKKTSQTGDGPVDAIFKCIKDLYPHNVKLSLYQVHAVTEGTDAQATVSVKIEENDRTTVGQSADTDTLVASANAYLNALNKMLIKREKKSMSQGIQHQKVKGGV

SEQ ID NO: 116137 - protein, 513 aa, Unknown
  Bacterial polypetide isolated from the Sargasso Sea
MDTVKIFDTTLRDGEQSAGAGLTTAEKLQIAKQLELLGVDIIEAGFAASSPGDFEAVEAISREVRTPVIASLSRCNFGDIDAAWGAIKNAENPRIHTFISSSDLQIMHQLRKNPEEVLDLAVASVERAKNYCDDVEFSPMDASRTDPQYLYQLLEAVIAAGATTVNIPDTVGYSIPSEFGSRIKDLIQSVPNIGKAVISVHCHNDLGLAAANSVAAIQAGARQVEGCINGLGERAGNASLEEVIMAIETRKDLLDVSTNITTEHIYRTSRMVSDITGFPVQANKAVVGANAFRHASGIHQDGVLKERSTFEIMDPKLVGWPSNELVLGKLSGRAGLRSRLEDLGYHLTKPELDGVFEQFKDLADRKREVTDKDLESLMAGQRRMDTELQSYILEHVQVSSGNHDVPTATVSLTMQDGTKITDAATGTGPVDAVYQAINRIVKVPNKLTEYRVNAITEGIDAQGSVTIRIEQDGETYVGRGSDTDIIVASAKAYMHALNRMLDITGTEASQTTA

SEQ ID NO: 116138 - protein, 245 aa, Unknown
  Bacterial polypetide isolated from the Sargasso Sea
SCFKLVSSVTSFPVQFNKAIVGKNAFAHESGIHQDGMLKNNETYEIMTPESIGLNESTLVMGKHSGRHAFKEKAKELGYVLADNQLNDAFYRFKDLADKKKEVFDDDIVALIDDEFSKGLDVIKLVSLSIYAGTEGPQFADLSLEIDGEVKQNKSEGDGPVDALFNSIRTLIPHTASLQLYQVHAVTEGTDAQAEVSVRLHESGKTVIGRGADTDTLVASARAYISALNRLMVKREKSIPEEIAN

SEQ ID NO: 116139 - protein, 334 aa, Unknown
  Bacterial polypetide isolated from the Sargasso Sea
MPDKVLIFDTTLRDGEQSPGASMNQEEKLSIARLLEELKVDIIEAGFPIASKGDFDSVQAIANEIKDCQIAGLARAKQEDIETAWDAVKKAKNPRIHTFIATSPIHMKFKLKLTEEEVLEKIKGSVSFARNLCSNIEWSCEDGGRSSIDFLYKCIELAIESGASTINIPDTVGYTLPFEFGEIIKKVKSNVPNIDKAIISVHCHNDLGLAVANSLNAVENGARQIECTINGLGERAGNAALEEVVMAMKVRSDLLKVQSNINTSAISKTSKLVSSITGFPVQPNKAIVGANAFAHESGIHQDGVLKNVQTYEIMSPETIGLKKSSLVLGKHSGK

SEQ ID NO: 116140 - protein, 383 aa, Unknown
  Bacterial polypetide isolated from the Sargasso Sea
EFSPEDATRSNPKFLVEILSEVVRSGATTLNIPDTVGYTTPDEMFELITRLRNEVYNADKVVFSVHCHNDLGLGVANSLAAVRAGARQIECTINGIGERAGNASLEEIVMALKIRQEYFGFESDIDSEQLYPSSKLLSQITGVDVQPNKAIVGANAFAHEAGIHQHGVLKNPLTYEIMTPQSVGIKSSNLVMGKHSGRFALGQRIQELGFDLNDIDLNNIFKEFKRLADLKKQVFDEDIEALVTHGIGSKSDKFILKDLIITSGTTAIPTATISMKIDDKVIKKAGFGDGPVDAALNTIKGITGIDCTLTSYVVKAITGGTDAQGEVSVGVEKDGVRITGRGAHTDIVVASALAFLNALNRLEIRTKGLSLATPSEKAALGGV

SEQ ID NO: 116141 - protein, 180 aa, Unknown
  Bacterial polypetide isolated from the Sargasso Sea
MGDKDKVFIFDTTMRDGEQSPGASMSLEEKIQIARVFDELGIDIIEAGFPIASPGDFESVKAISKILKNSIPAGLSRANKKDIDACHEALKAASRFRIHTFISTSPLHMKHKLNKTPEQVLEAIKESVTYARKLTDDVEWSCEDGTRTDMDFMCKIVELAISCGAKTVNIPDTVGYTTPS

SEQ ID NO: 116142 - protein, 332 aa, Unknown
  Bacterial polypetide isolated from the Sargasso Sea
ENNLHMPDKDKVIIFDTTMRDGEQSPGASMSVEEKIQISRVFDEMGIDIIEAGFPISSPGDFEAVSAISKSVKNSIPCGLARATKKDIDACHESLKFAKRFRIHTFISTSPVHMKHKLNMNNEQVLDAIKESVTYARKFTDDVEWSCEDGTRTDLDFMYKTIELAINCGAKTINIPDTVGYSIPEEFAKTITSIKNNVPNIDKAILSAHCHNDLGLAVANALSGLSAGVRQIECTINGIGERAGNAALEEIVMAIKTREDLLPYETGIKTELISKASKIVSNATGFPVQFNKAIVGKNAFAHESGIHQDGMLKNRETYEIMTPESVGVSKHH

SEQ ID NO: 116143 - protein, 227 aa, Unknown
  Bacterial polypetide isolated from the Sargasso Sea
MADKNRIIIFDTTMRDGEQSPGATMSLEEKLQISRVFDELGIDVIEAGFPIASPGDFEAVTEISKILKNSIPAGLSRATKKDIDACKDSLSHAKRFRIHTFISTSPLHMKHKLNKTPEEVLNAIKESVTYARKFTDDVEWSCEDGTRTDLDYMCKTVELAIKCGAKTINIPDTVGYSVPSEFKKIIETLINKVPNIDKAILSTHCHNDLGLAVANYLAGVMAGARQI

SEQ ID NO: 116144 - protein, 277 aa, Unknown
  Bacterial polypetide isolated from the Sargasso Sea
MPEFDPKNKYTPFERINLKDRKWPNQIINNAPTWCSVDLRDGNQSLIEPMDTQKKLKLFKTLVSMGFKEIEIGFPAASETDYNFCRYLIENKLIPNDVTIQVLTQAREHLIDNTFEALIGCNSAIVHLYNSVSTLQRRVVFKQDRIGVKNIALDGAKYILNKLNKFDEGVIKLQYSPESFTGTELDYALDVCEEVLDCWKANQKNPVIINLPATVEMSTPNIYADQIEWMSNNFSNRDRVILSLHPHNDRGTGVAATELALMAGADRVEGTLLETER

SEQ ID NO: 116145 - protein, 179 aa, Unknown
  Bacterial polypetide isolated from the Sargasso Sea
MYISDTKNIYMAEKDKVFIFDTTMRDGEQSPGASMSVEEKIQISRVFDEMGIDIIEAGFPISSPGDFEAVSAISKSVKNSIPCGLARATKKDIDACHESLKFAKRFRIHTFISTSPVHMKHKLNMTDEQVLGAIKESVTYAKKFTDDVEWSCEDGTRTNLEFMYKTIELAIKCGATTIK

SEQ ID NO: 116146 - protein, 546 aa, Unknown
  Bacterial polypetide isolated from the Sargasso Sea
MSKDPGRILIFDTTLRDGEQSPGASLNLEEKLAIAHQLARLGVDVIEAGFPFASPGDFKAVNKIANAVGKENGPTICGLARASKGDIKVCYEAVSPAPKKRIHTFIATSDIHLKHKLKKSRKDVLHIVPEMVNYAKSLVDDIEFSCEDASRSDPDFLYEVIQLAISAGATTINIPDTVGFTTPSEFGKLIADINKNVPNIDEAVISVHGHNDLGLAVANFLEAVKNGARQLECTINGIGERAGNASLEELVMALHVRKSFFNSFFKRNPDSPTPLTAIRTEEITKTSRLVSNLTGMTVQPNKAIVGANAFAHESGIHQDGVLKNRLTYEIIDAKTVGLSDNKISLGKLSGRSAVRARLEEMGYDLSREDLNDAFARFKDLADRKREITDRDLEAIVSEQVQLPEAKFQLSLVQVSCGNASKPTATISLLNTEDNTEDTAVSIGTGPVDAVCEALNKLAKVPNELIEFSVKSVTEGIDALGEVTIRIRRDNKIYSGHSADTDVVVAAANAYVNALNRLVFSEKKNSIHPQFDNLENSDKTFISNPAN

SEQ ID NO: 116147 - protein, 518 aa, Unknown
  Bacterial polypetide isolated from the Sargasso Sea
MTEKIYIFDTTLRDGEQSPGASMNLEEKIQIAEVLADLKVDIIEAGFPIASNGDFEAVSEISKNIKGPTIAGLARAKLADIERAWEAVKFSDSPRIHTFIATSPIHMKYKLMKSENEVLEAIKQTVTFARNLCPNIEWSCEDGGRSNLDFLYQCVELAIKCGATTINIPDTVGYTLPTEFGSIFKSVKNNVPNIDKAILSTHTHNDLGLAVANSIAAIQEGARQVECTINGLGERAGNAALEEIVMALKVKKDLIPFHTDIKTQSITKASRLVSSITGFSVQPNKAIVGANAFAHEAGIHQDGMLKNAETYEIMTPETVGLTESSLVLGKHSGKHAFSEKLKELGYELGDNALMELFGRFKDLADRKKEIFDEDLIALVGDRAASYNEKIKFVNLTVNAGSLEKHQAKLTILIEDKSKDIETDGNGPVDATFNAIKLLTNTNYKLKLYQVHAITAGTDAQGEVTVRLEDDQLTSQAKGSDPDIIVASAKAYINALNKLIYKKTRSKNEQISALKIEGV

SEQ ID NO: 116148 - protein, 344 aa, Unknown
  Bacterial polypetide isolated from the Sargasso Sea
WSIISGLYERVPNIDKAIISVHTHDDLGLGVGNALAAVHAGARQVEGAMNGIGERAGNCSLEEVIMAIKVRKDILNVQTRINHQEIWRTSQLVSQICNMPIPANKAIVGSGAFAHSSGIHQDGVLKNRENYEIMTPESIGLNQVQLNLTSRSGRAAVKHRMDEMGYKENEYSLDNLYDAFLKLADKKGQVFDYDLEALAFINKQQEEPEHFRLDYFNVQSGSNDIATASVKLGCGEEVKAEAANGNGPVDAIYQAINRVTEYNVELVKYSLTAKGHGKDALGQVDIVANYNGRRFHGVGLATDIVESSAKAMVHVLNNIWRAEEVEKELQRKAQNKENNKETVE

SEQ ID NO: 116149 - protein, 315 aa, Unknown
  Bacterial polypetide isolated from the Sargasso Sea
NDLGLAVANSLAGVLAGARQVECTINGIGERAGNAALEEIVMAMKTRNDLMPFKTGINTQLISKASKTVSNATGFPVQFNKAIVGKNAFAHESGIHQDGMLKNRNTYEIMTPESVGVKKTSLVMGKHSGRHAFKDKLSDLGYAGVTDDVIQTAFGKFKILADKKKHVYDEDIIALVDDSLIKESNVINLKSLKVFAGTGEPQKAEMTLEVYGDVKKANETGDGPVDAIFKCIKKLYPHDVKLQLYQVHAVTEGTDAQATVSVRIEEKGKTTVGQAADTDTLVASANAYLNALNKMIIKREKTAPEQYEQERMKGI

SEQ ID NO: 116150 - protein, 524 aa, Unknown
  Bacterial polypetide isolated from the Sargasso Sea
MSDKEKLYIFDTTMRDGEQSPGASMSVEEKIQISRVFDEMGIDIVEAGFPIASPGDFEAVSEISKIMKNSIPCGLSRALKKDIDACHESLKHAPRFRIHTFISTSPLHMKHKLEMTNEQVLDAIKESVTYARNFTDDVEWSCEDGTRTDMDFMCKTVELAIKCGAKTINIPDTVGYSIPEEFAKTIKHLKNNVPNIDKAILSAHCHNDLGLAVANALAGVSEGVRQIECTINGIGERAGNAALEEVVMAIKTRNDLMPYNTGIKTELISKASKIVSNATGFPVQFNKAIVGKNAFAHESGIHQDGMLKNRETYEIMTPESVGVKKTSLVMGKHSGRHAFKDKLSDLGYSDLTDDIIQAAFGKFKVLADKKKHIYDEDIVALVDDSLIVDNKINAINLKSLKVFAGTGEPQKAEMTLDVYGDIKNTTETGDGPVDAIFKCIKKLYPHDVKLSLYQVHAVTEGTDAQATVSVKIEENDRTTVGQSADTDTLVASANAYLNALNKMLIKREKKAPSQNIKHQKVKGI

SEQ ID NO: 116151 - protein, 318 aa, Unknown
  Bacterial polypetide isolated from the Sargasso Sea
MSGQDKIWIFDTTLRDGEQALRASLSHKQKIQLAHAIARLNVDVMEVGFPVSSPGDFESVQSIATQVKGPIICGLARAVSTDIEACGQALANAERRRIHTFIATSPLHLQYKLRRTLEQATEQAVAAIQLARRYTDDVEFSCEDAGRTPIDDLCRIVEAAIKAGARTINIPDTVGYTIPNEFARIITELRHKVPNIDQAILSVHCHNDLGLAVANSITAVQAGARQIECTVNGIGERAGNCSLEEVAMIIKTRPDILPFYTDIKSTEIYRSSHLVSQICHMPIQPNKAIVGENAFAHSSGIHQDGVLKAQNTYENYVS

SEQ ID NO: 116152 - protein, 530 aa, Unknown
  Bacterial polypetide isolated from the Sargasso Sea
MDNPIDKYSPFVPIDLKNRKWPGKTIKQAPIWCSVDLRDGNQALIEPMGSERKNRMFDLLCKLGFKEIEVGFPSASQTDFDFVRDLIENKKIPSDVSIQVLTQAREELIHKTFESLKGASKGIIHFYNSTSTLQREVVFNKDKGGIKKIATDAARLIKSLAKENPDTDWSFEYSPESFTGTELDYARDVCDDVVEILKPATKHKIIINLPATVEMSTPNIYGDQIEWMNDNLKNRKDICLSLHPHNDRGTAVAASEFGLMAGADRIEGTLFGNGERTGNVDVVTIALNMLTQGVDPKLDFSNINSVMREVEYCNQLPVHPRHPYAGDLVFTAFSGSHQDAIKKGFNAIKKSNNPKWEVPYLPIDPADLGRNYEAVVRINSQSGKGGVAFLLEKDHGVSLPRRLQISMSQKIQKLADETGREIVSSQLWEVFEKNYLEPINNFSYIKHNSSTKEDIHNLDLTLQMNDEQIIINGTGNGPIDSFINGLCNKLDIDIKVADYHQSAISSGSDAKAAAYIELEKDGKTFWGCGN

SEQ ID NO: 116153 - protein, 524 aa, Unknown
  Bacterial polypetide isolated from the Sargasso Sea
MSDRVIIFDTTLRDGEQALAASLTVKEKLQIAQALERLGVDVMEVGFPVSSPGDFQSVQTIARHIKQSRVCALARALPKDIDAAGEALRVAEAFRIHTFISTSSIHVESKLKKSFEDVLEMGVNAIKHARRYTDDVEFSCEDAGRTPIDNLCRMVEAAIKAGARTINIPDTVGYTVPTEFSGIIQTLFNRVPNIDQAIISVHCHDDLGLSVANSIGAVQMGARQIECTINGIGERAGNCSLEEVAMILKTRADLLGVHTNIRHSEIHRTSALVSQLCNMPVQPNKAIVGANAFSHSSGIHQDGVLKAKNTYEIITPESIGLTQNNLNMTSRSGRHVIKHRMESMGYAESSYDLDDLYGKFLTLADKKGQVFDYDLEALAFFSQIHEEPEHFKLEYLGVQSGSSVMATASVKLKVGQEIVSEAATGNGPVDAVYQCINRITGYEISIDKYELKGKGEGKNALGQVDIVAQYKGRKFHGMGLATDIIESSAQALIHVINSIWRADQVAEQMERNVAKTDKINTESV

SEQ ID NO: 116154 - protein, 522 aa, Unknown
  Bacterial polypetide isolated from the Sargasso Sea
MSNRVIIFDTTLRDGEQALAASLSVKEKLQIAMALERLGVDVMEVGFPVSSPGDFESVQTIARTIKNSRVCALSRALEKDIDAAAQALSVAEQFRIHTFISTSTIHVESKLKRSFEQVLEMAVGAVKYARRFTDDVEFSCEDAGRTPIDNLCRMVEAAIHAGARTINIPDTVGYTVPSEFGGIIQTLFNRVPNIDQAIISVHCHDDLGMSVANSITAVQYGARQIECTMNGIGERAGNCSLEEIAMILATRKNLLGVETGINAKEIHRTSNLVSQLCNMPIQSNKAIVGANAFTHSSGIHQDGMLKAQNTYEIMTPESIGLNRNNLNMTSRSGRHVIKHRMEEMGYSEQDFNLDALYEQFLHLADKKGQVFDYDLEALAFMEAQAAEDNFYQLQQLVVQSDSTEGVATATVRIDVGGEIKTEAATGNGPVDAAYNAIARATDRRIDIISYKLGAKGEGQNALGQVDITAVYHEQNFHGVGLATDVVEASARALVHVMNLTCRADKVADYKQNMHKNRELGGV

SEQ ID NO: 116155 - protein, 515 aa, Unknown
  Bacterial polypetide isolated from the Sargasso Sea
MNSKDNYIKIFDTTLRDGEQSPGASMSLEEKIQIAEIFDEMGVDIIEAGFPIASNGDFESVKEVSKIIKNVQVCGLSRAGQKDIDRAAEALKYAKNPRIHTFISTSPVHMQYKLQMNEEQVLDAINFSVSRARNLVDDVQWSAEDATRTDRDFLFKCVDMAISSGATTINIPDTVGYTTPDEYFEIISSLINNIPNSDKVVFSTHCHNDLGLAVANSLSGVRAGARQIECTMNGIGERAGNAALEEVVMSMKVRNDILDYNSGVETTLFTRASKLVSSVTSFPVQFNKAIVGKNAFAHESGIHQDGMLKNNETYEIMTPESIGLNESTLVMGKHSGRHAFKEKAKELGYILADNQLNDAFYRFKDLADKKKEVFDDDIIALIDDEFSKGLDVIKLISLSIHAGTEGPQFADLKLEIDGEVKQNRSEGDGPVDALFNSIRTLIPHTAKLQLYQVHAVTEGTDAQAEVSVRLHESGKTVIGRGADTDTLVASARAYISALNRLMVKREKNIPEELAN

SEQ ID NO: 116156 - protein, 552 aa, Unknown
  Bacterial polypetide isolated from the Sargasso Sea
MDNPTDKYSAFQPISLQNRKWPEKVLKEAPIWCSVDLRDGNQALIEPMGSERKNRMFALLCKLGFKEIEVGFPSASQTDFDFVRDLIENKKIPSDVKIQVLTQAREELIRKTFESLRGSKQAIVHFYNSTSTLQRRVVFDQDKEGIKKIALDAAILIKDLAEENPDTEWTFEYSPESFTGTELDYARDVCDEVVDILKTASKNKIIINLPATVEMSTPNIYGDQIEWMNENLKNRKNICLSLHPHNDRGTAVAASEFGLMAGADRIEGTLFGNGERTGNVDVVTIALNMLTQGIDPKLDFSNINSVMREVEYCNQLPVHPRHPYAGDLVFTAFSGSHQDAIKKGFNAMKSSNDPKWQVPYLPIDPADLGRNYEAVVRINSQSGKGGVAFLLEKDHGVSLPRRLQISLSQKIQKLADDTGKEISSTQIWDIFENNYLKAKNNYSYIKHESSTKDDIHSLSLIMKMGSSKEEISGSGNGPIDSFINGLSKKIGINIKVADYHQSAISSGSDAKAAAYIELEQDGKTFWGVGIHPNTTRASFDAIIVGLSKLLNT

SEQ ID NO: 116157 - protein, 511 aa, Unknown
  Bacterial polypetide isolated from the Sargasso Sea
MKESREIIIFDTTLRDGEQAPGCSMTMGEKLKIAHALKELNVDVIEAGFAAASPGDFDAVNAIASEIDGPTICSLARCNESDIEKAYEALKVNKNRRVHVFVATSEIHLKHKLNMAKDEVLKAAYEGVKMAKSFCENVEFSPEDASRTDHGFLTEVVNAAIEAGATTINVPDTVGYTIPYEFGELFKHLISNCNDAENVIFSVHCHDDLGLSVANSLAAVESGARQIECTINGIGERAGNTSLEEVCMAIRTREEYFDFKTSIDSTKLYPTSRLVSSITGMHVPRNKAIVGDNAFAHEAGIHQHGMLRDSSTYEIMKPQDVGIARSNLVLGKHSGRHAFLDRINELGFALEKDEIDPAFQEFKKLADRKKEIFDTDIEAIVLNADIANMSRWTLMDLETTSGSSWGSTASLKLKDSGEEIIERDNNSNPASGPIEAVFNIISDITGYKLELTNFEIHSVSVGDDAQGEVTVTVSYNGQNYRGHGISTDIIESGALAYLEVINRIERNQAKH

SEQ ID NO: 116158 - protein, 345 aa, Unknown
  Bacterial polypetide isolated from the Sargasso Sea
MLRNPAEKYRPFPAVRLTGRKWPSRTINQAPIWMSTDLRDGNQALIEPMNAAQKLELFEMLVAIGFKEIEAGFPSASQTDFDFVRKLIEEKRIPDDVTIEVFVPSRAELIARTFEALEGAPRAIVHLYNAICPSFRKIVFNQSKQQIKALAVEGTRIVKEHAQARPDTHWTFQYSPETFNTTELPYAREVCDAVAQTWRPTRDHKMIINLPASVEAATPNVFADQIEWMDRNLSYRDSIVLSVHPHNDRGTAVAATELALLAGADRVEGCLFGNGERTGNVDLVTVAMNLHAQGVDSGLDFSDLGAVRRVVERCNQIPVHPRHPYAGDAAHRPVWSDEDLQRAAA

SEQ ID NO: 116159 - protein, 310 aa, Unknown
  Bacterial polypetide isolated from the Sargasso Sea
MANEKVKILDTTLRDGEQSAGIGMTVEEKMEIAKQLEKLQVDIIEAGFAASSPGDFQAVENIAREVRSSVICSLSRAHPNDVDQAWGAIKQAESPRIHVFLSSSEIQVLHQLRKNREEVMDMAVAMVTRAKSYCDDVEFSPMDATRTNPEYLYKMLEAVIKAGATTINIADTVGYAIPSDFAELITDIRNKIPGIENTTLSVHCHNDLGLAVSNTLAAIQAGVRQVEGCINGLGERAGNASLEEIIMGLDTRKDLFNIDCNIDTTQLYPTSRLVSRITGMAVQANKAIVGENAFRHASGIHQDGVLKDRS

SEQ ID NO: 116160 - protein, 445 aa, Unknown
  Bacterial polypetide isolated from the Sargasso Sea
MEDKNRIIIFDTTMRDGEQSPGASMSLEEKIQISRVFDELGIDIIEAGFPIASPGDFEAVTAISKILKKSVPAGLARHTKKDIDACHEALKSAKRFRIHTFISTSSLHMKHKLNKTPEQVIDSIKEHVTYARKFTDDVEWSCEDGTRTDMDFMCKTVELAIKCGAKTINIPDTVGYTVPSEFKKIIETLKNKVPNIDKAILSVHCHNDLGLAVANSLAGVSAGARQVECTINGIGERAGNAALEEIVMAMKTRSDLMPFKTGINTKLISKASKTVSNATGFPVQFNKAIVGKNAFAHESGIHQDGMLKNRNTYEIMTPESVGVKKTSLVMGKHSGRHAFKDKLSDLGYAGVTDDVIQTAFGKFKILADKKKHVYDEDIIALVDDSLIKESNVINLKSLKVFAGTGEPQKAEMTLEVYGELKKANETGDGPVDAIFKCIKKLYPHD

SEQ ID NO: 116161 - protein, 504 aa, Unknown
  Bacterial polypetide isolated from the Sargasso Sea
MNIRIFDTTLRDGEQSPGVSLSPEKKLNIAKKLDQLGVDAIETGFPVISDGEKEGVKLIVGEGLKAELCGLARTNKKDIDAAVDCGLNYIHTFIATSDIHLEHKLKMTRDEALEKAIEAVEYGKSRGLQVEFSAEDATRTDREFLKKVFGAVANAGADRIDIPDTVGYSTPQYIGEITKDAIEVSKLPISVHCHNDFGLAVANAISGVQAGASCAHVTINGIGERAGNASLEEFVMALHSLEFENKWETNINTKLIYETSRYISKLAGMSVQPNKAIVGENAFGHESGIHTHGVLNNPLTYEPISPEIVGRTRWLQVGKHAGIHGMNAMLKEYGIEPNEDQTKQILDKVKALGDQGKQVTEVELLSMANEVIGENKLKRIVQLAGFSVSTGVGTMPYAFVKLNVDGQEFSATDYGVGPVDAALNAIQKITSQVTDEVRLKEYKLDSISGGANALCEVTVKVEDARGNIISSKSVGEDIVTTSVQAMVDGINRIMLKNLLKEKKI

SEQ ID NO: 116162 - protein, 348 aa, Unknown
  Bacterial polypetide isolated from the Sargasso Sea
YTIPSEFTKIIQTLLNKVPNIDKAILSTHCHNDLGLAVANSLAGVQAGARQIECTINGLGERAGNAALEEVVMAIKTRPDLMPYETGINTTLLNKASKIVSNATGFPVQYNKAIVGKNAFAHEAGIHQDGMLKNRQTYEIMTPESVGVKQTSLVMGKHSGKHAFKDKLNSLGYPDLTDDVVGNAFAKFKVLADKKKHVYDEDIIALIDDSLIIDNKVNAISLKSLKVFAGTGEPQRAEMTLDVYGDVKQASETGDGPVDAIFKCIKTLFPHDVNLQLYQVHAVTEGTDAQATVSVKIEEKGKTTVGQAADTDTLVASANAYINSLNKMIIKRDKTAPMEQESKKVRGI

SEQ ID NO: 116163 - protein, 511 aa, Unknown
  Bacterial polypetide isolated from the Sargasso Sea
MHWSVKNTNIRIFDTTLRDGEQSPGVSLSPEKKLNIARKLDELGVDAIETGFPVISEGEREGVKLIVGDGLKAELCGLARTNKKDIDAAVDCGLNYIHTFIATSDIHLEHKLKMSRDEALEKAIEAVEYGKSRGLQVEFSAEDATRTDREFLKKVFGAVASAGADRIDIPDTVGYSTPQYIGEITKDAIEVSKLPISVHCHNDFGLAVANAISGVQAGASCAHVTINGIGERAGNASLEEFVMALHSLEFENKWETNINTKLIYETSRYISKLAGMSVQPNKAIVGENAFGHESGIHTHGVLNNPLTYEPISPEIVGRTRWLQVGKHAGIHGMNAMLKEYGIEPNDDQTKQILDKVKALGDQGKQVTEVELLSMANEVIGENKLKRIVQLAGFSVSTGVGTMPYAFVKLNVDGQEFSATDYGVGPVDAALNAIQKITSQVTDEVRLKEYKLDSISGGANALCEVTVKVEDARGNIISSKSVGEDIVTTSVQAMVDGINRIMLKNLLKEKKI

SEQ ID NO: 116164 - protein, 273 aa, Unknown
  Bacterial polypetide isolated from the Sargasso Sea
MSDKNKVFIFDTTMRDGEQSPGASMSLEEKIQIARVFDELGVDIIEAGFPIASPGDFEAVTEVSKILKVSIPAGLARHSKKDIDRCYEALKHAPRFRIHTFISTSPLHMKHKLNKTPEQVYDSIKEHVTYARKFTDDVEWSCEDGTRTDIDYMCKTVELAIKCGAKTINIPDTVGYTVPSEFTQIIQTLLNKVPNIDKAILSTHCHNDLGLAVANSLAGVQAGARQIECTINGIGERAGNAALEEVVMAMKTRPDLMPYETGINTKLLSKASK

SEQ ID NO: 116165 - protein, 489 aa, Unknown
  Bacterial polypetide isolated from the Sargasso Sea
CSMTIGEKLKIAHALKELNVDVIEAGFAAASPGDYEAVNAIASEIDGPTICSLARCNESDIEKAYEALNVNKNRRIHVFVATSEIHLKHKLNMAKDEVLKAAYEGVKMAKSFCDNVEFSPEDASRTDHGFLTEVVNAAIEAGATTINVPDTVGYTIPYEFGELFKHLISNCTNAENVVFSVHCHDDLGLSVANSLSAVESGARQIECTINGIGERAGNTSLEEVCMAIRTREEYFDFKTSIDSTKLYPTSRLVSSITGMHVPRNKAIVGDNAFAHEAGIHQHGMLRDSSTYEIMKPQDVGIARSNLVLGKHSGRHAFLDRINDLGFKLEKDEIDPAFREFKKLADKKKEIFDTDIEAIVLNADIANMSRWSLEDLETNSGSSWGSTASLKLVDSGENIIERDNKENPASGPIEAVFNIISDITGYQLELTNFEIHSVSVGDDAQGEVTVTVSYDGQNYRGHGISTDIIESGALAYLEVINRIERNQAKH

SEQ ID NO: 116166 - protein, 218 aa, Unknown
  Bacterial polypetide isolated from the Sargasso Sea
MSDKVLIFDTTLRDGEQSPGASMNQEEKLSIARLLEELKVDIIEAGFPIASKGDFNSVQAIAGEIKDCQIAGLARAKHEDIETAWNAVKKAKNPRIHTFIATSPIHMKFKLKLTEEEVLEKIKDSVSFARNLCPNIEWSCEDGGRSSIDFLYKCIELAIESGATTINIPDTVGYTLPFEFGEIIKKVKNNVPNIDKAIISVHCHNDLGLAVANSLKCS

SEQ ID NO: 116167 - protein, 417 aa, Unknown
  Bacterial polypetide isolated from the Sargasso Sea
MHWSVKNTNIRIFDTTLRDGEQSPGVSLSPEKKLNIARKLDELGVDAIETGFPVISEGEREGVKAIVGDGLKAELCGLARTNKKDIDAAVDCGLNYIHTFIATSDIHLEHKLKMSRDEALEKAIEAVEYGKSRGLQVEFSAEDATRTDREFLKKVFGAVASAGADRIDIPDTVGYSTPQYIGEITKDAIEVSKLPISVHCHNDFGLAVANAISGVQAGASCAHVTINGIGERAGNASLEEFVMALHSLQFENTWETNINTKLIYETSRYISKLAGMSVQPNKAIVGENAFGHESGIHTHGVLNNPLTYEPISPEIVGRTRWLQVGKHAGIHGMNAMLKEYGIEPNDEQTKQILDKVKALGDQGKQVTEVELLSMANEVIGENKLKRIVQLAGFSVSTGVGTMPYAFVKLNVDGQEFS

SEQ ID NO: 116168 - protein, 376 aa, Unknown
  Bacterial polypetide isolated from the Sargasso Sea
MKDIAKKYKPFSSVELRDRTWPDKKITKAPIWCSVDLRDGNQALIEPMGHEKKVKMFELLCSLGFKEIEIGFPAASQTDYDFVRYLIEEKKIPNDVTIQVLTQSRQHIIEKTFESLIGIDKAIVHFYNSTSALQRKVVFDDDKEGIKKIAIDGALLIKELSKKYNKTNWRFEYSPESFTGTEVDFAAEVCNEVVNILKPCSDEKIIINLPATVEMSSPNVYGDQIEWMIRNLNNREDVIVSLHPHNDRGTAVGAAEIGVMAGADRVEGTLFGNGERTGNVDIVTLALNLLTQGVDPELEINNINHVIREVEYCNQLPVHPRHPYAGDLVFTAFSGSHQDAIKKGLSAITQSNNPHWEVPYLPIDPSDLGRTYEAVV

SEQ ID NO: 116169 - protein, 549 aa, Unknown
  Bacterial polypetide isolated from the Sargasso Sea
MPFTKYQAFRPIELPDRQWPNRVIDRAPRWCSVDLRDGNQALIDPMNVDEKLRLWDLLLKIGFSEIEVGFPAASQPDFDFIRKLVDEDRIPDDVIVQVLCQARRELIEKTVDALDGAPNVIFHLYNSTSELQRRVVFDLDRQGITDLAVKGTEIVKEGLKNFSSNVTFEYSPESFTGTELDFAVDICSAVAETWGASPEDPIIINLPSTVEMATPNVYADQIEWFVRNFPYRGSSVISLHTHNDRGTGVAATELAIMAGADRVEGCLFGNGERTGNCDLVTVAMNLFSQGVDPTLDFRAMPEIREAVESINKIPVHERHPYAGDLVFTAFSGSHQDAIKKGMSKVEKGLWEVPYLPIDPGDVGSSYKEAIRVNSQSGKGGVGFLLEEHYGISLPRELLVEFATMVQQLTEQLDREVKTDEIYDSLISNYIVESGPYKLVDYDLLNGKDQGQRCVARVEISNNLVTIDGEGSGPIEAFVNAMADTLNEPIVVLDYREHSLGTGTDAQAICVLAIEDNVNKKRFYGIGLSRNTITASLTAIVSALNRRWNA

SEQ ID NO: 116170 - protein, 363 aa, Unknown
  Bacterial polypetide isolated from the Sargasso Sea
NGGATTINIPDTVGYSIPEEFAKTITQIKNKVPNIDKAIISAHCHNDLGLAVANALAGLSAGVRQIECTINGIGERAGNAALEEIVMAIKTRNDLMPYETGIKTELISKASKIVSNATGFPVQFNKAIVGKNAFAHESGIHQDGMLKNRETYEIMTPESVGVKKTSLVMGKHSGRHAFKDKLSDLGYTDLTDDVIQNAFGKFKILADKKKHIYDEDILALVDDSLIVDNKINGINLKSLKVFAGTGEPQKADMTLDVFGEIKKTSQTGDGPVDATFKCIKALYPHEMKLLLYQVHAVTEGTDAQATVSVKIEENDRTTVGQSADTDTLVASANAYLNALNKMIIKREKKSMNDSIKHQKVKGI

SEQ ID NO: 116171 - protein, 370 aa, Unknown
  Bacterial polypetide isolated from the Sargasso Sea
MNIAREVCDEVVEILKPVSKNKIIINLPATVEMSTPNIYGDQIEWMNNNLKNRKDICLSLHPHNDRGTAVAASEFGLMAGADRVEGTLFGNGERTGNVDIVTIALNMLTQGIEPELDFSNINSVMREVEYCNQLPVHPRHPYAGDLVFTAFSGSHQDAIKKGFQAIKKSNDPKWEVPYLPIDPADLGRNYEAVVRINSQSGKGGVAFLLEKDHGVSLPRRLQISLSQKIQKLADESGKEISSSEIWDIFEKSYLQPVNNFSYIKHASSSKQEMHSLELTMNMNDRETIIQGSGNGPIDSFINGLSNEVGVNIKVADYHQSAISSGSDAKAAAYIELENNGETFWGVGIHPNTTRASFDAIIVGLSKLLKD

SEQ ID NO: 116172 - protein, 514 aa, Unknown
  Bacterial polypetide isolated from the Sargasso Sea
MTDKLIIFDTTLRDGEQSPGASMTKEEKIRIAKHLERMKVDVIEAGFAASSNGDFDAIHTIAGLVKDSTICSLARANDKDIQRAADALKPANSARIHTFIATSPLHMEKKLRMTPDQVFEQARLAVRFARKFTDNVEFSPEDGSRSDLDFLCRVLEAVIAEGATTINIADTVGYGVPELYGNLVKTLRERIPNSDKAIFSVHCHNDLGMAVANSLAGVKIGGARQIECTINGLGERAGNTSLEEIVMAVKTRKDYFGLDVGIDTTQIVPTSKLVSQITGFVVQPNKAVVGANAFAHASGIHQDGVLKARDTYEIMRAEDVGWTANKIVLGKLSGRNAFKQRLQELGVALDSESELNAAFMRFKDLADRKAEIFDEDIIAIVSEESALAHEQEHFKFVSLSQRSETGEQPQAKIVFAVEGKEVTGEARGNGPVDATFNAIEGEVGSGSELLLYSVNAITTGTQAQGEVTVRLSKSGRIVNGVGTDPDIVAASAKAYISALNKLHSKDDKVNPQRA

SEQ ID NO: 116173 - protein, 200 aa, Unknown
  Bacterial polypetide isolated from the Sargasso Sea
MSNKDKVFIFDTTMRDGEQSPGASMSLEEKIQIARVFDELGIDIIEAGFPIASPGDFEAVSEVSKILKNSIPAGLSRHSVKDIDRAYEALKHAPRFRIHTFISTSPLHMKHKLNMSPEDVYESIGKHVAYARKFTDDVEWSCEDGTRTDMDYMCKTVELAIKNGATTINIPDTVGYTIPSEFTTIIETLLNKVPNIDKAI

SEQ ID NO: 116174 - protein, 452 aa, Unknown
  Bacterial polypetide isolated from the Sargasso Sea
MPKKDKVYIFDTTMRDGEQSPGASMSVEEKIQISRVFDEMGIDIIEAGFPISSPGDFEAVSAISKSVKNSIPCGLARATKKDIDACHESLKFAKKFRIHTFISTSPVHMKHKLNMTNEQVLGAIKESVTYARKFTDDVEWSCEDGTRTDLDFMYKTIELAINCGATTINIPDTVGYSIPEEFAKKIKSIKNNVPNIDKAIISAHCHNDLGLAVANALSGLSAGVRQIECTINGIGERAGNAALEEIVMAIKTRDDLLPYETGIKTELISKASKIVSNATGFPVQYNKAIVGKNAFAHESGIHQDGMLKNRETYEIMTPESVGVKKTSLVMGKHSGRHAFKDKLSDLGYADVTDDVVQAAFGKFKILADKKKHIYDEDIVALVDDSLIIDNKINAINLKSLKVFAGTGEPQRAEMTLDVFGDIKETSQTGDGPVDAIFKCIKDLYPHDVKLSL

SEQ ID NO: 116175 - protein, 528 aa, Unknown
  Bacterial polypetide isolated from the Sargasso Sea
MRNKDRVFIFDTTMRDGEQSPGASMSLEEKIQIARVFDELGIDIIEAGFPIASPGDFEAVSEVSKILKNSIPAGLSRHSVKDIDRAYEALKHAPRFRIHTFISTSPLHMKHKLNMSPEDVYESIGKHVTYARKFTDDVEWSCEDGTRTDIDYMCKTVELAIKNGAKTINIPDTVGYTIPSEFTTIIETLLNKVPNIDKAILSTHCHNDLGLAVANSLAGVQAGARQVECTINGLGERAGNAALEEIVMAIKTRPDLMPYETGINTKLLSKASKIVSNATGFPVQYNKAIVGKNAFAHEAGIHQDGMLKNRQTYEIMTPESVGVKQTSLVMGKHSGRHAFKDKLNSLGYPDLTDDVISNAFAKFKVLADKKKHVYDEDIIALIDDSLIIDNKVSAINLKSLKVYAGTGEPQKAEMTLDVYGDVKQATETGDGPVDAIFKCIKILYPHDVNLQLYQVHAVTEGTDAQATVSVKIEENGKTTVGQAADTDTLVASANAYINALNKMIIKREKTAPMDQSPMEGKNQKMRGI

SEQ ID NO: 116176 - protein, 386 aa, Unknown
  Bacterial polypetide isolated from the Sargasso Sea
MKDLVKIFDTTLRDGEQVPGCKLDTKDKLKLAIHLDNLGVDILEAGFPISSPGDFESVVEISKNIKNASVCALSRANEKDIEVAAESLKHAVKPRIHTGIGTSDIHIKYKFNSNKDSIIELAKKSVSYAKRFVEDIEFYAEDAGRTENEFLAKVCEEVIKSGATVLNIPDTTGYCLPSEYGEKIKFLKENVEGINDVTISCHCHNDLGLATANSISGVINGARQIECTINGIGERAGNTSLEEVVMIMRQHPDLNLDTNINSKLLYSTSQKVSELMGMPVQPNKAVVGSNAFAHSSGIHQDGVIKKRETYEIIDPKDVGVDKSSIILTARSGRAALAYKMREIGVELTKVQLDSVYQEFLTLADIQKEISEKDLPIILEKQNIKYG

SEQ ID NO: 116177 - protein, 411 aa, Unknown
  Bacterial polypetide isolated from the Sargasso Sea
MKDLIKKYKPFEPIPLKGRQWPNTVIQTAPRWCSVDLRDGNQALIEPMGHERKKRMFKLLCDLGFKEIEVGFPAASETDFEFVRWLIEEKQIPSDVTIQVLTQARDHIIERTFESLEGASQAIVHFYNSTSTLQRKVVFDQDKSGIKKIATDGAELVKKLALGQRETKWSFEYSPESFTGTELDYAAEVCDSVVDILKDASSEKIIINLPATVEMATPNVYGDQIEWMNENLKNRESICLSLHPHNDRGTAVAASEFGLMAGADRVEGTLFGNGERTGNVDIVTIALNLLTQGIDPKLDFSDINSVIREVEYCNQLPVHPRHPYAGDLVFTAFSGSHQDAIKKGLGALKKSNQLEWEVPYLPIDPADLGRSYEAVVRINSQSGKGGVSFILEKDHGVSLPRRLQINLSQKV

SEQ ID NO: 116178 - protein, 338 aa, Unknown
  Bacterial polypetide isolated from the Sargasso Sea
AVEEGATTINVPDTVGYATPQDYLDLLKAVYDEVKGGNEDVIISTHCHNDLGLAVANSLTAITAGARQIEGAINGIGERAGNTSTEEIIMAVKTRQDQFGVEIQAETQEIFETSRLVSKLTGYPVQYNKAVVGKNAFSHESGIHQHGYLRNTTTYEIMSPDSVGQEAKIILGKHSGRAGFKDALDKLSISLDDDAFNNAFDTFKKIADRKGEIVENELRAIVGQVESSSDSAKLVSVSVNSKDEFASASVTLKVGNDEITEEATGDGMIHAAFTAVKSILKSDATLIDYRVESITKGADATAEIVTIINDGHLMKQGRAVSTDVVQGSVESFLNALNK

SEQ ID NO: 116179 - protein, 552 aa, Unknown
  Bacterial polypetide isolated from the Sargasso Sea
MDNPIDKYSAFKPIELKNRKWPSKIIKNAPIWCSVDLRDGNQALIEPMGSERKNRMFNLLCKLGFKEIEVGFPSASQTDFDFVRDLIENKKIPSDVNIQVLTQAREELIIKTFESLNDAPKAIVHFYNSTSTLQRKVVFDQDQKGIKEIATNAAKLIKNLAEKNTNTDWTFEYSPESFTGTELEYAREVCDEVVEILKPVTKNKIIINLPATVEMSTPNIYGDQIEWMNDNLKNREDICLSLHPHNDRGTAVAASEFGLMAGADRVEGTLFGNGERTGNVDVVTIALNMLTQGIDPKLDFSNINSVMREVEYCNQLPVHPRHPYAGDLVFTAFSGSHQDAIKKGFNAIKKSNDPKWEVPYLPIDPADLGRSYEAVVRINSQSGKGGVAFLLEKDHGVSLPRRLQISLSQKIQKLADKSGKEISSSQIWDIFEKNYLNPIDNFSYIKHSSSSKEEIHSLELTMNMNNKETVIKGSGNGPIDSFINGLCNKVGVEIKVADYHQSAISSGSDAKAAAYIELEKDNKTFWGVGIHPNTTRASFDAIIVGLSKLLKN

SEQ ID NO: 116180 - protein, 428 aa, Unknown
  Bacterial polypetide isolated from the Sargasso Sea
TFISTSPLHMKHNLNKSPEEVYEAIKEHVTYARNYTDDVEWSCEDGTRTDMDYMCKTVELAIKCGAKTINIPDTVGYTIPSEFTTIIETLLNKVPNIDKAILSTHCHNDLGLAVANSLAGVQAGARQIECTINGLGERAGNAALEEVVMAIKTRPDLMPYETGINTTLLSKASKIVSNATGFPVQYNKAIVGKNAFAHEAGIHQDGMLKNRQTYEIMTPESVGVKQTSLVMGKHSGRHAFKDKLNSLGYPDLTDDVVSNAFAKFKVLADKKKHVYDEDIIALVDDSLIVDNKVNAINLKSLKVFAGTGEPQRAEMTLDVYGEVKEASETGDGPVDAIFKCIKKLYPHDVNLQLYQVHAVTEGTDAQATVSVKIEENGKTTVGQAADTDTLVASANAYISSLNKMIIKREKTAPEPQQQNYESQKMKGI

SEQ ID NO: 116181 - protein, 342 aa, Unknown
  Bacterial polypetide isolated from the Sargasso Sea
MSDKNRIIIFDTTMRDGEQSPGATMSLEEKIQIARCFDELGIDVIEAGFPIASPGDFEAVTEISKVLKKSIPAGLSRATKKDIDACKDSLKHAKRFRIHTFISTSPLHMKHKLNKSPEEVLGLIKESVTYASKFTDDVEWSCEDGTRTDLDFMCKSVELAIKCGAKTINIPDTVGYSVPSEFKKIIETLINKVPNIDKAILSTHCHNDLGLAVANSLAGVMAGARQIECTINGIGERAGNAALEEVVMAMRTRNDLMPYTTGINTQLLSKASKIVSNATGFPVQFNKAVVGKNAFAHESGIHQDGMLKNRNTYEIMTPESVGVKKTSLVMGKHSGRHAFRDK

SEQ ID NO: 116182 - protein, 476 aa, Unknown
  Bacterial polypetide isolated from the Sargasso Sea
MSDKNRIIIFDTTMRDGEQSPGASMSLEEKLQISRVFDELGVDIIEAGFPIASPGDYEAVTEISKTLKKSIPAGLARATKKDIDACHEALRHAKNFRIHTFISTSPLHMKHKLNKSPEEVLGSIKESVTYARKFTDDVEWSCEDGTRTDMDYMCKTVELAIKCGAKTINIPDTVGYTVPSEFKKIIETLLNKVPNIDKAILSTHCHNDLGLAVANSLAGVMAGARQIECTINGIGERAGNAALEEVVMAMRTRHDLMPFTTNINTKLLSKASKVVSNATGFPVQFNKAIVGKNAFAHESGIHQDGMLKNRNTYEIMTPESVGVKKTSLVMGKHSGRHAFRDKLSDMGYVDITDDIIDTAFGKFKILADKKKHVYDEDIAAIIDDSLVTEDNVIKLKSLKVFAGTGEPQKAEMTLEVYGEIKSASETGDGPVDAIFKCIKNLYPHDVNLLLYNVHAVTEGTDAQATVSVRIEEQGKT

SEQ ID NO: 116183 - protein, 339 aa, Unknown
  Bacterial polypetide isolated from the Sargasso Sea
LNKVPNIDKAILSTHCHNDLGLAVANSLAGVQAGARQIECTINGIGERAGNAALEEVVMAMKTRSDLMPYTTGINTTLLSKASKIVSNATGFPVQFNKAIVGKNAFAHESGIHQDGMLKNRNTYEIMTPESVGVKQTSLVMGKHSGRHAFKDKLISLGYVNVTDDVIENAFGKFKVLADKKKHVYDEDIVALVDDSLIKEDNVISLKSLKVFAGTGEPQKAEMTLEVYGEIKKAVETGDGPVDAIFKSIKKLYPHEVNLQLYQVHAVTEGTDAQATVSVRIEEEGKTTVGQAADTDTLVASANAYINALNKMIIKRKRNFAPENMESSKNFKNEKMKGI

SEQ ID NO: 116184 - protein, 388 aa, Unknown
  Bacterial polypetide isolated from the Sargasso Sea
MTHDEKLEIAELLDEMGVDIIEAGFPIASEGDFKAVSEIARRSKNSTICGLARANYKDIDRCWEAVKNSSAPRIHTFIGTSPLHRAIPNLDKDQMAELIHDTVTHARNLCDNVQWSPMDATRTEHDYLMRVVEIAIKAGAATINIPDTVGYTAPVESADLIRMLIEKVPGADEVVFATHCHNDLGMATANALAAVEGGARQIECTINGLGERAGNTALEEVVMALKVRGDIMPYHTRIDATKLMNLSRRVATVSGFPVQFNKAIVGKNAFAHESGIHQDGMLKNSETFEIMRPEDIGLSETNLVLGKHSGRAALRAKLEDLGYQLADNQLKDVFVRFKELADRKKEVYDEDLIALMRAGEDTENDHIVLKSLEVICGTNGPQSAKMIL

SEQ ID NO: 116185 - protein, 365 aa, Unknown
  Bacterial polypetide isolated from the Sargasso Sea
MTDKNRVYIFDTTMRDGEQSPGASMSLEEKIQIARVFDELGVDIIEAGFPIASPGDFESVTEVSKVLKNSIPAGLARHSKKDIDRCYEALKHSPRFRIHTFISTSPLHMKHKLNKTPEQVYESIKEHVTHARKYTDDVEWSCEDGTRTDMDYMCKTVELAIKCGAKTINIPDTVGYTVPSEFTKIIQTLINKVPNIDKAILSTHCHNDLGLAVANSLAGVQAGARQIECTINGIGERAGNAALEEVVMAMKTRPDLMPYKTGINTKLLSKASKIVSNATGFPVQYNKAIVGKNAFAHESGIHQDGMLKNRQTYEIMTPESVGVKQTSLVMGKHSGRHAFKDKLTSLGYVDVTDDIVENAFGKFKV

SEQ ID NO: 116186 - protein, 202 aa, Unknown
  Bacterial polypetide isolated from the Sargasso Sea
MQILLNAVENGARQIECTINGLGERAGNAALEEVVMAMKVRSDLLKVQSNINTSAISKTSKLVSSITGFPVQPNKAIVGANAFAHESGIHQDGVLKNVQTYEIMSPETIGLKKSSLVLGKHSGKHAFKEKLKILGYEVGDNYINEIFEKFKLLADKKKDVYDEDIIALVDDTHFNKSNTLKLKNLSIMSGTNSKHVASLELN

SEQ ID NO: 116187 - protein, 131 aa, Unknown
  Bacterial polypetide isolated from the Sargasso Sea
MKNQVKIFDTTLRDGEQVPGCKLDTKSKLILAEKIDILGVDIIEAGFPVSSPGDFKSVVEISKIIKNASVCALSRANEKDIDVAAESLKNAKKPRIHTGIGTSEIHIKHKFNSNKDSIIDLAKRAVSHAKN

SEQ ID NO: 116188 - protein, 298 aa, Unknown
  Bacterial polypetide isolated from the Sargasso Sea
ARQVECTINGIGERAGNAALEEIVMAMKTRSDLMPFKTGINTKLISKASKTVSNATGFPVQFNKAIVGKNAFAHESGIHQDGMLKNRNTYEIMTPESVGVKKTSLVMGKHSGRHAFKDKLSDLGYAGVTDDVIQTAFGKFKILADKKKHVYDEDIIALVDDSLIKESNVINLKSLKVFAGTGEPQKAEMTLEVYGDVKKANETGDGPVDAIFKCIKKLYPHEVKLQLYQVHAVTEGTDAQATVSVRIEEKGKTTVGQAADTDTLVASANAYLNALNKMIIKREKTAPEEYEQDKMRGI

SEQ ID NO: 116189 - protein, 431 aa, Unknown
  Bacterial polypetide isolated from the Sargasso Sea
AAPGCSMNENEKLKVALNLEKLGVNIIEAGFPIASEGDFNSVKLIAENIKDCEVAGLSRANLKDIDRAWEAIKNAANPRIHTFIATSDIHLKYKLKKTKDEVLSIIEESVSHSVKYTKNVEFSCEDATRTDLDFLYRAVEVAIKAGATTINIPDTVGYSVPSEFGGIIRKLHENVDNVSNITISVHCHNDLGLAVANSLAAVHEGARQVECTINGLGERAGNASLEELVMALKVRNDLNPFVTRLDTKQIYPCSKLVSSVTGVSVQPNKAIVGANAFAHEAGIHQDGVLKESMTYEIMDPGEVGIPSNHIVLGKHSGRHAFRDRLNQFGYELSEDNFEIAFLKFKELCDKKKYVFDEDIFSLVNEEFMRLSDFYQLGTIECSSGSEIKPIAKIQMIIDGESVEVEESGDGPMDSVFKAISTGAKVYPTLDS

SEQ ID NO: 116190 - protein, 320 aa, Unknown
  Bacterial polypetide isolated from the Sargasso Sea
MKTTTDKERVVVFDTTLRDGEQSPGATMTHEEKLEIAELLDDMGVDIIEAGFPIASEGDFKAVSEIAERSKTAIICGLARANFGDIDRCWDAVKNAEKPRIHTFIGTSPLHRAIPNLDKDQMAQKIHDTVTHARNLCGNIQWSPMDATRTEHDYLCRVVEIAIKAGASTINIPDTVGYTAPLESADLIKMLIEKVPGADEVVFATHCHNDLGMATANSLAAVEGGARQIECTINGLGERAGNTALEEVVMALKVRGDIMPFYTNINTSKIMNISRRVASVSGFPVQFNKAIVGKNAFAHESGIHQDGMLKNSETFEIMRP

SEQ ID NO: 116191 - protein, 569 aa, Unknown
  Bacterial polypetide isolated from the Sargasso Sea
MLKNPATKYRPFTPVNLPNRVWPTRTITQAPIWMSTDLRDGNQSLFEPMDAARKMRMFKMLVAIGFKEIEVAFPSASETDFNFVRELIEGGHIPDDVTIEVLTQARDDLIERTFDSLRGAKRAIVHLYNATAPEFRKIVFGLDRDGVKTLAVNAARTIKRFADAATDTHFTLQYSPETFTATELDFAKEVCDAVFDVWQPTPEHKAIVNLPATVEVGTPNFYADQIEWMHRNLARRDALIVSVHPHNDRGTAVAAAELAVMAGADRIEGCLFGNGERTGNVDLVTLALNLYSQGVDPGLDFSQINEVARTAEECTQLPIHPRHPYVGDLVFTAFSGSHQDAIKKGFAVQRPDAVWEMPYLPIDPSDVGRTYDSIIRVNSQSGKGGIAYLLEQSYGVVLPRRLQVDFSAAVQRLTDDSGLEVTSTQIWSLFQQEYVEGDAPLRYVGHELTERDGRETIVLTADVHGERRVLRGEGNGPLDALMHALRTPLRIQHYEERALSQGADAKAIAIAELAGTGVRGSAFGVGIDANLTTASIRAVISGINRAYARADEAVQATFFGVQSAVKAVA

SEQ ID NO: 116192 - protein, 496 aa, Unknown
  Bacterial polypetide isolated from the Sargasso Sea
MSSDQLVIFDTTLRDGEQSPGIALTPSEKLLIAQQLEKLKVDVIEAGFAASSPGDWEGVNLIAKNIKNSTIASLARCVQEDIEQAYEAIKPANNSRIHVFTSTSDIHMEHMLRKTKDEVLKDAKESVRFAKKLCDDVEFSAQDATRTDHDFLIEILKIAVEEGATTINVPDTVGYATPNDYLELLKKVYSKVKGKNEDVIISTHCHNDLGLAVANSLTAIDAGARQIEGAINGIGERAGNTSTEEIIMAIKTRQDQYGVEIKAETTEISETSRLVSKLTGYPVQYNKAVVGRNAFSHESGIHQHGYLRNTMTYEIMTPDSVGQESKIVLGKHSGRAGFKDALEKLNIVLEEELFNLSFEKFKQLADRKGEIVENELRAIIGQVEINEAPVKLVSVSVNSKDQFASAKVTLNVNGVDQTKEAEGDGMIHAAFKAVKNILQSDAVLIDYRVESITKGADATAEIVTIINDGQNLKQGRSVSTDVVQGSVESFLNALNK

SEQ ID NO: 116193 - protein, 121 aa, Unknown
  Bacterial polypetide isolated from the Sargasso Sea
MSAYQSVRIFDTTLRDGEQSPGASMNLTEKIEVAHALSQLGVDIIEAGFPIASPGDFESVREIARAVREPIICGLARCNDSDIDRAWEALAEAARPRIHVFLATSAIHREFKLRMDEDEVV

SEQ ID NO: 116194 - protein, 495 aa, Unknown
  Bacterial polypetide isolated from the Sargasso Sea
MTKIINDSASKYRPFKSINLDHRTWPSNTITQSPIWCSVDLRDGNQALIEPMGEERKLRMFSLLIEIGFKEIEVGFPSASQTDFDFVRKIITENLIPNDVTIQALTQARPELIKKTFEALKGAKKAIVHVYNSTSTLQRKVVFKSDEAGIKKIATDGAKWVKEESELYDETDWSFEYSPESFTGTELPYAVEVCNAVNEIWQPNDQKKTIMNLPATVEMASPNTYADQIEWMCRNLQDRKNVIVSLHPHNDRGTAVAATELGVMAGADRIEGTLFGNGERTGNVDLVTLALNMLTQGVDPHLDFSNINPIMREAEYCNQLPVHPRHPYAGDLVFTAFSGSHQDAIKKGLAEMRNSNQELWEVPYLPIDPSDVGRSYEAVIRINSQSGKGGVAYLLEKDHGLSMPRRLQIEFSQVIQKIADESGKEISPSDIWDNFQETYLNSSGSYEFIEHHINSSSNKDGTQSDEITIGLKHNTDVVSIEGRGNGPIDAMIDAI

SEQ ID NO: 116195 - protein, 267 aa, Unknown
  Bacterial polypetide isolated from the Sargasso Sea
MNSKDNYIKIFDTTLRDGEQSPGASMSLEEKIQIAEIFDEMGVDIIEAGFPIASNGDFESVKEVSRIVKNVQVCGLSRAGQKDIDRAAEALKYAKNPRIHTFISTSPVHMQYKLQMNEQEVLDAINFSVSRARNLVEDVQWSAEDATRTDRDFLFKCVDMAISSGATTINIPDTVGYTTPDEYYEIIDSLIKNIPDSDKVIFSTHCHNDLGLAVANSLSGVRAGARQIECTMNGIGERAGNAALEEIVMSMKVRNDILDYDSGVKQS

SEQ ID NO: 116196 - protein, 522 aa, Unknown
  Bacterial polypetide isolated from the Sargasso Sea
MSNRVIIFDTTLRDGEQALAASLSVKEKLQIAMALERLGVDVMEVGFPVSSPGDFESVQTIARTIKNSRVCALSRALEKDIDAAAQALSVADQFRIHTFISTSTIHVESKLKRSFEQVLEMAVGAVKYARRFTDDVEFSCEDAGRTPIDNLCRMVEAAIHAGARTINIPDTVGYTVPSEFGSIIQTLFNRVPNIDQAIISVHCHDDLGLSVANSITAVQHGARQIECTMNGIGERAGNCSLEEIAMILATRKNLLGFETGINAKEIHRTSNLVSQLCNMPIQSNKAIVGANAFTHSSGIHQDGMLKAQNTYEIMTPESIGLNRNNLNMTSRSGRHVIKHRMEEMGYSEQDYNLDALYEQFLKLADKKGQVFDYDLEALAFMETQAAEDNFYQLQQLVVQSDSTEGVATATVRIDVGGEIKTEAATGNGPVDAAYNAIARATDRRIDIISYKLGAKGVGQNALGQVDITAVYHEQNFHGVGLATDVVEASARALVHVMNLTCRADKVADYKQNMHKNKELGGV

SEQ ID NO: 116197 - protein, 518 aa, Unknown
  Bacterial polypetide isolated from the Sargasso Sea
MTDKIYIFDTTLRDGEQSPGASMNLDEKLQIAEVLDSMKVDIIEAGFPIASNGDFEAVREVSKNVKNSTIAGLARASLKDIDRAWEAVQHAKSPRIHTFIATSPLHMKYKLKKTEEEVLEAINQTVSHARNLCENIEWSCEDGGRSELEFLYKCIELAINCGASTINIPDTVGYTLPEEFGKIFKNVKNNVPNIDKAILSTHTHNDLGLATANNVAAIKEGARQVECTINGMGERAGNSSLEEIVMTLKVKKDLMPYHTNIKTDLIMKASRLVSSITGFPVQPNKAIVGANAFAHEAGIHQDGMLKHAGTYEIMTPESIGLNKSSLVLGKHSGKHAFSEKLKELGYEPGDNALMELFGRFKDLADKKKEIFEEDLIALAEDRSASYDEHIKFVSLDVNAGSVKKHEANLKIEMNEEVKFIKDFGNGPVDATFNAIKKLTSTNFKLKLYQVNAITAGTDAQGEVTVRLEDDDLSSQAKGSDPDIIVASAKAYISALNRLLFKKTKSIVKKSAEIKIEGV

SEQ ID NO: 116198 - protein, 560 aa, Unknown
  Bacterial polypetide isolated from the Sargasso Sea
MTKIINKSASKYKPFEPINIENRAWPNKSIKEAPMWCSVDLRDGNQALIEPMGEERKLRMFNMLLEIGFKEIEVGFPSASQTDFNFVRKIINENLIPEDVSIQALTQARPELIKRTFEALEGASRAIVHVYNSTSTLQRRVVFKSDEKGIKKIATDGAKEVKEYSEKYHKTDWVFEYSPESFTGTELPYAVEVCNAVNEIWEPSKEKKSIINLPATVEMASPNIYADQIEWVSNNIDNRENIIISLHPHNDRGTAVAATELGVMAGADRIEGTLFGNGERTGNVDLVTLALNMLTQGVDPELDFSNINPIMREAEYCNQLPVHPRHPYAGDLVFTAFSGSHQDAIKKGLAELRNSNQETWEVPYLPIDPKDVGRSYEAVIRINSQSGKGGVAYLLEKDHGLSMPRRLQIEFSQVIQKITDETGKEISASDIWETFQETYFNENGRFKFLEHHINSRANKEGLQEDEIEIKINDRNISKTIKGLGNGPIDAMIDALSAGLNLEIKIADYHQHAISSGSDAKAVAYSEISYQDQSVWGVGIHQNTVIAGLEAVINGLNRLSM

SEQ ID NO: 116199 - protein, 513 aa, Unknown
  Bacterial polypetide isolated from the Sargasso Sea
MNKDHLIIFDTTLRDGEQSPGASMDIEEKIQIANALSDLNVDVIEAGFPIASNGDYSAVKEIADSISNSRICALARALEKDILRAADALKNAKYSRIHTFIATSPIHMEMKLKMSPEEVVKNAVNAVKMAKDHVEDVEFSPEDAGRSDFDFLCKIIEKVIDAGASTINIPDTVGYNLPHQFGDLISRIIDNVPNSNSAIFSVHCHNDLGLAVSNSLSSVLNGARQVECTINGLGERAGNAALEEIVMTVKTRRDIFSCDTRINTKKIMNCSRLVSSITGFPVQPNKAIVGKNAFAHESGIHQDGIIKSRETYEIMKAEDIGLLSNSLVLGKHSGRNAFKQKLDELNIQNASDDAFNDLFSRFKELADKKHEIYDEDIVRLSNNITLTGDDIQLSYMSVICDSNKKPSAKIMLNIKGEEKEATAEGDGAVDAAFNAIKEIIDLKVDLRLYSVNNITSGTDAQGEVTVRVVKDELIVNGHGADTDIVKASVLAYLNAINKIFQNPDLVTKKLSGI

SEQ ID NO: 116200 - protein, 262 aa, Unknown
  Bacterial polypetide isolated from the Sargasso Sea
MTEKIYIFDTTLRDGEQSPGASMNLDEKIQIAEVLDSMNVDIIEAGFPIASNGDFEAVSEVSKNVKSSTVAGLARANYKDIDRAWDAVKHANSPRIHTFIATSPLHMKYKLKKTEDEVLEAIKKTVTYSRNLCDNVEWSCEDGGRSELEFLYKCIELAISCGATTINIPDTVGYTLPEEFGKIFKNVKNNVLNIDKAILSTHTHNDLGLATANNVAAIKEGARQVECTINGMGERAGNSSLEEIVMTLKVKKDLMPYHTDIK

SEQ ID NO: 116201 - protein, 277 aa, Unknown
  Bacterial polypetide isolated from the Sargasso Sea
VDLVTLALNMLTQGVDPHLDFSNINPIMREAEYCNQLPVHPRHPYAGDLVFTAFSGSHQDAIKKGLAELRNSNQELWEVPYLPIDPSDVGRSYEAVIRINSQSGKGGVAYLLEKDHGLSMPRRLQIEFSQVIQKIADESGKEISPSDIWDNFQETYLNSSGNYEFIEHHINSSSNKDGTQSDEITIGLKHNTDIVSIIGRGNGPIDAMIDAIKKSFNLEIKISDYHQHAISSGSDAKAVAYSELVLGNKSVWGVGMHQNTVIAGLLSVISGLNRLSK

SEQ ID NO: 116202 - protein, 282 aa, Unknown
  Bacterial polypetide isolated from the Sargasso Sea
MGAYQGKKTIINLPATVEMASPNIYADQIEWVCKNIDNRENIIVSLHPHNDRGTAVAATELGVMAGADRIEGTLFGNGERTGNVDLVTLALNMLTQGVDPELDFSDINPIMRETEYCNQLPVHPRHPYAGDLVFTAFSGSHQDAIKKGLNELRNSNQETWEVPYLPIDPKDVGRSYEAVIRINSQSGKGGVAYLLEKDHGLSMPRRLQIEFSQVIQKITDETGKEISASDIWETFQETYFNENGTFKFLEHHINSRANKEGLQEDEIEIKIKKGNETKTIKG

SEQ ID NO: 116203 - protein, 481 aa, Unknown
  Bacterial polypetide isolated from the Sargasso Sea
SGCSQTDFDFTRYLINEKVIPSDVTIQVLTQARPEIIKRTFEALDGAPNAILHFYNSTSTLQRKVVFDKDKEGVKKIATDAAKLIKELSSEYKNTNWSFEYSPESFTGTELDYAVKVCDDVVDILKESSNNKIIINLPATVEMSTANIYGDQIEWMSENFKNRENICLSLHPHNDRGTAIAASEFGLMAGADRVEGTLFGNGERTGNVDIVTLALNMYSQGINPNLDFSQINNVMREVEYCNQLPVHPRHPYAGDLVFTAFSGSHQDAIKKGLNALRSSNDPQWEVPYLPIDPADLGRTYEAVVRINSQSGKGGVAFLLEKDHGVSLPRRLQISMSQKIQKIADETGKEISTSEIWEIFHTNFVMPKSGHSFKNYSLKTSDATDLTDHIKAEIEIDGKNHEISGSGNGPIDAFVNALNQKLSIDIKVSDYHQSAISSGSDAQAAAYIELQKGDKTSWGVGINPNTTKASFEAIIVGVAKLI

SEQ ID NO: 116204 - protein, 512 aa, Unknown
  Bacterial polypetide isolated from the Sargasso Sea
IIFDTTMRDGEQSPGASMSLEEKLQISRVFDELGVDVIEAGFPIASPGDFEAVTEISKTLKKSIPAGLARATKKDIDACHQALKHAKNFRIHTFISTSPLHMKHKLNKSPEEVLDSIQESVTYARKFTDDVEWSCEDGTRTDMDYMCKTVELAIKCGAKTINIPDTVGYTVPSEFKKIIETLINKVPNIDKAILSTHCHNDLGLAVANSLAGVMAGARQIECTINGIGERAGNAALEEVVMAMRTRHDLMPYTTNINTKLLSKASKVVSNATGFPVQFNKAVVGKNAFAHESGIHQDGMLKNRNTYEIMTPESVGVKKTSLVMGKHSGRHAFRDKLSDMGYVDVTDDIINTAFGKFKILADKKKHIYDEDIAALVDDSLVTEDNVIKLKSLKVFAGTGEPQKAEMTLEIFGEVKSATDTGDGPVDAIFKCIKKLYAHDVKLLLYNVHAVTEGTDAQATVSVRIEEKGKTTVGQAADTDTLVASANAYLSALNKLIIKRKKTAPDDENLSAQI

SEQ ID NO: 116205 - protein, 257 aa, Unknown
  Bacterial polypetide isolated from the Sargasso Sea
FSDINSVIREVEYCNQLPVHPRHPYAGDLVFTAFSGSHQDAIKKGLSALEKSNQPEWEVPYLPIDPADLGRSYEAVVRINSQSGKGGVSFILEKDHGVSLPRRLQINLSQKVQKVADDTGKEVMSRDIWKVFEENYISVSGRLKLINYALSSTEDSSGNTSDQIEISLEDKNNKVSLNGIGGGPIEAFVSSINNYFSTSITVSDYHQQSVTSGADAKAAAFIELTMDGKNEWGAGIDGNTTKASFQAIVSGLNKLIT

SEQ ID NO: 116206 - protein, 170 aa, Unknown
  Bacterial polypetide isolated from the Sargasso Sea
MSKDPGRILIFDTTLRDGEQSPGASLNLEEKLAIAHQLARLGVDVIEAGFPFASPGDFKAVNKIANVVGKENGPIICGLARASKGDIKACYEAVSPAPKRRIHTFIATSDIHLKHKLKKSRKDVLQIVPEMVNYAKSLVDDIEFSCEDASRSDPEFLYEVIQLAIAAGAT

SEQ ID NO: 116207 - protein, 288 aa, Unknown
  Bacterial polypetide isolated from the Sargasso Sea
MGDKNRIIIFDTTMRDGEQSPGATMSLEEKIQISRVFDELGIDVIEAGFPIASPGDFEAVTEISKILKNSIPAGLSRATKKDIDACKDSLCHAKRFRIHTFISTSPLHMKHKLNKSPEQVLDAIKESVTYARKFTDDVEWSCEDGTRTNMDYMCKAVELAIKCGAKTINIPDTVGYSAPSEFKKIIETLINKVPNIDKAILSTHCHNDLGLAVANSLAGVMAGARQIECTINGIGERAGNAALEEVVMAMRTRNDLMPYSTGINTKLLSKASKIVSNATGFSVQFNKA

SEQ ID NO: 116208 - protein, 523 aa, Unknown
  Bacterial polypetide isolated from the Sargasso Sea
MSDKDRVFIFDTTMRDGEQSPGASMSLEEKIQIARVFDELGIDIIEAGFPIASPGDFEAVSEVSKILKNSIPAGLSRHSVKDIDRAYEALKHAPRFRIHTFISTSPLHMKHKLNMSPEDVYESIGKHVSYARKFTDDVEWSCEDGTRTDMDYMCKTVELAIKNGASTINIPDTVGYTIPSEFTSIIETLLNKVPNIDKAILSTHCHNDLGLAVANSLAGVQAGARQIECTINGLGERAGNAALEEVVMAIKTRPDLMPYETGINTTLLSKASKIVSNATGFPVQYNKAIVGKNAFAHEAGIHQDGMLKNRQTYEIMTPESVGVKQTSLVMGKHSGRHAFKDKLNSLGYPDLTDDVVGNAFAKFKVLADKKKHVYDEDIIALVDDSLITDNKVSAISLKSLKVFAGTGEPQRAEMTLDVYGDVKQASETGDGPVDAIFKCIKTLYPHDVNLQLYQVHAVTEGTDAQATVSVKIEENGKTTVGQAADTDTLVASANAYINALNKMIIKRDKTAPMEQDSQKVRGI

SEQ ID NO: 116209 - protein, 513 aa, Unknown
  Bacterial polypetide isolated from the Sargasso Sea
MVENNKNDKLLVFDTTLRDGEQSAGASLTAQDKFRIATQLQKLNVDIIEAGFAASSPGDFAAVRKIALEIEGPTIATLARAVPSDIDSAIACLKGASKPRIHTFLSVSDIHMLHQMKKDRESIMSMAIDAVKRARDSVQDVEFSPMDASRSDPDYLYMMLENAIAAGATTVNIPDTVGYTNPQEFGELIAGVFNNVSNIDKAIVSVHCHNDLGMAVANSLSALENGARQIEGCINGLGERAGNAALEEVIMAVKTRPDHYGVETDINTPEIGPSSRLISNIFGFPIQFNKAVTGQNAFRHSSGIHQDAFLKERTTFEIMLPEEVGWKGDAIVLTKVSGRAGLKSRLEYLGYKVDDKELLEIFNSFKNLADQKKEITDKDLESLMSEFHRELDTTERFKVLDLDVVCGNKRDPVASITLELPNGDSESVSKSGTGPVDAVCNSIDSITKQDVNLTEFSVSSVTEGIDALGEVTIRIEKDGTIYSGQGSDTDIIFASAKAYVNAINRYLIIKSSN

SEQ ID NO: 116210 - protein, 560 aa, Unknown
  Bacterial polypetide isolated from the Sargasso Sea
MTKIINDSASKYRGFKPINLTDRTWPSKTIEESPAWCSVDLRDGNQALIEPMGEERKLRMFKLLLEIGFKEIEVGFPSASQTDFDFVRKIIQDNLIPSDVTIQALTQARPELIKRTFEALEGANKAIVHVYNSTSTIQRRVVFKSDEEGIKKIATDGAKWVKEYSEKYSETDWTFEYSPESFTGTELPYAVEVCNAVNEVWKPNKDKKTIINLPATVEMASPNIYADQIEWMCRNLENRENIIVSLHPHNDRGTAVAATELGVMAGADRIEGTLFGNGERTGNVDLVTLALNMLTQGVDPHLDFSNINPIMREAEYCNQLPVHPRHPYAGDLVFTAFSGSHQDAIKKGLSELRNTNEAIWEVPYLPIDPKDVGRSYEAVIRINSQSGKGGVAYLLEKDHGLSMPRRLQIEFSQVIQKITDETGKEISPSDIWDNFQKTYLTDTGYYQFVEHHINSSSNKDGSQSDKIHVLLNCNSKEVSIEGSGNGPIDAMIDAIKKSFDIEIKISDYHQHAISSGSDAKAVAYSELILGEESVWGVGMHQNTVIAGLLSVISGLNRLSK

SEQ ID NO: 116211 - protein, 292 aa, Unknown
  Bacterial polypetide isolated from the Sargasso Sea
MDKTNKKYKPYKPVSKENRSWPSKVIENAPIWCSVDLRDGNQALIEPMGDERKKRMFNLLCKIGFKQIEIGFPAASQTDFDFTRYLINEKVIPTDVTIQVLTQARPEIIKRTFEALDGAPNAILHFYNSTSTLQRKVVFDKDKEGVKKIATDAAKLIKELSSEYKNTNWSFEYSPESFTGTELDYAVEVCDDVVDILKESSNNKIIINLPATVEMSTANIYGDQIEWMSENFRNRENICLSLHPHNDRGTAIAASEFGLMAGADRVEGTLFGNGERTGNVDIVTLALNSIAK

SEQ ID NO: 116212 - protein, 556 aa, Unknown
  Bacterial polypetide isolated from the Sargasso Sea
MKKITNTNTSKYLPFERIDLSDRKWPGNIISKKPIWCSVDLRDGNQALIEPMGSEKKHRFFQLLLETGFKEIEVGFPSASKTDFDFVRDLIEKDLIPDDVTIQVLTQARDHLIEDTFKAVKGAKNVCIHVYNSTSTLQREVVFKESKDGVKKIALNGASLVKELADKNNETNWVFQYSPESFTGTELSYAVEVCNEVNEIWNPSSDNKSIMNLPATVEMSTPNIYADQIEWMSRNLNNRESVILSLHPHNDRGTAVAAAELGLMAGADRIEGCLFGNGERTGNVDIVTLALNQLTQGLDPELDFSNINHVMREVEYCNQLPVHPRHPYAGDLVFTAFSGSHQDAIKKGFDSMRESNDPLWKVPYLPIDPEDLGRTYEAVIRINSQSGKGGIAYILEKDHGLSMPRRLQIDFSQVIQEVTDETGKELESEDIWTKFRETYLEGNKYRYVSHKISSGPDDKGIQKDNIEVTLSKEGKEFDIKGEGNGPIDAFMSAFNNYNKSSFSISDYHQHAISSGADAQAVAYIEVQKDKKSLSWGAGIHANTLVASIISVLNALD

SEQ ID NO: 116213 - protein, 253 aa, Unknown
  Bacterial polypetide isolated from the Sargasso Sea
MEDKNRIIIFDTTMRDGEQSPGASMSLEEKIQISRVFDELGIDIIEAGFPIASPGDFEAVTAISKILKKSVPAGLARHTKKDIDACHQALKSAKRFRIHTFISTSSLHMKHKLNKTPEQVIDSIKEHVTYARKFTDDVEWSCEDGTRTDMDFMCKTVELAIKCGAKTINIPDTVGYTVPSEFKKIIETLKNKVPNIDKAILSVHCHNDLGLAVANSLAGVSAGARQVECTINGIGERAGNAALEEIVMAMKTR

SEQ ID NO: 116214 - protein, 388 aa, Unknown
  Bacterial polypetide isolated from the Sargasso Sea
IDRAYEALKHAPRFRIHTFISTSPLHMKHKLNMSPDDVYESIGKHVAYARNLTDDVEWSCEDGTRTDMDYMCKTVELAIKNGATTINIPDTVGYTIPSEFTTIIETLLNKVPNIDKAILSTHCHNDLGLAVANSLAGVQAGARQIECTINGLGERAGNAALEEVVMAIKTRPDLMPYETGINTTLLSKASKIVSNATGFPVQYNKAIVGKNAFAHEAGIHQDGMLKNRQTYEIMTPESVGVKQTSLIMGKHSGRHAFKDKLNSLGYPDLTDDIVGNAFAKFKVLADKKKHVYDEDIIALIDDSLIIDNKVNAISLKSLKVFAGTGEPQRAEMTLDVYGDIKQASEVGDGPVDAIFKCIKTLYPHNVNLQLYQVHAVKRRYRRTSYCKC

SEQ ID NO: 116215 - protein, 267 aa, Unknown
  Bacterial polypetide isolated from the Sargasso Sea
GINTKLLSKASKIVSNATGFPVQFNKAIVGKNAFAHESGIHQDGMLKNRNTYEIMTPESVGVKKTSLVMGKHSGRHAFRDKLSDMGYVDVTDDIIDIAFGKFKVLADKKKHVYDEDIAALVDDSLIKEDNVIKLKSLKVYAGTGEPQKAVMKLEVMGDVKEATETGDGPVDAIFKCIKKLYPHEVNLQLYNVHAVTEGTDAQATVSIRIEENGKTTVGQAANTDTLVASADAYLNALNKLIIKRKKTAPEPMDMSSSKYIREKDGTI

SEQ ID NO: 116216 - protein, 115 aa, Unknown
  Bacterial polypetide isolated from the Sargasso Sea
MQDNLIIFDTTLRDGEQSPGASMTKEEKLRIAKALEKMRVDIIEAGFPIASPGDFEAVKAVSGMIKDSTICGLARALYKDIDCAAEALEPAKSSRIHTFIATSPIHMRDKLRMEP

SEQ ID NO: 116217 - protein, 380 aa, Unknown
  Bacterial polypetide isolated from the Sargasso Sea
TDMDYMCKTVELAIKCGAKTINIPDTVGYTVPSEFTKIIETLKNKVPNIDKAILSTHCHNDLGLAVANSLAGVQAGARQIECTINGIGERAGNAALEEVVMAMKTRPDLMPYETGINTTLLSKASKIVSNATGFPVQFNKAIVGKNAFAHESGIHQDGMLKNRQTYEIMTPESVGVKQTSLVMGKHSGRHAFKDKLISLGYVDVTDDVIENAFGKFKILADKKKHVYDEDIIALVDDSLIVDNKVNAINLKSLKVFAGTGEPQRAEMTLDVFGEVKSASETGDGPVDAIFKCIKKLYPHNVNLQLYQVHAVTEGTDAQATVSVRIEENGKTTVGQAADTDTLVASANAYINALNKMIIKRNKTAPGYAPEQKKEEKVRGI

SEQ ID NO: 116218 - protein, 393 aa, Unknown
  Bacterial polypetide isolated from the Sargasso Sea
MRDKDRIIIFDTTMRDGEQSPGASMSLEEKIQISRIFDELGIDIIEAGFPIASPGDFEAVTAISKILKNSIPAGLARHTKKDIDACNESLKSAKRFRIHTFISTSALHMKHKLNKSPEEVIDSIKEHVTYARKFTDDVEWSCEDGTRTDIDFMCKTVELAIKCGAKTINIPDTVGYTVPSEYTKIISTLINKVPNIDKAILSTHTHNDLGLAVANSLAGVSAGARQVECTINGIGERAGNAALEEIVMAMKTRPDLMPFKTGINTKLLSKASKVVSNATGFPVQFNKAIVGKNAFAHESGIHQDGMLKNRNTYEIMTPESVGVKKTSLVMGKHSGRHAFKDKLSDLGYTGITDDVIQTAFGKFKILADKKKHVYDEDIDALVDDSLITEDNEI

SEQ ID NO: 116219 - protein, 462 aa, Unknown
  Bacterial polypetide isolated from the Sargasso Sea
VLKNSIPAGLSRHSKKDIDRCYEALKHAPRFRIHTFISTSPLHMKHKLNMTKEQVYESVKEHVAYARKFTDDVEWSCEDGTRTDIDYMCKTVELAIKCGAKTINIPDTVGYTVPSEFTKIIQTLLNKVPNIDKAILSTHCHNDLGLAVANSLAGVQAGARQIECTINGIGERAGNAALEEVVMAMKTRPDLMPYETGINTTLLSKASKIVSNATGFPVQFNKAIVGKNAFAHEAGIHQDGILKNRNTYEIMTPESVGVKQTSLVMGKHSGRHAFKDKLNSLGYKDVTDDVIENAFGKFKVLADKKKHVYDEDIIALVDDSLIVDNKVNAINLKSLKVFAGTGEPQRADMTLDVFGDIKKASEIGDGPVDAIFKCIKKLYPHDVSLQLYQVHAVTEGTDAQATVSVRIEENGKTTVGQAADTDTLVASANAYINALNKMIIKRDKTAPGHSTEQKYEQKMRGI

SEQ ID NO: 116220 - protein, 516 aa, Unknown
  Bacterial polypetide isolated from the Sargasso Sea
MEKIQIFDTTLRDGEQSPGCSMSAGEKLLLARQLEKLGVDTIEAGFAASSPGDFESVRSIGQEIRESMVVSLCRMVENDVDRGAEALKDAHNWGLHTFIASSPLHMKHKLQMEPDEVLKATTKCVERAKKYTDNVEFSAEDATRSEPEFLVQLFSEAVRAGAVVLNVPDTVGYTTPDEMYELITRLMNEVYQADQVVFSVHCHNDLGMAVANSMAAVRAGARQIECTINGIGERAGNASLEELVMAINTRQQYYQYETGITTEQIFPSSKLLSQITGVSVQPNKAIVGANAFAHEAGIHQHGVLKNSLTYEIMTPQSVGIKASNLVLGKHSGRHALSDRIKELGFELNDVELNQVFKEFKRLADIKKQIFDEDLEALVTHGIRKHTDRFQLEQLNITSGTSVIPTATVIMKIDGEQVKKAGFGDGPVDAALNTIRDMTGIDCRLTSYVVKAITGGTDAQGEVSVGVDQDGMQLTGRGAHTDIVVASAMAFINALNRLQARANAISPQTPMKQVAGI

SEQ ID NO: 116221 - protein, 343 aa, Unknown
  Bacterial polypetide isolated from the Sargasso Sea
MPSEFGSIFKSVKNNVPNIDKAILSTHTHNDLGLAVANSIAAIQEGARQVECTINGLGERAGNAALEEVVMTLKVKKDLVPFHTNVKSEYITKASRLVSSITGFSVQPNKAIVGANAFAHEAGIHQDGMLKNAETYEIMTPESVGLNKSSLVLGKHSGKHAFSEKLKELGYDFGDNTLMELFGRFKDLADKKKEIFEEDLIALAGERSLTYDEHIKFVSLEVNAGSLSKHKASLTLIMNNDKLSNISEGNGPVDATFNAIKEITKTDFRLKLYQVHAITAGTDAQGEVTVRLEDDDLSSQAKGSDPDIIVASAKAYISALNRLLFKKTKSIVKKSAEIKIEGV

SEQ ID NO: 116222 - protein, 380 aa, Unknown
  Bacterial polypetide isolated from the Sargasso Sea
MEDKNRIIIFDTTMRDGEQSPGASMSLEEKIQISRVFDELGIDVIEAGFPIASPGDFEAVTAISKILKKSVPAGLARHTKKDIDACYESLRSAKRFRIHTFISTSALHMKHKLNKTPEQVIDSIKEHVTYARKFTDDVEWSCEDGTRTDMDFMCKTVELAIKSGAKTINIPDTVGYTVPSEYKKIIETLKNKVPNIDKAILSVHCHNDLGLAVANSLAGVTAGARQVECTINGIGERAGNAALEEIVMAMKTRSDLMPYKTGINTKLISKASKTVSNATGFPVQFNKAIVGKNAFAHESGIHQDGMLKNRNTYEIMTPESVGVKKTSLVMGKHSGRHAFKDKLSDLGYAGVTDDVIQTAFGNLKFLAIKRNTFMMKILSH

SEQ ID NO: 116223 - protein, 298 aa, Unknown
  Bacterial polypetide isolated from the Sargasso Sea
MSDKEKVYIFDTTMRDGEQSPGASMSVEEKIQISRVFDEMGIDIIEAGFPISSPGDFEAVSEISKSVKNSIPCGLSRALKKDIDACHESLKFAKRFRIHTFISTSPVHMKHKLDMTNDQVLDAIKESVTYARKFTNDVEWSCEDGTRTDLDFMCKTIELAIKCGATTINIPDTVGYSIPEEFARTITHIKNNVPNIDKAIISAHCHNDLGLAVANALAGLSAGVRQIECTINGIGERAGNAALEEIVMAIKTRNDLMPYETGIKTELISKASKIVSNATGFPVQFNKAIVGKNAFAHE

SEQ ID NO: 116224 - protein, 286 aa, Unknown
  Bacterial polypetide isolated from the Sargasso Sea
MTEKIYIFDTTLRDGEQSPGASMNLDEKLQIAEVLDSMNVDIIEAGFPIASNGDFEAVQEVSKYVKNSTIAGLARASLKDIDRAWEAVQHAKSPRIHTFIATSPLHMKYKLKKTEDEVLEAIEKTVTHARNLCDNIEWSCEDGGRSELEFLYKCIELAINSGASTINIPDTVGYTLPEEFGAIFKHVKNNVPNIDKAILSTHTHNDLGLATANNVAAIKEGARQVECTINGMGERAGNSSLEEIVMTLKVKKDLMPYHTDIKTELIMKSSRLVSSITGFPVQPNKA

SEQ ID NO: 116225 - protein, 259 aa, Unknown
  Bacterial polypetide isolated from the Sargasso Sea
MDNPIDKYSAFKPIDLANRKWPNNILKESPVWCSVDLRDGNQALIEPMGSERKDRMFALLCKLGFKEIEIGFPSASQTDYDFVRDLIENKKIPSDVNIQVLTQSREELIKKTFESLKGASKAIIHFYNSTSTLQRKVVFDQDKDGIKEIATNAALLIKDLAEKNQETEWSFEYSPESFTGTELEYAKEVCDEVVEILKPVSKNKIIINLPATVEMSTPNIYGDQIEWMNENLKNRSDICLSLHPHNDRGTAVAASEFGL

SEQ ID NO: 116226 - protein, 525 aa, Unknown
  Bacterial polypetide isolated from the Sargasso Sea
MAEKDKVFIFDTTMRDGEQSPGASMSVEEKIQISRVFDEMGIDIIEAGFPISSPGDFEAVSAISKSVKNSIPCGLARATKKDIDACHESLKFAKRFRIHTFISTSPVHMKHKLNMTNEQVLGAIKESVTYAKKFTDDVEWSCEDGTRTDLDFMYKTIELAIKCGATTINIPDTVGYSIPEEFAKTIKLIKNNVPNIDKAIISAHCHNDLGLAVANALSGLSAGVRQIECTINGIGERAGNAALEEIVMAIKTRDDLLPYETGIKTELISKASKIVSNATGFPVQFNKAIVGKNAFAHESGIHQDGMLKNRETYEIMTPESVGVKKTSLVMGKHSGRHAFKDKLSDLGYADVTDDVVQAAFGKFKILADKKKHIYDEDIVALVDDSLIIDNKINAINLKSLKVFAGTGEPQRAEMTLDVFGDIKHTTQTGDGPVDAIFKCIKELYPHDVKLSLYQVHAVTEGTDAQATVSVKIEENDRTTVGQSADTDTLVASANAYLNALNKMLIKREKKSLYKNIEPKKVKGVF

SEQ ID NO: 116227 - protein, 251 aa, Unknown
  Bacterial polypetide isolated from the Sargasso Sea
MATGFPVQYNKAIVGKNAFAHESGIHQDGMLKNRQTYEIMTPESVGVKQTSLVMGKHSGRHAFKDKLTSLGYADVTDDVIENAFGKFKVLADKKKHVYDEDIIALVDDSLIVDNKVNAINLKSLKVFAGTGEPQRADMTLDVYGEIKKATETGDGPVDAIFKCIKQLYPHDVNLQLYQVHAVTEGTDAQATVSVRIEENGKTTVGQAADTDTLVASANAYINALNKMIIKRDKTAPGYTPEQTKSEKVRGI

SEQ ID NO: 116228 - protein, 523 aa, Unknown
  Bacterial polypetide isolated from the Sargasso Sea
MSEKDKVFIFDTTMRDGEQSPGASMSLEEKIQIARVFDELGIDIIEAGFPIASPGDFEAVSEISKILKNSIPAGLSRHSKKDIDRCHEALRHAPRFRIHTFISTSPLHMKHKLNKSPEEVYESIKEHVTYARKFTDDVEWSCEDGTRTDMDYMCKTVELAIKCGAKTINIPDTVGYTIPSEFTTIIETLLNKVPNIDKAILSTHCHNDLGLAVANSLAGVQAGARQIECTINGLGERAGNAALEEVVMAIKTRPDLMPYETGINTTLLSKASKIVSNATGFPVQYNKAIVGKNAFAHEAGIHQDGMLKNRQTYEIMTPESVGVKQTSLVMGKHSGRHAFKDKLNSLGYPNLTDDVVGNAFAKFKVLADKKKHVYDEDIIALIDDSLIIDNKVNAISLKSLKVFAGTGEPQRAEMTLDVYGEIKQASETGDGPVDSIFKCIKILYPHNVNLQLYQVHAVTEGTDAQATVSVKIEEKGKTTVGQAADTDTLVASANAYINALNKMIIKRTKTAPMEQESQKVRGI

SEQ ID NO: 116229 - protein, 468 aa, Unknown
  Bacterial polypetide isolated from the Sargasso Sea
FEAVSEISKIMKNSIPCGLSRALKKDIDACHESLKHAPRFRIHTFISTSPLHMKHKLEMTNEQVLDAIKESVTYARNFTDDVEWSCEDGTRTDMDFMCKTVELAINCGAKTINIPDTVGYSIPEEFAKTIKHLKNNVPNIDKAILSAHCHNDLGLAVANALAGVSEGVRQIECTINGIGERAGNAALEEVVMAIKTRNDLMPYNTGIKTELISKASKIVSNATGFPVQFNKAIVGKNAFAHESGIHQDGMLKNRETYEIMTPESVGVKKTSLVMGKHSGRHAFKDKLSDLGYSDLTDDIIQAAFGKFKVLADKKKHIYDEDIVALVDDSLIVDNKINAINLKSLKVFAGTGEPQKAEMTLDVYGDIKNTTETGDGPVDAIFKCIKKLFPHDVKLSLYQVHAVTEGTDAQATVSVKIEENDRTTVGQSADTDTLVASANAYLNALNKMLIKREKKAPSQNIKHQKVKGI

SEQ ID NO: 116230 - protein, 386 aa, Unknown
  Bacterial polypetide isolated from the Sargasso Sea
MKNQVKIFDTTLRDGEQVPGCKLDTKSKLILAEKLDLLGVDIIEAGFPISSPGDFKSVVEISKIIKNASVCALSRANEKDIDIAAESLKSAKNPRIHTGIGTSEVHIKYKFNSNKDSIIDTAKKSVAHARKYVDDVEFYAEDAGRTENEFLAKVCEEVIKSGATVLNIPDTTGYCLPNEYGDKIKFLINNVNGIENVTVSCHCHNDLGLATANSIHGVLNGARQIECTINGIGERAGNTSLEEVVMILRQHSDLNLDTNINSKLLNETSQKVSELMGMPVQPNKAIVGSNAFAHSSGIHQDGVIKKRETYEIIDPLDVGVDKSSIVLTARSGRAALAFRMKEFGVNLTKNELDEVYDEFLTLADKKKEVTDVDFPIILKNKKIKYG

SEQ ID NO: 116231 - protein, 295 aa, Unknown
  Bacterial polypetide isolated from the Sargasso Sea
MSKDPGRILIFDTTLRDGEQSPGASLNLEEKLAIAHQLARLGVDVIEAGFPFASPGDFKAVNKIANVVGKENGPIICGLARASKGDIKACYEAVSPAPKKRIHTFIATSDIHLKHKLKKSRKDVLQIVPEMVNYAKSLVDDIEFSCEDASRSDPEFLYEVIQLAITAGATTINIPDTVGFTTPSEFGNLIADINKNVPNIDEAVISVHGHNDLGLAVANFLEAVKNGARQLECTINGIGERAGNASLEELVMALHVRKSFFNSFFKRNPDSPTPLTAIRTEEITKTSRLVSNLTG

SEQ ID NO: 116232 - protein, 433 aa, Unknown
  Bacterial polypetide isolated from the Sargasso Sea
MEDISKKYKPFKPINLVDRSWPNNLLTEAPRWCSVDLRDGNQALIEPMSVEKKIRMFELLCNIGFKEIEVGFPAASQTDYDFVRILIKEEKIPDDVTIQVLTQSRDHIIKKTFESLEGVKRAIVHFYNSTSTLQRKVVFNKDKMGIKKIATDGATLIKELSSANQQTEWLFEYSPESFTATELDFSLEVCNEVVDILSPYSKEKIIINLPATVEMSSPNIYGDQIEWMISNIQNRENICISLHPHNDRGTAVAAAEIGVMAGADRIEGTLFGNGERTGNVDLVTLSLNLLTQGVNPKLDFTKINHIVREVEFCNQLPVHPRHPYAGDLVFTAFSGSHQDAIKKGLDAIKKSNEPHWEVPYLPIDPSDLGRSYEAVVRINSQSGKGGVAYILEKDHGVSLPRRLQISLSSKIQDVADQSGKELLSHEIWSIFES

SEQ ID NO: 116233 - protein, 546 aa, Unknown
  Bacterial polypetide isolated from the Sargasso Sea
MSKDTGRILIFDTTLRDGEQSPGASLNLEEKLAIAHQLARLGVDVIEAGFPFASPGDFKAVNKIANAVGKENGPIICGLARASKGDIKACFEAVSPAPKKRIHTFIATSDIHLKHKLKKSRKDVLQIVPEMVNYAKSLVDDIEFSCEDASRSDPEFLYEVIQLAISAGATTINIPDTVGFTTPSEFGKLIADINKNVPNIDEAVISVHGHNDLGLAVANFLDAVKNGARQLECTINGIGERAGNASLEELVMALHVRKSFFNSFFKRNPDSPTPLTAIRTEEITKTSRLVSNLTGMTVQPNKAIVGANAFAHESGIHQDGVLKNRLTYEIIDAKTVGLSDNKISLGKLSGRSAVRARLEEMGYDLSREDLNDAFARFKDLADRKREITDRDLEAIVSEQVQLPEAKFQLSLVQVSCGNASKPTATISLLNTEDNSEDTAVSIGTGPVDAVCEALNKLAKVPNELIEFSVKSVTEGIDALGEVTIRIRRDNKIYSGHSADTDVVVAAANAYVNALNRLVFSEKKNSIHPQFDNLENTDNQFLSNTAN

SEQ ID NO: 116234 - protein, 325 aa, Unknown
  Bacterial polypetide isolated from the Sargasso Sea
IDKAILSTHTHNDLGLATANNVAAIKEGARQVECTINGMGERAGNSSLEEIVMTLKVKKDLMPYHTDIKTESIMKASRLVSSITGFPVQPNKAIVGANAFAHEAGIHQDGMLKHAGTYEIMTPESIGLNKSSLVLGKHSGKHAFSEKLKELGYEPGDNALMELFGRFKDLADKKKEIFEEDLIALAEDRSASYDEHIKFVSLEVNAGSIERPEANLKIEMNDKIKSAKINGNGPVDATFNAIKKLTSTDFKLKLYQVNAITAGTDAQGEVTVRLEDDDLSSQAKGSDPDIIVASAKAYINALNRLIFKKSKSIKENSSNLQIQGV

SEQ ID NO: 116235 - protein, 338 aa, Unknown
  Bacterial polypetide isolated from the Sargasso Sea
KVPNIDKAILSTHCHNDLGLAVANSLAGVQAGARQIECTINGLGERAGNAALEEVVMAMKTRPDLMPYETGIETTLLSKASKIVSNATGFPVQYNKAIVGKNAFAHEAGIHQDGMLKNRQTYEIMTPESVGVKQTSLVMGKHSGRHAFKDKLTSLGYPDLTDDVVDNAFAKFKILADKKKHVYDEDIIALIDDSLITDNKVSAVNLKSLKVFAGTGEPQRAEMTLDVFGEVKKASETGDGPVDAIFKCIKKLYPHEVNLQLYQVHAVTEGTDAQATVSVKIEENGKTTVGQAADTDTLVASANAYINSLNKMIIKRDKTAPGTNIENQNFENQKMKGI

SEQ ID NO: 116236 - protein, 188 aa, Unknown
  Bacterial polypetide isolated from the Sargasso Sea
MTDKNRVYIFDTTMRDGEQSPGASMSLEEKLQIARVFDDLGVDIIEAGFPIASPGDFEATTEVSKILKKSIPAGLSRHSKKDIDRCYEALKHAPRFRIHTFISTSPLHMKHKLNMSADQVYDSIKEHVTYARNYTDDVEWSCEDGTRTDMDFMCKTVELAIKSGAKTINIPDTVGYTVPSEFTKIYSN

SEQ ID NO: 116237 - protein, 389 aa, Unknown
  Bacterial polypetide isolated from the Sargasso Sea
AVVEAGATTLNIPDTVGICLPEEFGQLIAGIKANVKGIEGAVISTHCQNDLGLSTANSLAGVANGARQVECTINGIGERAGNASLEEVAMSIYMRGQSRLMGAYTGINPVHIYPISQMVKTYSGMAIQPHKAIVGANAFAHESGIHQDGMLKNKLTYEIIAPEQIGYFRGEDDCGVVMGKHSGRHALSSKLNQLGIPLEGAQLDDVFNRFKLVAETKLGGVNDDELLAIVRDGESVQDPAWSLETVQVVCGTTGLPTATVRMQSADGTTHVSAVVGTGPVDAAFKAIDAVVGLDVVLTEYRVTAVTKGINSLAETTINIKPREGAEQKLGSDVFKTNLQTGETAVRSFTATGADTDIVVSSARAYVIALNRIVEYVTKSYIHEEAVVSR

SEQ ID NO: 116238 - protein, 270 aa, Unknown
  Bacterial polypetide isolated from the Sargasso Sea
MAKDPGRVLIFDTTLRDGEQSPGASLNLEEKLAIAQQLARLGVDVIEAGFPFASAGDFAAVQRIAQQVGGENGPIICGLARASQKDIKACAEAVAPAPRRRIHTFIATSDIHLEHKLRKSRSEVLEIVPEMVSYARSLVDDIEFSCEDAGRSDPEFLYEVIEAAIAAGATTINIPDTVGYTTPSEFGDLIAGINRHVPNIGEAVLSVHGHNDLGLAVANFLEAVKNGARQLECTINGIGERAGNASLEELVMALHVRRRYFNPFFDRDQD

SEQ ID NO: 116239 - protein, 376 aa, Unknown
  Bacterial polypetide isolated from the Sargasso Sea
TINIPDTVGFTTPSEFGNLIADINKNVPNIDEAVISVHGHNDLGLAVANFLEAVKNGARQLECTINGIGERAGNASLEELVMALHVRKSFFNSFFKRNPDSPTPLTAIRTEEITKTSRLVSNLTGMTVQPNKAIVGANAFAHESGIHQDGVLKNRLTYEIIDAKTVGLSDNKISLGKLSGRSAVRARLEEMGYDLSREDLNDAFARFKDLADRKREITDRDLEAIVSEQVQLPEAKFQLSLVQVSCGNASKPTATISLLNTEDNSEDTAVSIGTGPVDAVCEALNKLAKVPNELIEFSVKSVTEGIDALGEVTIRIRRDNKIYSGHSADTDVVVAAANAYVNALNRLVFSEKKNSIHPQFDSLENSDSKFLSNTTN

SEQ ID NO: 116240 - protein, 440 aa, Unknown
  Bacterial polypetide isolated from the Sargasso Sea
EAVSEISKIMKNSIPCGLSRALKKDIDACHESLKHAPRFRIHTFISTSPLHMKHKLEMTNEQVLDAIKESVTYARNFTDDVEWSCEDGTRTDMDFMCKTVELAINCGAKTINIPDTVGYSIPEEFAKTIKHLKNNVPNIDKAILSAHCHNDLGLAVANALAGVSEGVRQIECTINGIGERAGNAALEEVVMAIKTRNDLMPYNTGIKTELISKASKIVSNATGFPVQFNKAIVGKNAFAHESGIHQDGMLKNRETYEIMTPESVGVKKTSLVMGKHSGRHAFKDKLSDLGYSDLTDDIIQAAFGKFKVLADKKKHIYDEDIVALVDDSLIVDNKINAINLKSLKVFAGTGEPQKAEMTLDVYGDIKNTTEAGDGPVDAIFKCIKKLFPHDVKLSLYQVHAVTEGTDAQATVSVKIEENDRTTVGQSADTDTLVASANAYL

SEQ ID NO: 116241 - protein, 519 aa, Unknown
  Bacterial polypetide isolated from the Sargasso Sea
MTDKNRIIIFDTTMRDGEQSPGASMSLEEKLQISRVFDELGVDIIEAGFPIASPGDFEAVTEISKTLKRSIPAGLARATKKDIDACHQALKHAKNFRIHTFISTSPLHMKHKLNKSPEEVLESIKESVTYARKFTDDVEWSCEDGTRTDMDYMCKTVEIAIKSGAKTINIPDTVGYTVPSEFKKIIETLINKVPNIDKAILSTHCHNDLGLAVANSLAGVMAGARQIECTINGIGERAGNAALEEVVMAMRTRHDLMPYTTNINTKLLSKASKVVSNATGFPVQFNKAIVGKNAFAHESGIHQDGMLKNRNTYEIMTPESVGVKKTSLVMGKHSGRHAFRDKLSDMGYVDVTDDIINTAFGKFKILADKKKHIYDEDIAALVDDSLVTEDNVIKLKSLKVYAGTGEPQKAEMTLEVFGEVKTASETGDGPVDAIFKCIKKLYAHDVKLLLYNVHAVTEGTDAQATVSVRIEEKGKTTVGQAADTDTLVASANAYLNALNKLIIKRKKTAPDDENLSVQI

SEQ ID NO: 116242 - protein, 430 aa, Unknown
  Bacterial polypetide isolated from the Sargasso Sea
IIHFYNSTSTLQRKVVFNQNKDGVKKIATDAAELIKKLALENSDTEWTFEYSPESFTGTELDYAREVCDDVVEILKPVSKNKIIINLPATVEMSTPNIYGDQIEWMNKNLKNRNDICLSLHPHNDRGTAVAASEFGIMAGADRVEGTLFGNGERTGNVDIVTIALNMLTQGVEPNLDFSNINSVMREVEYCNQLPVHPRHPYAGDLVFTAFSGSHQDAIKKGFQAIKKSNDPKWEVPYLPIDPADLGRNYEAVVRINSQSGKGGVAFLLEKDHGVSLPRRLQISLSQRIQKLADDTGKEISSSQIWDIFEKKYLQPVNNYSYIKHSSSSKDDLHKLELTMNMNNEETTIQGSGNGPIDSFVNGLSEKIGVEIKVADYHQTAISSGSDAKAAAYIELEKDGKTFWGVGIHPNTTRASFDAIIVGLSKLLES

SEQ ID NO: 116243 - protein, 313 aa, Unknown
  Bacterial polypetide isolated from the Sargasso Sea
CNSLAGVQAGARQVECTINGLGERAGNAALEEIVMAIKTRPDLMPYQTGINTTLLSKASKIVSNATGFPVQYNKAIVGKNAFAHEAGIHQDGMLKNRQTYEIMTPESVGVKQTSLVMGKHSGRHAFKDKLNSLGYPDLTDDVVSNAFAKFKVLADKKKHVYDEDIIALVDDSLIVDNKVNAINLKSLKVFAGTGEPQRAEMTLDVYGEIKKASETGDGPVDAIFKCIKTLYPHDVNLQLYQVHAVTEGTDAQATVSVKIEENGKTTVGQAADTDTLVASANAYINSLNKMIIKREKTAPEQQHIYETQKMKGI

SEQ ID NO: 116244 - protein, 304 aa, Unknown
  Bacterial polypetide isolated from the Sargasso Sea
MSSKEKVFIFDTTMRDGEQSPGASMSVEEKIQISRVFDEMGVDIIEAGFPISSPGDFEAVSAISKSLKNSIPCGLSRAMKKDIDACYESLKYAPRFRIHTFISTSPVHMKHKLDMTNDQVLDAIKESVTYARKFTDDVEWSCEDGTRTDLDFMCKSVELAINCGAKTINIPDTVGYSIPEEFAKTITHLKNKVPNIDKAILSAHCHNDLGLAVANALAGLSAGVRQIECTINGIGERAGNAALEEIVMALKTRNDLMPYETGIKTELISKASKIVSNATGFPVQFNKAIVGKNAFAHESGIHQD

SEQ ID NO: 116245 - protein, 389 aa, Unknown
  Bacterial polypetide isolated from the Sargasso Sea
KAIILAKKFTDDVEFSPEDAGRSEFDFLCEVIEAAIDSGARTINIPDTVGYNMPHQFGLLINSLIKKVSNSDKAIFSVHCHNDLGLAVANSLSAVLNGARQIECTINGLGERAGNAALEEIVMTVKTRRDIFDCNTNIDSTKIMKASRLVSGITGFPVQPNKAIVGKNAFAHESGIHQDGVIKSRETYEIMRAEDIGLVSNKLVLGKHSGRNAFKQKVIDLNIYPKNTQEFDELFYRFKNLADKKHEIFDEDIIQLATNIEFKAHNISFKYMSVISETGKKPSANITLEINGEQKSAKSSGDGAVDAAYNAIEKIVNSKTELQLYSVNNITSGTDAQGEVTVRIKKDNSIYNGHGADTDIVKASVLALINALNKYIQNPNLDISKKRGV

SEQ ID NO: 116246 - protein, 203 aa, Unknown
  Bacterial polypetide isolated from the Sargasso Sea
MSDNRISLGKLSGRSAVRARLEELGYDLTREDLDEAFARFKDLADRKREITDRDLEAIVSEQVQQPEARYQLQLVQVSCGTRLKPTATVTLAEENGQEQTVSAVGTGPVDAVCRALNQLAGVPNELMEFSVKSVTEGIDAIGEVTIRLRRNGSLYSGHAADTDVVVAAAMAFINALNRLVAAQEHQPLHPQRDAVDLETRPTL

SEQ ID NO: 116247 - protein, 432 aa, Unknown
  Bacterial polypetide isolated from the Sargasso Sea
RIHTFISTSPLHMKHKLNKTPEQVYESIKEHVTYARKLTDDVEWSCEDGTRTDMDYMCKTVELAIKCGAKTINIPDTVGYTVPSEFTQIIKNLLNKVPNIDKAILSTHCHNDLGLAVANSLAGVQAGARQIECTINGIGERAGNAALEEVVMAMKTRPDLMPYETGINTKLLSKASKIVSNATGFPVQYNKAIVGKNAFAHEAGIHQDGMLKNRQTYEIMTPESVGVKQTSLVMGKHSGRHAFKDKLTSLGYVDVTDDIVENAFGKFKVLADKKKHVYDEDIIALVDDSLIIDNKVNAISLKSLKVFAGTGEPQRADMTLDVYGEVKKASETGDGPVDAIFKCIKTLYPHNVNLQLYQVHAVTEGTDAQATVSVRIEEKEKTTVGQAADTDTLVASANAYINALNKMIIKRDKTAPDNPQVTGEYDRKVRGI

SEQ ID NO: 116248 - protein, 464 aa, Unknown
  Bacterial polypetide isolated from the Sargasso Sea
ILKKSIPAGLARHSKKDIDRCYEALKHAPRFRIHTFISTSPLHMKHKLNKSPDEVYEAIKENVTYARNFTDDVEWSCEDGTRTDMDYMCKTVELAIKCGAKTINIPDTVGYTIPSEFTKIIETLLNKVPNIDKAILSTHCHNDLGLAVANSLAGVQAGARQIECTINGLGERAGNAALEEVVMAMKTRPDLMPFETGIETTLLSKASKIVSNATGFPVQYNKAIVGKNAFAHEAGIHQDGMLKNRQTYEIMTPESVGVKQTSLVMGKHSGRHAFKDKLTSLGYPDLTDDIVDNAFAKFKILADKKKHVYDEDIIALIDDSLIVDNKVSAINLKSLKVFAGTGEPQRAEMTLDVFGEIKKASETGDGPVDAIFKCIKKLYPHDVNLQLYQVHAVTEGTDAQATVSVKIEENGKTTVGQAADTDTLVASANAYINSLNKMIIKRDKTAPGESLENQNYENQKMRGI

SEQ ID NO: 116249 - protein, 217 aa, Unknown
  Bacterial polypetide isolated from the Sargasso Sea
MARDPGRVLIFDTTLRDGEQSPGASLNLDEKLAIAQQLARLRVDIIEAGFPFASPGDFNAVQTIARQVGRPDGPVICGLARATRGDIKACADAVAPAARQRIHTFLATSDIHLEHKLRKSRAEVLQIVPEMVAYARSLVEDIEFSCEDAGRSDPEFMYEVIEAAIAAGATTVNIPDTVGYATPAEFGALIAGIDAHVPNINQAVISVHGHNDLRAGC

SEQ ID NO: 116250 - protein, 421 aa, Unknown
  Bacterial polypetide isolated from the Sargasso Sea
MSGQDKIWIFDTTLRDGEQALRASLSHKQKIQLAHAIARLNVDVMEVGFPVSSPGDFESVQSIATQVKGPIICGLARAVSADIEACGQALANAERRRIHTFIATSPLHLQYKLRRTLEQATEQAVAAIQLARRYTDDVEFSCEDAGRTPIDDLCRIVEAAIKAGARTINIPDTVGYTIPNEFARIITDLRHKVPNIDQAILSVHCHNDLGLAVANSISAVQAGARQIECTVNGIGERAGNCSLEEVAMIIKTRPDVLPFYTDIKSTEIYRSSHLVSQICHMPIQPNKAIVGENAFAHSSGIHQDGVLKAQNTYEIMSPEQVGIRQNELNLTSRSGRAVIQHRLSEMGYTQEDYNLDDIYKAFVTLADQKGRVFDYDLEALVFFQNLQDTNEPYKLEFLSSSTHTGHVASATVGISINGETR

SEQ ID NO: 116251 - protein, 341 aa, Unknown
  Bacterial polypetide isolated from the Sargasso Sea
MSFDHRKYQPFPVIDKPDRRWPSQRIEKAPLWAAVDLRDGNQALIKPMSVAQKRRFFQMLVELGFKEIEVGFPSASQIDYDFCRALIEEDLVPDDVHIQVLTQAREDLIARTFESLKGARNAIVHIYNATSPTFREQVFNVDKAGCKAIAVRAAEWVRDCAAQQPETHWSFQYSPETFSATETDFAIEVIDAVNAVWRPDQGQRVIINLPATVEVSTPNVFADQVELVHDNIHHREHVIISVHTHDDRGCGVAAAELAVMAGADRVEGTLLGNGERTGNMDLVTAGMNLYSQGIDPEIDFSRMKDIVALVEEITDIQTHPRHPYAGDLVFSAFSGSHQDAI

SEQ ID NO: 116252 - protein, 202 aa, Unknown
  Bacterial polypetide isolated from the Sargasso Sea
MNKENNYIKIFDTTLRDGEQSPGASMNIEEKLKIAEALEDLKVDIIEAGFPAASKGDYEAVSEISKKIKNSSICALSRASKNDIQTAADALKNATAPRIHTFISTSELHMKHKLQLNSDEVYQKVIDSVSFARNLCDDVEWSCEDGTRTDLDFMCKTVEAAIKNGASTINIPDTVGYSIPDEFTNIINHLMNNVTNIDKVTI

SEQ ID NO: 116253 - protein, 468 aa, Unknown
  Bacterial polypetide isolated from the Sargasso Sea
FEAVTAISKIVKNSVPCGLSRALKKDIDACHESLQYAKRFRIHTFISTSPVHMKHKLDMSKDQVLEAIKESVSYARKFTDDVEWSCEDGTRTDLDFMCKTIELAINCGASTINIPDTVGYSIPEEFAKTITHIKNSVPNIDKAIISAHCHNDLGLAVANALAGLSAGVRQIECTINGIGERAGNAALEEIVMAIKTRNDLMPYETGIKTELISKASKIVSNATGFPVQFNKAIVGKNAFAHESGIHQDGMLKNRETYEIMTPESVGVKKTSLVMGKHSGRHAFKDKLSDLGYADVTDDVIQNAFGKFKILADKKKHIYDEDIVALVDDSLIFDNKLNAINLKSLKVFAGTGEPQRAEMTLDVFGEIKSTVQTGDGPVDATFKCIKELYPHEMKLLLYQVHAVTEGTDAQATVSVKIEENNRTTVGQSADTDTLVASANAYLGALNKMLIKREKKAPSQQIKHQKVRGI

SEQ ID NO: 116254 - protein, 316 aa, Unknown
  Bacterial polypetide isolated from the Sargasso Sea
LGLAVANSLAGVQAGARQIECTINGLGERAGNAALEEVVMAIKTRPDLMPYDTGINTTLLSKASKIVSNATGFPVQYNKAIVGKNAFAHEAGIHQDGMLKNRQTYEIMTPESVGVKQTSLVMGKHSGRHAFKDKLNSLGYPDLTDDVVSNAFAKFKVLADKKKHVYDEDIIALIDDSLIIDNKVNAINLKSLKVFAGTGEPQKAEMTLDVFGDVKKTSETGDGPVDAIFKCIKKLYPHDVNLQLYQVHAVTEGTDAQATVSVKIEENGKTTVGQAADTDTLVASANAYINSLNKMIIKRDKTAPEEQFENKQMKGI

SEQ ID NO: 116255 - protein, 553 aa, Unknown
  Bacterial polypetide isolated from the Sargasso Sea
MSEFDPKHKYTPFQRINLKDRKWPNQIINNAPTWCSVDLRDGNQSLIEPMDTPKKLKLFKTLVSMGFKEIEIGFPAASETDYNFCRHLIENKLIPNDVTIQVLTQAREHLIDNTFEALTGCNSAIVHLYNSVSTLQRRVVFKQDRIGVKNIALDGAKYILNKLDKFNEGVIKLQYSPESFTGTELDYALEVCEEVLDCWKANQNNPVIINLPATVEMSTPNIYADQIEWMSKNFSNRDRVILSLHPHNDRGTGVAATELALMAGADRVEGTLFGNGERTGNVDIVTLGLNMFTQGVDPKLDFKDLNKLIETAEFCTQLPVHQRHPYAGSLVHTAFSGSHQDAIRKGMEAISKSNQEKWEVPYLPIDPSDIGKTYEAIIRVNSQSGKAGSAWLLEQDHNIFLPRGAQIQFSQTVQKLADSSGKEITSQIIWDIFEKEYLFEGKYKLVNFSSKKLSRNNSKELVEATISYNNEDIDISASGNGPISAFVTAMREKFNLIFRLSDFSQNTRSSGSTAEAAAYVEIRVPDENGRSVFGVGNDTSITLAPIKAVISAI

SEQ ID NO: 116256 - protein, 317 aa, Unknown
  Bacterial polypetide isolated from the Sargasso Sea
LGLAVANALSGLSAGVRQIECTINGIGERAGNAALEEIVMAIKTRDDLLPYQTGIKTELISKASKIVSNATGFPVQFNKAIVGKNAFAHESGIHQDGMLKNRETYEIMTPESVGVKKTSLVMGKHSGRHAFKDKLSDLGYTDVTDDVVQAAFGKFKILADKKKHIYDEDIVALVDDSLIIDNKINAINLKSLKVFAGTGEPQRADMTLDVFGDIKKTTQTGDGPVDAIFKCIKELYPHDVKLSLYQVHAVTEGTDAQATVSVKIEENDRTTVGQSADTDTLVASANAYLNALNKMLIKREKKSLYKNIEHQKIKGGV

SEQ ID NO: 116257 - protein, 511 aa, Unknown
  Bacterial polypetide isolated from the Sargasso Sea
MKESREIIIFDTTLRDGEQAPGCSMTMGEKLKIAHALKELNVDVIEAGFAAASPGDFDAVNAIASEIDGPTICSLARCNESDIEKAYEALKVNKNRRVHVFVATSEIHLKHKLNMAKDEVLKAAYEGVKMAKSFCENVEFSPEDASRTDHGFLTEVVNAAIEAGATTINVPDTVGYTIPYEFGELFKHLISNCNDAENVIFSVHCHDDLGLSVANSLAAVESGARQIECTINGIGERAGNTSLEEVCMAIRTREEYFDFKTSIDSTKLYPTSRLVSSITGMHVPRNKAIVGDNAFAHEAGIHQHGMLRDSSTYEIMKPQDVGIARSNLVLGKHSGRHAFLDRIDELGFALEKDEIDPAFQEFKKLADRKKEIFDTDIEAIVLNADIANMSRWTLMDLETTSGSSWGSTASLKLKDSGEEIIERDNNSNPASGPIEAVFNIISDITGYKLELTNFEIHSVSVGDDAQGEVTVTVSYNGQNYRGHGISTDIIESGALAYLEVINRIERNQAKH

SEQ ID NO: 116258 - protein, 432 aa, Unknown
  Bacterial polypetide isolated from the Sargasso Sea
MYISSTKNIYMAEKDKVFIFDTTMRDGEQSPGASMSVEEKIQISRVFDEMGIDIIEAGFPISSPGDFEAVSAISKSVKNSIPCGLARATKKDIDACHESLKFAKRFRIHTFISTSPVHMKHKLNMTDEQVLGAIKESVTYAKKFTDDVEWSCEDGTRTNLEFMYKTIELAIKCGATTINIPDTVGYSIPEEFAKTITSIKNNVPNIDKAILSAHCHNDLGLAVANALSGLSAGVRQIECTINGIGERAGNAALEEIVMAIKTRDDLLPYETGIKTELISKASKIVSNATGFPVQFNKAIVGKNAFAHESGIHQDGMLKNRETYEIMTPESVGVKKTSLVMGKHSGRHAFKDKLSDLGYADVTDDVVQAAFGKFKILADKKKHIYDEDIVALVDDSLIIDNKINAINLKSLKVFAGTGEPQRADMTLDVFGEV

SEQ ID NO: 116259 - protein, 523 aa, Unknown
  Bacterial polypetide isolated from the Sargasso Sea
MSNKDRVFIFDTTMRDGEQSPGASMSLEEKIQIARVFDELGIDIIEAGFPIASPGDFEAVSEVSKILKNSIPAGLSRHSVKDIDRAYEALKHAPRFRIHTFISTSPLHMKHKLNMSPEDVYESIGKHVAYARKFTDDVEWSCEDGTRTDMDYMCKTVELAIKNGATTINIPDTVGYTIPSEFTTIIETLLNKVPNIDKAILSTHCHNDLGLAVANSLAGVQAGARQIECTINGLGERAGNAALEEVVMAIKTRPDLMPYETGINTTLLSKASKIVSNATGFPVQYNKAIVGKNAFAHEAGIHQDGMLKNRQTYEIMTPESVGVKQTSLVMGKHSGRHAFKDKLNSLGYPDLTDDVVGNAFAKFKVLADKKKHVYDEDIIALVDDSLIVDNKVNAITLKSLKVFAGTGEPQKAEMTLDVYGDVKNATETGDGPVDAIFKCIKTLYPHDVNLQLYQVHAVTEGTDAQATVSVKIEEKGKTTVGQAADTDTLVASANAYINALNKMIIKRDKTAPMEQESQKVRGI

SEQ ID NO: 116260 - protein, 310 aa, Unknown
  Bacterial polypetide isolated from the Sargasso Sea
NSLAGIQAGARQIECTINGIGERAGNAALEEVVMAIRTRNDLMPYETGINTTLLSKASKLVSNVTGFPVQYNKAIVGKNAFAHESGIHQDGMLKNRNTYEIMTPESVGVKQTSLVMGKHSGRHAFKDKLISLGYADLTDDVIENAFGKFKVLADKKKHIYDEDIIALVDDSLVTDNKANIIVLKSLKVFAGTGEPQRAEMTLDVSGQIKSASETGDGPVDAIFKCIKNLYPHDVNLQLYQVHAVTEGTDAQATVSVRIEENGKTTVGQAADTDTLVASANAYIAALNKMIFKREKTAPEMDHEKEKMRGI

SEQ ID NO: 116261 - protein, 255 aa, Unknown
  Bacterial polypetide isolated from the Sargasso Sea
IVSNATGFPVQYNKAIVGKNAFAHESGIHQDGMLKNRQTYEIMTPESVGVKQTSLVMGKHSGRHAFKDKLTSLGYVDVTDDIVENAFGKFKILADKKKHVYDEDIIALVDDSLIVDNKLNAINLKSLKVFAGTGEPQRADMTLDVFGEVKKATETGDGPVDAIFKCIKTLYPHDIKLQLYQVHAVTEGTDAQATVSVRIEENGKTTVGQAADTDTLVASANAYINALNKMIIKRDKTAPDSIQVTSEYDNKVRGI

SEQ ID NO: 116262 - protein, 358 aa, Unknown
  Bacterial polypetide isolated from the Sargasso Sea
QRKLKIAEKLDSLGVDIIEAGFPVSSPGDFKSVVEISKVVKNASVCGLTRAVKNDIDVAVDALKYAKKPRLHTGIGTSRSHILHKFNSTPEKILERAVEAVKYSKKFIEDVEFYAEDAGRTDNDFLALICEKVIDAGATVLNIPDTTGYCLPYEYGEKISFLVNNVKNIDKAIISCHCHNDLGLATANSIQGVISGARQIECTINGIGERAGNTSLEEVVMILKQHDELSLDTNINTKLLLETSQMVSELMGMVVQPNKAIVGANAFAHSSGIHQDGVIKKRETYEIIDPNDVGVNESSIVLTARSGRAALAYRAKNIGFDLTKIQLDKVYSQFLEFADKNKEVTDSDLPNIIQLAKI

SEQ ID NO: 116263 - protein, 422 aa, Unknown
  Bacterial polypetide isolated from the Sargasso Sea
ILFIATSPLHMKYKLKKKEEEVLEAITQTVSHARNLCENIEWSCEDGGRSELDFLYKCIELAINCGASTINIPDTVGYTLPEEFGKIFKNVKNNVPNIDKAILSTHTHNDLGLATANNVAAIKEGARQVECTINGMGERAGNSSLEEIVMTLKVKKDLMPYHTDIKTDLIMKASRLVSSITGFPVQPNKAIVGANAFAHEAGIHQDGMLKHAGTYEIMTPESIGLNKSSLVLGKHSGKHAFSEKLKELGYEPGDNALMELFGRFKDLADKKKEIFEEDLIALAEDRSASYDEHIKFVSLDVNAGSVKKHEANLKIEMDEEVKVIKDFGNGPVDATFNAIKKLTSTNFKLKLYQVNAITAGTDAQGEVTVRLEDDDLSSQAKGSDPDIIVASAKAYISALNRLLFKKTKSIVKKSAEIKIEGV

SEQ ID NO: 116264 - protein, 252 aa, Unknown
  Bacterial polypetide isolated from the Sargasso Sea
MKASRLVSSITGFPVQPNKAIVGANAFAHEAGIHQDGMLKHSGTYEIMTPESIGLNKSSLVLGKHSGKHAFSEKLKELGYEPGDNALMELFGRFKDLADKKKEIFEEDLIALAEDRSASYDEHIKFVSLEVNAGSVEKPEAKLKINMDEKIKSIKINGNGPVDATFNAIKKLTSTDFKLKLYQVNAITAGTDAQGEVTVRLEDEDLSSQAKGSDPDIIVASAKAYINALNRLIFKKSKSIKENSSNLQIRGV

SEQ ID NO: 116265 - protein, 228 aa, Unknown
  Bacterial polypetide isolated from the Sargasso Sea
NKAIVGANAFAHESGIHQDGVLKSRETYEIMRAEDVGWNANKMVLGKHSGRNAFRSRLEELGITFENEEELNKIFSQFKELADKKHEVYDEDLQALVSDTVQGREERIKLLSLKVGSETGVMPEAEVVLKIDGQQKSANAKGGGPVDATYKAIEEMVKSGCNLQLYSVNNITDGTDSQGEVTVRIDKEGRIVNGLGADTDIVIASAKAYINALNKVLDKRQREHPQQI

SEQ ID NO: 116266 - protein, 489 aa, Unknown
  Bacterial polypetide isolated from the Sargasso Sea
MDNPIDKYSPFVPIDLKNRKWPGKTIKQSPIWCSVDLRDGNQALIEPMGSERKNRMFDLLCKLGFKEIEVGFPSASQTDFDFVRDLIENKKIPSDVSIQVLTQAREELIHKTFESLKGASKGIIHFYNSTSTLQREVVFNQDKGGIKKIATNAAMLIKSLAKKNTDTDWSFEYSPESFTGTELEYAREVCDEVVEILKPATKHKIIINLPATVEMSTPNIYGDQIEWMNDNLKNRQDICLSLHPHNDRGTAVAASEFGLMAGADRIEGTLFGNGERTGNVDVVTIALNMLTQGVDPKLDFSNINSVMREVEYCNQLPVHPRHPYAGDLVFTAFSGSHQDAIKKGFNAIKKSNNPKWEVPYLPIDPADLGRNYEAVVRINSQSGKGGVAFLLEKDHGVSLPRRLQISMSQKIQKLADETGREIVSSQLWEVFEKNYLVPINNFSYIKHTSSTKEDIHNLDLTLQMNDDQIIINETGNGPIDSFINGLKAS

SEQ ID NO: 116267 - protein, 188 aa, Unknown
  Bacterial polypetide isolated from the Sargasso Sea
MTEKIYIFDTTLRDGEQSPGASMNLEEKIQIAEVLADLKVDIIEAGFPIASNGDFEAVSEISKNIKGPTIAGLARAKLGDIERAWEAVKFSDSPRIHTFIATSPIHMKYKLMKSENEVLEAIKQTVTFARNLCPNIEWSCEDGGRSNLDFLYKCIELAIKCGATTINIPDTVGYTLPTEFGSIFKSVK

SEQ ID NO: 116268 - protein, 113 aa, Unknown
  Bacterial polypetide isolated from the Sargasso Sea
MNKENNYIKIFDTTLRDGEQSPGASMNIEEKLKIAEALEDLKVDIIEAGFPAASKGDYEAVSEISKKIKNSSICALSRASKNDIQTAADALKNATAPRIHTFISTSELHMKHK

SEQ ID NO: 116269 - protein, 278 aa, Unknown
  Bacterial polypetide isolated from the Sargasso Sea
MKDSREIIIFDTTLRDGEQAPGCSMTIGEKLKIAHALKELNVDVIEAGFAAASPGDYEAVNAIASEIDGPTICSLARCNESDIEKAYEALKVNKNRRIHVFVATSEIHLKHKLNMAKDEVLKAAYEGVKMAKSFCDNVEFSPEDASRTDHGFLTEVVNAAIEAGATTINVPDTVGYTIPYEFGELFKHLISNCTHAENVVFSVHCHDDLGLSVANSLAAVESGARQIECTINGIGERAGNTSLEEVCMAIRTREEYFDFKTSIDSNKIIPNKQDWFPL

SEQ ID NO: 116270 - protein, 248 aa, Unknown
  Bacterial polypetide isolated from the Sargasso Sea
ISIINNRVFLVQPNKAIVGANAFAHEAGIHQDGMLKHAGTYEIMTPESIGLNKSSLVLGKHSGKHAFSEKLKELGYEPGDNALMELFGRFKDLADKKKEIFEEDLIALAEDRSASYDEHIKFVSLEVNAGSVEKPEAKLKIDMEGKIKSIKINGNGPVDATFNAIKNLTSSNFKLKLYQVNAITAGTDAQGEVTVRLEDDDLSSQAKGSDPDIIVASAKAYINALNRLIFKKSKSIKENSSNLQIRGV

SEQ ID NO: 116271 - protein, 349 aa, Unknown
  Bacterial polypetide isolated from the Sargasso Sea
SIPEEFAKTITHIKNNVPNIDKAIISAHCHNDLGLAVANALAGLSAGVRQIECTINGIGERAGNAALEEIVMAIKTRNDLMPYDTGIKTELISKASKIVSNATGFPVQFNKAIVGKNAFSHESGIHQDGMLKNRETYEIMSPESVGVKQTSLVMGKHSGRHAFKDKLTDLGYTDMTDDVIQEAFGKFKVLADKKKHIYDEDIIALVDESLIVDNKINAINLKSLKVYAGTGEPQRAEMTLDVFGDIKQTTQTGDGPVDAIFKCIKKLYEHEVKLSLYQVHAVTEGTDAQATVSVKIEENDRTTVGQSADTDTLVASAKAYLNALNKMLIKREKKSLTGNIEHQKVKGGV

SEQ ID NO: 116272 - protein, 269 aa, Unknown
  Bacterial polypetide isolated from the Sargasso Sea
LPYETGIKTELISKASKIVSNATGFPVQFNKAIVGKNAFAHESGIHQDGMLKNRETYEIMTPESVGVKKTSLVMGKHSGRHAFKDKLNDLGYTDVTDDVVQAAFGKFKILADKKKHVYDEDIVALVDDSLIIDNKINAINLKSLKVFAGTGEPQRADMTLDVFGDIKKTSQTGDGPVDAIFKCIKELYPHDVKLSLYQVHAVTEGTDAQATVSVKIEENDRTTVGQSADTDTLVASANAYLNALNKMLIKREKKSLYKNLEPKKVKGVF

SEQ ID NO: 116273 - protein, 311 aa, Unknown
  Bacterial polypetide isolated from the Sargasso Sea
CNALAGLSAGVRQIECTINGIGERAGNAALEEIVMAIKTRNDLMPYETGIKTELISKASKIVSNATGFPVQFNKAIVGKNAFAHESGIHQDGMLKNRETYEIMTPESVGVKKTSLVMGKHSGRHAFKDKLSDLGYSELTDDVVQAAFGKFKVLADKKKHVYDEDIIALVDDSLIIDNKINAINLKSLKVFAGTGEPQKAEMTLDVFGEIKKTSQTGDGPVDATFKCIKALYPHDMKLLLYQVHAVTEGTDAQATVSVKIEENDRSTVGQSADTDTLVASANAYLNALNKMLIKREKKAMNESIKHQKVKGI

SEQ ID NO: 116274 - protein, 499 aa, Unknown
  Bacterial polypetide isolated from the Sargasso Sea
QITTTPIWCSVDLRDGNQALIEPMGEERKLRMFKLLLDIGFKEIEVGFPSASQTDFDFVRKIINDGLIPDDVTIQVLTQSRKELIDRTFESLKGAKNAIVHFYNSTSTIQRRVVFKGNKEEIKKIATDGANWVMENAEKNSDTNWRFEYSPESFTGTELEYAAEVCNEVNQILKPTSDRKTIINLPATVELASPNVYADQIEWMSRNIDNREDVVISLHPHNDRGSAVAATELGVLAGADRIEGTLFGNGERTGNVDIVSLALNMLTQGVDPHLDFSDINPIMREVEYCNQLPVHPRHPYAGDLVFTAFSGSHQDAINKGFNAMRSSNSPLWEVPYLPIDPADVGRTYEAVIRINSQSGKGGIAYLLEKDHGLSMPRRLQVEFSQVIQRITDETGKEISPSDIWETFQKTYLNTNGNYEFIEHSIESIKEEDLLKAKLKINGQEIEIEGKGNGPIDAFTNALQSQNIDIKIQDYHQHAISSGSDAKAVAYIEIKSGDSY

SEQ ID NO: 116275 - protein, 398 aa, Unknown
  Bacterial polypetide isolated from the Sargasso Sea
IFDTTMRDGEQSPGASMSVEEKIQISRVFDEMGIDIIEAGFPISSPGDFEAVSAISRGIKNSIPCGLARAMKKDIDACHESLKYAKRFRIHTFISTSPVHMKHKLNMTDDQVIDAIKESVTYARKFTDDVEWSCEDGTRTNLDFMCKTIELAIKCGAKTINIPDTVGYSIPEEFARTITHIKNNVPNIDKAIISAHCHNDLGLAVANALAGLSAGVRQIECTINGIGERAGNAALEEIVMAIKTRNDLMPYETGIKTELISKASKIVSNATGFPVQFNKAIVGKNAFAHESGIHQDGMLKNRETYEIMTPESVGVKKTSLVMGKHSGRHAFKDKLNDLGYTDVTDDVIQAAFGKFKILADKKKHIYDEDIVALVDDSLIIDNKINAINLKSLKVFAGT

SEQ ID NO: 116276 - protein, 240 aa, Unknown
  Bacterial polypetide isolated from the Sargasso Sea
PVQFNKAIVGKNAFAHESGIHQDGMLKNRNTYEIMTPESVGVKKTSLVMGKHSGRHAFKDKLSDLGYAGVTDDVIQTAFGKFKILADKKKHVYDEDIIALVDDSLIKESNVINLKSLKVFAGTGEPQKAEMTLEVYGELKKANETGDGPVDAIFKCIKKLYPHDVKLQLYQVHAVTEGTDAQATVSVRIEEKGKTTVGQAADTDTLVASANAYLNALNKMIIKREKTAPEEFEQERMKGI

SEQ ID NO: 116277 - protein, 295 aa, Unknown
  Bacterial polypetide isolated from the Sargasso Sea
GADRIEGTLFGNGERTGNVDLVTLALNMLTQGVDPELDFSNINPIMRETEYCNQLPVHPRHPYAGDLVFTAFSGSHQDAIKKGLNELRNSNQETWEVPYLPIDPKDVGRSYEAVIRINSQSGKGGVAYLLEKDHGLSMPRRLQIEFSQVIQKITDETGKEISASDIWETFQQTYFHEDGKFKFIEHHINSRANKDGLQEDAIEIKIKEEDKTKVINGIGNGPIDAMIDALSKDLDLEIKIADYHQHAISSGSDAKAVAYSEISYKNQSVWGVGIHQNTVIAGLGSVINGLNRLSI

SEQ ID NO: 116278 - protein, 516 aa, Unknown
  Bacterial polypetide isolated from the Sargasso Sea
MYYRFSKNLVMSNKDRVFIFDTTMRDGEQSPGASMSLEEKIQIARVFDELGIDIIEAGFPIASPGDFEAVSEVSKILKNSIPAGLSRHSVKDIDRAYEALKHSPRFRIHTFISTSPLHMKHKLNMSPEDVYESIGKHVAYARKFTDDVEWSCEDGTRTDMDYMCKTVELAIKNGATTINIPDTVGYTIPSEFTTIIETLLNKVPNIDKAILSTHCHNDLGLAVANSLAGVQAGARQIECTINGLGERAGNAALEEVVMAIKTRPDLMPYETGINTKLLSKASKIVSNATGFPVQYNKAIVGKNAFAHEAGIHQDGMLKNRQTYEIMTPESVGVKQTSLVMGKHSGRHAFKDKLNSLGYPDLTDDVVGNAFAKFKVLADKKKHVYDEDIIALIDDSLIIDNKVNAITLKSLKVFAGTGEPQKAEMTLDVYGDVKNATETGDGPVDAIFKCIKTLYPHDVNLQLYQVHAVTEGTDAQATVSVKIEEKGKTTVGQAADTDTLVASANAYINALNKMIIK

SEQ ID NO: 116279 - protein, 194 aa, Unknown
  Bacterial polypetide isolated from the Sargasso Sea
MYYRFSKILVMSGKDRVFIFDTTMRDGEQSPGASMSLEEKIQIARVFDELGIDIIEAGFPIASPGDFEAVSEVSKILKNSIPAGLSRHSVKDIDRAYEALKHAPRFRIHTFISTSPLHMKHKLNMSPEDVYESIGKHVAYARKFTDDVEWSCEDGTRTDMDYMCKTVELAIKNGATTINIPDTVGYTIPSEFTT

SEQ ID NO: 116280 - protein, 110 aa, Unknown
  Bacterial polypetide isolated from the Sargasso Sea
MVVQKVPDISNTFLMEDRATLRISSQHIANWLHHGITTKIQVMEIMKQMAKIVDKQNKGDRKYVKMSDDFDNSIAFKAACDLIFKGKEQPSGYTEPLLHLNRLEKKASQN

SEQ ID NO: 116281 - protein, 272 aa, Unknown
  Bacterial polypetide isolated from the Sargasso Sea
MENYIKRGSLNIHNALDRFLSDEMLSGLDLTSDEFWKKFEGLLEEFHQRNKDLLAKRSLLQDQISTWHKNNDFNINEYKKFLQEIGYLEEVPEDFTITTRNTDPEISNIPGPQLVVPIMNARFALNATNARWGSLYDALYGTDVISEDGGASKEGAYNEIRGNKVIDFSKQFLDDCFPITDLSYKDITNISIKDQRLLFHAEQNKITYLKNENQFKGFNGSPENPSEVLLVNNNLHLEIQIDPNHPVGKTDKANIKDIVLESAVSTIQDCED

SEQ ID NO: 116282 - protein, 195 aa, Unknown
  Bacterial polypetide isolated from the Sargasso Sea
MENYIKRGSLNIHNALDRFLNDEVLSELDITSDEFWAKFEGLLDEFHQRNKDLLAKRSLLQDQISTWHKNNDFNLSEYKKFLEEIGYLEEVPEDFTIKTRNTDPEISSIPGPQLVVPIMNARFALNATNARWGSLYDALYGTDVISEDGGASKEGAYNEIRGNKVIDFSKQFLDDCFPITDLNYKDITNISIKDQ

SEQ ID NO: 116283 - protein, 319 aa, Unknown
  Bacterial polypetide isolated from the Sargasso Sea
AVTKDNIMTTSISRAGLSINAPLTAEYDAILTEQACALLVELTREFRPALKQLLAKRQQVQQRYDAGELPDFLADTANIRRSDWRVAAIPADLQDRRVEITGPVDRKMIINALNADVKVFMADFEDSQAPSWAGVIEGQINLRDANLGTISYTDPQNGKQYALKDDPALLIARVRGLHLWEKHLLVDGEQIPGGLMDFALYFLHNYQTRLNNGTGVYYYVPKLQSHLEAKWWDDVFRYTELKFAQPVGTVRATVLIETLPAVFEMDEILYMLRDHIVALNCGRWDYIFSYIKTLKNHADRVLPDRQVVTMKQPFLNAYS

SEQ ID NO: 116284 - protein, 273 aa, Unknown
  Bacterial polypetide isolated from the Sargasso Sea
SRCSTSARTATRENAKLRLDNGIGTYFYIPKLENSKESQLWDDIFSFSEDELDLPRGTIRATVLLETISASFEIEEMLYSLKEHSLGMNAGRWDYIFSAIKKHRDLEEINFPDRSQITMTVPFMKAYTELLVQSCHKRGAHAIGGMSAFIPNRRDTDVTEKALENVKKDKEREVSMGFDGSWVAHPDLVKVCKDVFQNSLGTKENQIDYVPNEPIISEEMLQDFNIPNSTITEEGIRTNIRVGILYIQSWLLGQGAAALFNLMEDAATAEISR

SEQ ID NO: 116285 - protein, 162 aa, Unknown
  Bacterial polypetide isolated from the Sargasso Sea
MPTNYKNVNNLKISEELLSFVNNELLKGLEISPEKFWSGFDNAVHELAPKNKELIQIREDLQKKIDDWHIKNKGNEINIEEYKKFLKEIGYLKDEGPDFKIETKNVDDEISKIAGPQLVVPIMNARYALNAANARWVSLYDSLYGTDIIESEEGGSERYDPN

SEQ ID NO: 116286 - protein, 109 aa, Unknown
  Bacterial polypetide isolated from the Sargasso Sea
MGCSKVPDINNIGLMEDRATCRISSQALANWLKHEIISEKQVINALIKMSKIVDNQNVNDPNYKSMSENFDSLSFKAAKELIFDGTEQPSGYTEPILHEKRLEYKKNNN

SEQ ID NO: 116287 - protein, 81 aa, Unknown
  Bacterial polypetide isolated from the Sargasso Sea
YGLKKYSIHFGIMDEERRTTVNLKECIRKVKNRVVFINTGFLDRTGDEMHTSFEAGPMIFKGEMKKSTWLNTYENWNVDTG

SEQ ID NO: 116288 - protein, 186 aa, Unknown
  Bacterial polypetide isolated from the Sargasso Sea
MREQYIKIHNLSVAKELADFVKNELLLDTDVGPDEFWKGFDKVVHELAPKNKKLLEIRETLQQEIDLWHKKNRDHEIDYNKYKKFLEEIGYLKKEGEDFKITTKNLDVEISNIAGPQLVVPIMNSRYSLNAANARWVSLYDSLYGSNIIESEESGSEKYDPLRGQEVIKYTRNFLNKYFPINDLDW

SEQ ID NO: 116289 - protein, 109 aa, Unknown
  Bacterial polypetide isolated from the Sargasso Sea
GCSIAGMNISAKLVNSRHNSIYIVKPKLHGPEECAFFNSLLDDVESMFNLPNHTIKVGLMDEERRTSCNLKKCIYELKDIIVFLNTGFLDRTGDEIHTNMKLGPVNYKK

SEQ ID NO: 116290 - protein, 125 aa, Unknown
  Bacterial polypetide isolated from the Sargasso Sea
ACTMQQLTDALHVYREHGDERGLRRIICPIERLLIHLPKVIVKDGAAAALSHGATLARPGIVKASAGTKAGSTVLIETLKGEAVSIAELTVDSDALPEIDSGEIAIPKSVLMSPGTYPQTWIKSN

SEQ ID NO: 116291 - protein, 212 aa, Unknown
  Bacterial polypetide isolated from the Sargasso Sea
MTNRMEKNGLNVAKELVDFTEQVLLPDSGIEPRDFWFGLAKIINDLAPQNKELLLKREAIQAKIDAWHLERKGQEHDKSAYKSFLMEIGYLVPEGEAFQIETAGVDPEIASIAGAQLVVPVSNARFALNAANARWGSLYDALYGTDVIDEANGKERSGGYNPVRGAAVVDYAADMLDDALPLANGSHANVTHYAIEDGGLNTNQGGLQDASQ

SEQ ID NO: 116292 - protein, 95 aa, Unknown
  Bacterial polypetide isolated from the Sargasso Sea
ATCRISSQHIANWLHHGICSKKHVLEIMKKMATVVDNQNLKDPSMKGHSPYIPMSNDFAKSTAFKAACELVFHGKTQPSGYTEPILHLNRLLKKN

SEQ ID NO: 116293 - protein, 225 aa, Unknown
  Bacterial polypetide isolated from the Sargasso Sea
MLKNYINTENLSVSEKLYNFINTEAIPGTDISKDSFWKGLSNVSHELTPKNKKLLNVRKKLQLDIDRWHLENNEKEFNLNEYKSYLKTIGYLKKEGPDFKIKTENIDKEISSIAGPQLVVPIMNARYALNAANARWMSLYDSLYGTDVISSDESTSERYDPERGAKVIEYTKKFLDKNFILKNSKWKNVNTISIKNHKLELHTDKGVTGLADDDKYVGYRLSKEK

SEQ ID NO: 116294 - protein, 161 aa, Unknown
  Bacterial polypetide isolated from the Sargasso Sea
MKSKYVTVNNLKVSEQLLSFVNDELLVDTNITPEKFWLGFDKVVHELEPKNRELINFRESLQKKIDAWHIKKKGMKIEVEEYKKFLKEIGYLKGSGPDFKIETDNVDNEISHIAGPQLVVPVMNARYTLNAANARWVSLYDSLYGTNIIKSEEGGSERYDP

SEQ ID NO: 116295 - protein, 89 aa, Unknown
  Bacterial polypetide isolated from the Sargasso Sea
SQHIANWLHHGICSKKQVLETMKKMARIVDNQNIKDPALKGHAPYQAMSGNFDKSIAFKAACELVFHGKTQPSGYTEPILHLNRLLKKN

SEQ ID NO: 116296 - protein, 113 aa, Unknown
  Bacterial polypetide isolated from the Sargasso Sea
IGCSKVPDINDIGLMEDRATCRISSQILSNWIKHELINEEEVISIMKKMAIKVDAQNSNEIGYNPMSKDYKDSIAFNAALKLVLEGASQPSGYTEPILHDMRLKLKLLEQNSL

SEQ ID NO: 116297 - protein, 271 aa, Unknown
  Bacterial polypetide isolated from the Sargasso Sea
MTKTKIANIAIDNKLFDFVNNEVIPGIDIDKTEFWNKFSEAANELSVENSELIKKREAIQSKIDDWHRKNKNFNKRDYQKFLKEIGYIVEEGEDFRILTDNVDEEIAKIAGPQLVVPVDNARYALNAVNARWGSLYNSLYGTDAIPGEKGKADNEERKYLVINHVKEFFDKVIPISNAKWKQVSKFDIEDNKLVLKDKNLKYYLQNADQFIGFQGEKNNLRSVLFKNNNLHIDIIIDPSSPIGKIDIANISDVVIESAISTIVDNEDSVLR

SEQ ID NO: 116298 - protein, 133 aa, Unknown
  Bacterial polypetide isolated from the Sargasso Sea
MQEKYIKINNLQVSEKLSNFVNDELLKNTNVSSENFWLGLEKTLDDLVPKNKQLIKLREDLQKKIDDWHIKNKSKEFNLDEYKKFLLEIGYLKNEGPDFKIETENVDEEIASIAGPQLVVPVMNARYALNAAN

SEQ ID NO: 116299 - protein, 241 aa, Unknown
  Bacterial polypetide isolated from the Sargasso Sea
MNYVKKERLSVAEDLLKFIDNELLPGTDVEPAEFWSGFDNAVHQLAPENKKLINIRDKIQKKIDKWHLDNKEKEFDPSNYLSFLKEIGYLVNDGPDFKIETKNVDLEISTIAGPQLVVPVMNPRYALNAANARWGSFYDALYGTDIISEKDGAERQAKFNPVRAKKVINYSRNFLDEHVPLLEGSWKNITETPKVFDGILNLKLKNQKQFVGYSKNANGLCSILLKNNNLHIDIIIDPNGS

SEQ ID NO: 116300 - protein, 224 aa, Unknown
  Bacterial polypetide isolated from the Sargasso Sea
MNINYIDIGNLKVSENLVKFVNEELLVETNINPERFWSGFDRSVHELAPKNKELLEKRKDLQKKIDDWHIQNKGKEININEYKKFLKKIGYLVDTGSNFKIETNNVDDEITKIAGPQLVVPIMNARYALNAANARWVSLYDSLYGTDIIESEEGGSERYDPNRGQEVIKYVREFLDKYIPIDGTSWKNITGLKIVNGDLIILKGDYEYKLKDTHKFIGHRGDVN

SEQ ID NO: 116301 - protein, 119 aa, Unknown
  Bacterial polypetide isolated from the Sargasso Sea
MTDRTASGSLDVATVLYRFITDEAVPGTGIDAREFWTAIDALIHELAPINRELVAKRDVLQEKIDSYHKSRNGQPHNATEYKAFLEEIGYLLPEPQNVSVTTENVDPEVATTAGPQLVV

SEQ ID NO: 116302 - protein, 163 aa, Unknown
  Bacterial polypetide isolated from the Sargasso Sea
MQEKYIKINNLKVSEKLSKFVNGELLKNTNVSPENFWLGFEKTLDELAPKNRELIKFREDLQKKIDNWHIKNKGKEFNLVEYKKFLLEIGYLKNEGPDFKIETKNVDEEIANIAGPQLVVPIMNARYALNAANARWMSLYDSLYGTDVIEESEDSVSERYDPL

SEQ ID NO: 116303 - protein, 170 aa, Unknown
  Bacterial polypetide isolated from the Sargasso Sea
MKNEYLKINNLEVSIELSKFINEELLTGTNISPEKFWLGLDKSVHELAPKNEELLKKRNDLQKKINEWHIKNKGKDINIDQYKKFLKEIGYLLDEGSNFKIKTENVDDEITSIAGPQLVVPIMNARYALNAANARWVSLYDSLYGTDIIESEEGGSERYDPNRGQEVINM

SEQ ID NO: 116304 - protein, 260 aa, Unknown
  Bacterial polypetide isolated from the Sargasso Sea
MGEKYTNVQNLSVSETLYKFINDEAIPGTNINKLKFWKGFDKALHKLTSRNKELIKIREKIQIDINSWHLNNRDKTFYQKNYYNFLKKIGYLKKVGNKFKIKTKNIDDEISKIAGPQLVVPVMNARYVLNAANARWMSLYDSLYGTDVIESEDSASERYDPERGLEVRNYAKKFLDNNFTLVNDSWKNLTQITIDDKNLNLICGKNISKLKEKTKFIGYRGDKKKPTTVILKNNNLHVEIIINPNAFSAKADLAGISDII

SEQ ID NO: 116305 - protein, 119 aa, Unknown
  Bacterial polypetide isolated from the Sargasso Sea
RWIDQGVGCSKVPYINNVGLMEDRATLRISSQHIANWVHHGVTTKLQVIQIMKEMAKIVDRQNENDLNYEKMSADYDRSIAFQTACELIFKGKDQPSRYTEPLLHLNRLKKKINLNYSL

SEQ ID NO: 116306 - protein, 158 aa, Unknown
  Bacterial polypetide isolated from the Sargasso Sea
MREQYIKIHNLSVAKELADFVKNELLLDTNVGPEEFWKGFDKEVHELAPKNKKLLEIRETLQQEIDLWHKKNRDHEIDYNKYKNFLEEIGYLKKEGKDFKITTKNLDEEISNIAGPQLVVPIMNSRYSLNAANARWVSLYDSLYGSNIIESEESGSEK

SEQ ID NO: 116307 - protein, 126 aa, Unknown
  Bacterial polypetide isolated from the Sargasso Sea
MNIIDKYGLKISLTLFDFINNEVLPNTGIDIENFWSKFSDTAHELAPINKALIRKREDIQKKIDDWHKSNHGEEFDKLKYIKFLKSIGYLVDVGDDFKIETEGVDKEISSVAGPQLVVPVDNARYA

SEQ ID NO: 116308 - protein, 83 aa, Unknown
  Bacterial polypetide isolated from the Sargasso Sea
SSQHIANWLHHNLVTNDEVVSAMKKMALVVDEQNAIDPLYQPMGPSYSGLAFKAACNLAIKGRIQPSGYTEPILHQTRLKYKS

SEQ ID NO: 116309 - protein, 234 aa, Unknown
  Bacterial polypetide isolated from the Sargasso Sea
MQEKYTNIKSLKVSSDLVQFVKDELLKETEISPENFWEGFENTVNELAPKNKELIKIRKDLQNKIDDWHIRNKGLEFNIKDYKKFLTEIGYLKNEGPDFKIETENVDDEITNIAGPQLVVPVMNARYALNAANARWMSLYDSLYGTDIIEQSEDSVSERYDPLRGEMVIKYGRDFLDKYFPLAGLSWTKITSFAIKFGKFKALKGADIFDLVDEDKFIGHRGENDNPTAIILKN

SEQ ID NO: 116310 - protein, 212 aa, Unknown
  Bacterial polypetide isolated from the Sargasso Sea
LEIRETLQQEIDLWHKKNRDHEIDYNKYKNFLEEIGYLKKEGEDFKIATKNLDEEISNIAGPQLVVPIMNSRYTLNAANARWVSLYDSLYGSNIIESEESGSEKYDPLRGQEVIKYTRNFLNKYFPINDLDWKDITGLAVNNKKLIIYKENKEYNLSDLEKFIGHRGDADKPNAIILKNNNLHLEIIINPRAFSAARDAAGISDIIVESAVS

SEQ ID NO: 116311 - protein, 254 aa, Unknown
  Bacterial polypetide isolated from the Sargasso Sea
MQEKYININNLKVSEKLLKFVNDELLKNTNISPENFWLGLEKTLDELAPKNKELIKIREDLQKKIDDWHIKNKGKEFNLVEYKKFLLEIGYLKNEGPDFKIETKNVDEEIANIAGPQLVVPVMNARYALNAANARWMSLYDSLYGTDIIEQSEDSVSERYDPLRGEMVIKYGREFLDKYFPLAGLSWSQITSFAVKQGKLKVLKGADIFDLEDESKFIGHRGEGDSPSAIILKNNSLHVEVLKKSRAFAAQQDH

SEQ ID NO: 116312 - protein, 199 aa, Unknown
  Bacterial polypetide isolated from the Sargasso Sea
MQEKYININTLKVSEKLSQFISDELLKDTDLSVDNFWSGFEKTVNELAPKNKELIKFREELQKQIDNWHIKNKGNEFNLSEYKKFLTEIGYLKEEGDDFEITTQNVDEEITNIAGPQLVVPVMNARYALNAANARWMSLYDSLYGTDVIEQSEDSVSERYDPLRGEMVIKYGRDFLDKYFPLAGLSWQKITSFAVKYEN

SEQ ID NO: 116313 - protein, 159 aa, Unknown
  Bacterial polypetide isolated from the Sargasso Sea
MKHIKQGNLSVEKILLEFVNNELLPGTNIDQVKFWLGFDKTVHELAPINKKLLSTRDEIQKKIDKWHIDKKDKEFDPKIYENFLREIGYLVKEGENFSIETKNVDSEICNIAGPQLVVPVMNARYSLNAANSRWGSLYNALYGTDVISESDGATRGENI

SEQ ID NO: 116314 - protein, 153 aa, Unknown
  Bacterial polypetide isolated from the Sargasso Sea
MQEKYINIKSLKVSSDLVQFVKDELLKETDISPENFWAGFEKTVNELAPKNRELISVRKDLQNKIDDWHIKNKGSEFDFEEYKKFLIEIGYLKNEGPDFQIETKDVDEEIAKIAGPQLVVPVMNARYALNAANARWMSLYDSLYGTDIIEQSE

SEQ ID NO: 116315 - protein, 37 aa, Unknown
  Bacterial polypetide isolated from the Sargasso Sea
VGNNFTIKTQNVDPELALKAGPQLVVPVTNARYALNA

SEQ ID NO: 116316 - protein, 269 aa, Unknown
  Bacterial polypetide isolated from the Sargasso Sea
MNNKYQNVNNLKVSNELLSFVNDELLKETSISPKKFWQGFDNMVHELSPQNKKLIEKREILQKKIDDWHIKNRGTEIKVEEYKKFLKEIDYLKDEGSDFKIETNNVDDEIAQIAGPQLVVPIMNARYTLNAANARWVSLYDSLYGTNIIESEEGGSERYDPNRGQEVIKYVREFFDKCIPIEGTSWKNIAALKIVNKELVILKDDHEYKLKDKSKFIGHRGDANKPEAVIIKNNNLHFEIIINPKAFSAAHDIAGISDVIAESAVSTIC

SEQ ID NO: 116317 - protein, 273 aa, Unknown
  Bacterial polypetide isolated from the Sargasso Sea
MSEKYIKIENLSVSEVLYNFINKDLIPGTKIKEKKFWSGFSSVVHKLNSKNKELLKIREKLQLDIDRWHHDHKNEKFKQGDYEKFLRKIGYIVNEGSNFKIETKNIDKEISKIAGPQLVVPIMNARYALNAANARWISLYDSLYGTDVIPETKGAVRGKTYNPIRGAKVIEYAREFLDQYIPLKEKSWKDLKNVPEINNNKLNLKLKNPEQFVGYSKRSNFLSSLLFVNNNLHIDILFDQEGLLEINNPDGNQDIISIHDVILESAISTICDH

SEQ ID NO: 116318 - protein, 265 aa, Unknown
  Bacterial polypetide isolated from the Sargasso Sea
MNMIQKKNIKINEKLYNFINNEALKGIEIDEEIFWNGFSDIVDTYYPKNVALLEKRKNLQNQINNWHKENRSRDTDIDEYKNFLKEINYIVDEGPDFKITTSNVDEEISTICGPQLVVPITNARFAINAVNARWGSLYDALYGTDALGEVPQGNSYDPERGNKVVGFAKSHLDKFAPLENIKWSEINKIELQDNKIILGSIKENSVNFVNKNQLIGWRSSKDDKLLELILLKNNLHCRILINENDAIGKNDPANISDILLESCSI

SEQ ID NO: 116319 - protein, 195 aa, Unknown
  Bacterial polypetide isolated from the Sargasso Sea
MREQFIKIHNLSVAKDLAEFVKNELLLDTNLHTDEFWKGFDRVVHELAPRNKKLLEIRETLQQEIDLWHKKNRGQKFEYNDYKSFLEDIGYLKKEGEDFKITTKNLDKEISYIAGPQLVVPVMNSRYALNAANARWVSLYDSLYGSNIIETEESGSEKYDPLRGQEVIKYTRNFLNKYFPINDLDWKDITGLAVS

SEQ ID NO: 116320 - protein, 159 aa, Unknown
  Bacterial polypetide isolated from the Sargasso Sea
MSEKYIKIENLSVSEVLYNFINKDLIPGTKIKEKKFWSGFSSVVHKLNSKNKELLKIREKLQLDIDRWHHDHKNEKFKQVDYEKFLRKIGYIVNEGSNFKIETKNIDEEISKIAGPQLVVPIMNARYALNAANARWISLYDSLYGTDVIPRDKRSGSWK

SEQ ID NO: 116321 - protein, 237 aa, Unknown
  Bacterial polypetide isolated from the Sargasso Sea
EIRESEWKVRPIPNDLLDRRVEITGPVDRKMIINALNSDVKVFMADFEDSLSPTWENVANGQKNLFDAVRRTISFENPDNGKKYKLNDDIATLMCRVRGIHLKEKGLTIDGSQPYGCLVDFGYYLFHNAKELMNKNTGPYFYIPKLQSHLEARLWNDIISFAEENLNIPKGTVRVTCLIETLPAVFEMEEILYELKDHIVGLNCGRWDYIFSYIKTFQKHSDKLLPDRYQVGMNQPF

SEQ ID NO: 116322 - protein, 263 aa, Unknown
  Bacterial polypetide isolated from the Sargasso Sea
MREQYIKIHNLSVAKELADFVKNELLLDTNVGPDEFWKGFDKVVHELAPKNKKLLEIRETLQQEIDLWHKKNRDHEIDYNKYKNFLEEIGYLKKEGEDFKIATKNLDEEISNIAGPQLVVPIMNSRYSLNAANARWVSLYDSLYGSNIIESEESGSEKYDPLRGQEVIKYTRNFLNKYFPINDLDWKDITGLAVNNKKLSIYKENKEYNLSDLEKFIGHRGDAAKPNAIILKNNNLHLEIIINPRAFSAARDAAGISDIIIES

SEQ ID NO: 116323 - protein, 256 aa, Unknown
  Bacterial polypetide isolated from the Sargasso Sea
MSGRIEKNGLSIDEKLVTFIESEAIPGTGVDIQKFWQGFAEIVEKLGPKNKTLLQKREDIQSKIDEYHITHRGQDIEIEDYKAFLYDIGYLVPEGENFKIDTSNVDEEIADLCGPQLVVPIMNARYALNAANARWGSLYDAFYGTDAMGDLPPKGGYSNDRGDKVISNAKAHLDKVAPLDSNNWYEISEINVVEGQLILSVNEKEVSLLNKNQFVGYIQNNNSINEVILLKNGLHIRILIDPDHVMEKMIKQNISE

SEQ ID NO: 116324 - protein, 165 aa, Unknown
  Bacterial polypetide isolated from the Sargasso Sea
MQEKYININTLKVSEKLSQFISDELLKETDLSVDNFWSGFEKTINELAPKNKELIKFREDLQKQIDNWHIKNKGNEFNLSEYKKFLTEIGYLKEEGDDFEISTQNVDEEITSIAGPQLVVPVMNARYALNAANARWMSLYDSLYGTDVIEQSEDSVSERYDPLRG

SEQ ID NO: 116325 - protein, 258 aa, Unknown
  Bacterial polypetide isolated from the Sargasso Sea
MTSKYHSVNSLKVSDELLHFVNNELFNGTDISPEKFWKDFEKAVHELTPKNKELINFRETLQKKIDKWHVDNKGKDIQIEVYKNFLKEIGYLKDEGPDFKIETSDIDEEIASIAGPQLVVPIMNARYALNAANARWMSLYDSLYGTDVIEESEDSTSERYDPERGEIVIKYGREFLDKYFTLKDFSWKKITGFAIQDKDLKILKGIDVTSLKDANKFIGHRGEADNPSAIILKNNNLHVEILKNPRAFSAQQDHAGIS

SEQ ID NO: 116326 - protein, 167 aa, Unknown
  Bacterial polypetide isolated from the Sargasso Sea
HQIDIFKVHQKIKNRKRAKLSELLTIPILRKPNWTNEEINNELSNCAQGILGYVVRWIDQGIGCSSVPDINNIPLMEDRATCRISSQLISNWLHHGICSRKQVLEIMKKMAKVVDTQNKEDKNYLKMSPDFEKSIAFKSACELVFSKDSPNGYTEPILHLNRIIKKN

SEQ ID NO: 116327 - protein, 252 aa, Unknown
  Bacterial polypetide isolated from the Sargasso Sea
MREQYIKIHNLSVAKEIADFVKNELLLNTNVGPEEFWKGFDKVVHELAPKNKKLLEIRETLQQEIDLWHKKNRDHEIDYNKYKNFLEEIGYLKKEGDDFKITTKNLDEEISNIAGPQLVVPIMNSRYSLNAANARWVSLYDSLYGSNIIESEESGSEKYDPLRGQEVIKYTRNFLNKYFPINDLDWKDITGLAVNNKKLSIYKENKEYNLSDLEKFIGHRGDAAKPNAIILKNNNLHLEIIINPRAFSAARD

SEQ ID NO: 116328 - protein, 261 aa, Unknown
  Bacterial polypetide isolated from the Sargasso Sea
MREQYIKIYSLSVAKELADFVKNELLLDTKVGPDEFWKGFDKVVHELAPKNKKLLEIRETLQQEIDLWHKKNRDHEIDYNKYKNFLEEIGYLKKEGEDFKITTKNLDEEISNIAGPQLVVPIMNSRYSLNAANARWVSLYDSLYGSNIIESEESGSEKYDPLRGQEVIKYTRNFLNKYFPINDLDWKDITGLAVNNKKLTIYKENKEHNLSDLEKFVGHRGDAAKPNAIILKNNNLHLEIIINPRAFSAARDAAGISDIII

SEQ ID NO: 116329 - protein, 149 aa, Unknown
  Bacterial polypetide isolated from the Sargasso Sea
MQEKYIKINNLQVSEKLSNFINDELLKNTNVSSKDFWLGLEKTLDELAPKNKELIKLREDLQKKIDNWHIKNKSKEFNLEDYKKFLLEIGYLKNEGPDFKIETENVDEEIASIAGPQLVVPVMNARYALNAANARWMSLYDSLYGTECN

SEQ ID NO: 116330 - protein, 144 aa, Unknown
  Bacterial polypetide isolated from the Sargasso Sea
MQEKYVNIKSLKVSSDLVQFVKDELLKETEISPENFWAGFEKTVNELAPKNRELISIRKDLQSKIDDWHIKNKGSEFNFEEYKKFLIEIGYLKNEGPDFQIETKDVDDEIAKIAGPQLVVPVMNARYALNAANARWMSLYDSLY

SEQ ID NO: 116331 - protein, 222 aa, Unknown
  Bacterial polypetide isolated from the Sargasso Sea
MQEKYVKINKLQVSEKLSNFVNDELLKNTNVSPENFWLGLEKTLDELAPKNRELIKFREDLQNKIDNWHIKNKGKEFNLVEYKKFLVEIGYLRNEGPDFKIDTKNVDEEIANIAGPQLVVPIMNARYALNAANARWMSLYDSLYGTDVIEQSEDSVSERYDPLRGEMVIKYGRNFLDKYFPLAGLSWNKITSFAVKYGRLKILKGADIFDLEDEDKFVDTEG

SEQ ID NO: 116332 - protein, 218 aa, Unknown
  Bacterial polypetide isolated from the Sargasso Sea
MSNSFIKINTLSVSKNLADFVNNELLPGLDVNEKDFWDGFDKSINELSPINKKLLETRETLQSEIDLWLKKNKNGEFNHQEYKNFLKEIGYLKEEGNDFKIDTKKLDIEISSIAGPQLVVPIMNSRYTLNAANARWVSLYDSLYGTDLIESEETGSQKYDPLRGQEVIKFARNFLNDHFPIDEIHWKDINGFKIEGSNLKILKDNKEFGLVDKSKFIG

SEQ ID NO: 116333 - protein, 265 aa, Unknown
  Bacterial polypetide isolated from the Sargasso Sea
MSSKYQKVNNLKVSEDLLSFVNNELLKGTKISPEKFWSGFDIVVHELSPINKKLIEIREDLQKKIDKWHLDNKGRETNIEDYKKFLKEIGYLKDEGSDFKIETNNVDDEISQIAGPQLVVPIMNARYTLNAANARWVSLYDSLYGTDIIESEEGGSERYDPNRGQEVIKYVREFFDKFVPIEGTSWKNITKLKVANKDLLILKDDYEYKLKDKDKFVGHRGDANNPTAIIIKNNNLHFEIIINPKAFSAAHDIAGISDVISESAI

SEQ ID NO: 116334 - protein, 277 aa, Unknown
  Bacterial polypetide isolated from the Sargasso Sea
AEEELNLPISTIRATVLLETISASFEMDEILYSLKNHSLGMNAGRWDYIFSAIKRYREVEGVLFPDRSQITMTVPFMKSYTELLVQSLHKRGAHAIGGMSAFIPDRKSPDITEEAFTKVKNDKIREAEMGFDGSWVAHPDLVKICKDVFSEHLGEADNQISYVPDYKITDDMLQDFNIKDGSITEEGIRTNVKVGILYIQSWLLGQGAAALFNLMEDAATAEISRSQLWQWVHNNAFTDSGIEINIEFIKKLIGEELKEIKNLTPTYKMLDEARYSF

SEQ ID NO: 116335 - protein, 134 aa, Unknown
  Bacterial polypetide isolated from the Sargasso Sea
MTYIVKPKNHHPNLERNELGLTRRDYEGAISTLCAGCGHDSISAAIIDACFQLSIPSYQVAKLSGIGCSSKAPAYFLNQSHGFNSVHGRMPSIATGANVANHELLYLGVSGDGDSASIGIGQFIHAARRQPNMI

SEQ ID NO: 116336 - protein, 271 aa, Unknown
  Bacterial polypetide isolated from the Sargasso Sea
IKNKGKEFDIHKYKKFLNEIGYLIDNGPDFKIDTKNIDNEISKIAGPQLVVPIMNARYTLNAANARWVSLYDSLYGTDIIESEEGGSERYDPNRGQEVIKYVREFFDKIIPIDGTSWKNIASLKVVNSQLIISKDNNEYKLIDPNKFIGHRGDANKPEAIILQNNKLHFEIIINPRAFSAAHDIAGISDIIAESAISTICDNEDSVAAVDSEDKVACYKNWLGLMKGNLKVQFEKKGKILERKLNPDRSYISKDGVGLKLHGRSLLLIRNV

SEQ ID NO: 116337 - protein, 139 aa, Unknown
  Bacterial polypetide isolated from the Sargasso Sea
LKNRVCFINTGFLDRTGDEIHTSMEVGPMVKKGDMKSSKWISAYENNNVDIGLACGLSGKAQIGKGMWAMPDLMKDMMKQKIIHPLAGANCAWVPSPTAAALHALHYHEINVFDKQKELLKRKPAKLSDLLTIPSSKKT

SEQ ID NO: 116338 - protein, 173 aa, Unknown
  Bacterial polypetide isolated from the Sargasso Sea
MREQYIKIHNLSVAKELADFVKNELLLDTNIGPDEFWKGFDKVVHELAPKNKKLLEIRETLQQEIDLWHKKNRDHEIDYNKYKNFLEEIGYLKKEGEDFKIATKNLDEEISNIAGPQLVVPIMNSRYTLNAANARWVSLYDSLYGSNIIESEESGSEKYDPLRGQEVIKYTRN

SEQ ID NO: 116339 - protein, 213 aa, Unknown
  Bacterial polypetide isolated from the Sargasso Sea
MEKYTNISNLKVSKKLENFVQKELLKNLDISPKIFWIKFDKVVHELAKINAELIKKREVLQKKIDEWHKKRKGENFNLNEYKKFLREIGYLVKEKDNFKIKTKNLDSEISSIAGPQLVVPIMNERYALNAANARWVSLYDSLYGTDIIKSEEGGSERYDPARGEEVIKYVRKFLDEYIPVNGTSWKNISNLIVNKGNLIIYKDENKFKLKDTK

SEQ ID NO: 116340 - protein, 264 aa, Unknown
  Bacterial polypetide isolated from the Sargasso Sea
MQEKYIKINNLKVSEKLSNFVNDELLKNTNVSSENFWLGLEKTLEELAPKNKELIKFREELQKKIDNWHIKNKGKEFNLDEYKKFLLEIGYLKNEGPDFKIETENVDQEIANIAGPQLVVPIMNARYALNAANARWMSLYDSLYGTDVIEQSEDSVSERYDPLRGEMVIKYGRDFLDKYFPLAGLSWNKITSFAVKYGKLKVLKGVDIFDLEDENKFIGHRGESDNPSAIILKNNNLHIEILKDSRAFAAQQDHAGISDIILES

SEQ ID NO: 116341 - protein, 196 aa, Unknown
  Bacterial polypetide isolated from the Sargasso Sea
MNLQYIDIENIKIAKPLYDLVEQEIIPETGINTNHFWSSFASIINDLEPNNRSLLNKRTDIQNNINSWHEDQKTKKFDVEEYKAFLKTIGYLAPDAPDFQITTTDVDEEISSIAGPQLVVPVDNARFAINAANARWWSLYDSLYGTDIISEENNGQKGANYNPHRGAKVVAYCSILLDTIFGLKNSSFAHVSNFSL

SEQ ID NO: 116342 - protein, 264 aa, Unknown
  Bacterial polypetide isolated from the Sargasso Sea
QYIKIYNLSVAKELADFIKNELLLDTNVGPDEFWKGFDKVVHELAPKNKKLLEIRETLQQEIDLWHKKNRDHEIDYNKYKNFLEEIGYLKKEGEDFKITTKNLDEEISNIAGPQLVVPIMNSRYSLNAANARWVSLYDSLYGSNIIESEESGSEKYDPLRGQEVIKYTRNFLNKYFPINDLDWKDITGLAVNNKKLTIYKENKEHNLSDLEKFIGHRGDAGKPNAIILKNNNLHLEIIINPRAFSAARDAAGISDIIIESAVST

SEQ ID NO: 116343 - protein, 266 aa, Unknown
  Bacterial polypetide isolated from the Sargasso Sea
RAHRTILAAFEMDEILYELKDHSAGLNAGRWDYIFSVAKKFCSDPAFVLPDRSDVTMTVPFMRAYTELMVSTCHKRGAHAIGGMSAFIPNRRDPEVTEEALEKVAADKSREATDGCDGTWVAHPDLVEIAIEEFNKVLQDKPNQIDRLREDVSVSAQDLLSIDQTGGAITLEGLRINVEIGLRYIASWLAGTGAAAINNLMEDAATAEISRAQVWQWVKHKKELDNGETVTTDLVKNIIQEEIAAIEEDMGTEQFNTFPFDQAKKI

SEQ ID NO: 116344 - protein, 234 aa, Unknown
  Bacterial polypetide isolated from the Sargasso Sea
MREQYIKIHNLSVAKELADFVKNELLLDTNVGPDEFWKGFDKAVHELSPKNKKLLEIRETLQQEIDLWHKKNRDHEIDYNKYKNFLEEIGYLKKEGEDFKITTKNLDEEISNIAGPQLVVPIMNSRYSLNAANARWVSLYDSLYGSNIIESEESGSEKYDPLRGQEVIKYTRNFLNKYFPINDLDWKDITGLSVNNKKLSIYKENKEYTLSDLEKFIGHRGNAAKPNAIILKNN

SEQ ID NO: 116345 - protein, 120 aa, Unknown
  Bacterial polypetide isolated from the Sargasso Sea
MTERVQVGGIQIAKNLYDFVNNEAIPGTGVDADKFWAEFDKIVNELAPRNRDLLVKRDEIQEKMDTWNRDHKGQKLDMAEYKAFLKEIGYLVDEPADFKISTANVDPEIATMAGPQLVVP

SEQ ID NO: 116346 - protein, 217 aa, Unknown
  Bacterial polypetide isolated from the Sargasso Sea
AYTELLVESCHKRGAHAIGGMSAFIPNRKDPEVTEKAFENVKNDKLREANMGFDGSWVAHPDLVSICKDVFNDHLNGEANQISFVPRYDIEDSMLHNFKIENSSITMEGIHTNIKVGILYMHSWLNGQGAAALFNLMEDAATAEISRSQLWQWLHNSVETKNGDTINESFMEEAFETVFSEINDIENIEKARDEFKKLVFDEDFSDFLTLPAYHLIN

SEQ ID NO: 116347 - protein, 151 aa, Unknown
  Bacterial polypetide isolated from the Sargasso Sea
MTSKYHSVNGLKVSEELLHFVNNELFDGTDISPEKFWKDFDKAVHELAPKNKDLIDFRETLQKKIDKWHIDNKEKNVQIKEYKNFLKEIGYLIDEGPDFKIETSDIDEEIATIAGPQLVVPIMNARYALNAANARWMSLYDSLYGTDVIEA

SEQ ID NO: 116348 - protein, 190 aa, Unknown
  Bacterial polypetide isolated from the Sargasso Sea
MQEKYIKINNLQVSEKLSNFVNDELLKNTNVSSENFWLGLEKTLDELAPKNKELIKFREELQEKIDDWHIKNKGKEFNLDEYKKFLLEIGYLKNVGPDFKIETENVDEEITSIAGPQLVVPVMNARYALNAANARWMSLYDSLYGTDVIEQSDDSVSERYDPLRGEMVIKYGRDFLDKYFPLAKLSWNKI

SEQ ID NO: 116349 - protein, 295 aa, Unknown
  Bacterial polypetide isolated from the Sargasso Sea
YEAINNLKISSELLRFVNDEILRDTDVSPKKFWSDFDQIVHELAPINRSLLDKRKNLQKKIDDWHIKNKGEEFDINKYKNFLNEIGYLVNEGPDFQIETKNIDNEISTIAGPQLVVPIMNARYTLNAANARWVSLYDSLYGTDIIESEEGGSERYDPNRGQEVIKYVREFFDKIIPIDGTSWKNIASLKVVNSQLVISKDNNEYKLIDASKFIGHRGDANKPEAIILQNNKLHFEIIINPRAFSAAHDIAGISDVIAESAISTICDNEDSVAAVDSEDKVACYKNWLGLMKGNLK

SEQ ID NO: 116350 - protein, 266 aa, Unknown
  Bacterial polypetide isolated from the Sargasso Sea
MENYIKRGNLNIHNALDRFLSDEMLSGLDIASDEFWKKFEGLLEEFHQRNKDLLAKRSLLQDQISTWHKNNDFNINEYKKFLKEIGYLEEVPADFTITTRNTDPEISSIPGPQLVVPIMNARFALNATNARWGSLYDALYGTDVISEDGGASKDGAYNEIRGNKVIDFSKQFLDNCFPITDLSYKDITNISIVDQRLLFHAEEDQITYLKNEDQFKGFNGSPENPSEVLLVNNNLHLEIQIDSDHPVGKTDKANIKDIVLESAVST

SEQ ID NO: 116351 - protein, 172 aa, Unknown
  Bacterial polypetide isolated from the Sargasso Sea
MSKKYINKENLSISEDLYKFINEEAIPGTEVSKEEFWKGLSKISHELNPKNIELLRTRKKLQIEIDKWHLENYDKEFNLNEYKSFLEQIGYLKKAGPDFKIKTKNIDQEISKIAGPQLVVPIMNARYALNAANARWMSLYDSLYGTDVISSEESISERYDPERGLQVIKYTK

SEQ ID NO: 116352 - protein, 165 aa, Unknown
  Bacterial polypetide isolated from the Sargasso Sea
MKIVTKNDLKINQTLFNFINEEVLPGTNIKPEDFWNRFAKVVHELAPVNKKLIEKREKIQKQIDDWHLSNSKEKFDKNKYTQFLKSISYIVNEGDNFKIDTSNVDEEIAEIAGPQLVVPVDNARYALNAANARWGSLYDSLYGTDVIPGEKGDAFNKDRAEKVIV

SEQ ID NO: 116353 - protein, 109 aa, Unknown
  Bacterial polypetide isolated from the Sargasso Sea
SKVPDFYGVNLMEDRATCRISAQHVSNWLYHNVVTESEIIDALNKMTLLVNSQNAQDPMYEPISAQSSDFSFKAAHDLCIYGRFQPNGYTEPILHENRIKKKAAILYKN

SEQ ID NO: 116354 - protein, 126 aa, Unknown
  Bacterial polypetide isolated from the Sargasso Sea
MKIIDKNGLKISSTLYQFVNEEAIPGTKVNSEDFWSKFSKIAHELAPINKNLIEKRETIQKKIDSWHKLNIGKAFDKKEYINFLKSIGYLVEEKEDFKIDTTNVDEEISSIAGPQLVVPVDNARYA

SEQ ID NO: 116355 - protein, 170 aa, Unknown
  Bacterial polypetide isolated from the Sargasso Sea
MSGRIEKNGLSIDEKLVTFIESEAIPGTGVDTQKFWQGFAEIVEKLGAKNKTLIQKREDIQSKIDEYHITHRGQDIDIEDYKSFLYDIGYLVPEGENFKIDTSNVDEEIADLCGPQLVVPIMNARYALNAANARWGSLYDAFYGTDAMGDLPPKGGYSNDRGDKVISNAK

SEQ ID NO: 116356 - protein, 177 aa, Unknown
  Bacterial polypetide isolated from the Sargasso Sea
MPNLKKYDPKRGQDVIKYAKSYLDNFAPLKNSNWDQVKSINLENNKITFKLLSNDSTVFKNENQIVGISKNIQNNLGELILVKNNLHCRIIINNKDAIGKVDSAGISDIIFESAISTILDCEDSVATVDADDKVTAYRNWLGLMKGDLESTFTKNEKKIKRVLNENITIKTLSGENK

SEQ ID NO: 116357 - protein, 182 aa, Unknown
  Bacterial polypetide isolated from the Sargasso Sea
MREQYIKIHNLSVAKNLADFVKNELLLATNVSPDEFWKGFDKVVHELAAKNKKLLEIRETLQQEIDLWHKKNRGQEIDYEKYKNFLEEIGYLKKEGEDFKITTKNLDKEISNIAGPQLVVPIMNSRYSLNAANARWVSLYDSLYGSNIIESEESGSEKYDPLRGQEVIKYTRNFLNKYFPNK

SEQ ID NO: 116358 - protein, 203 aa, Unknown
  Bacterial polypetide isolated from the Sargasso Sea
MENYIKRGSLNIHNTIDAFLNDEVLPGLDITSDEFWRKFEGLLEEFHQKNKDLLSKRSSLQDQISTWHKNNDFNLNEYKKFLQEIGYLEEVPADFTITTMNTDPEISSIPGPQLVVPIMNARFALNATNARWGSLYDALYGTDVISEDGGASKEGAYNQIRGDKVIDFSKQFLDDCFPITNLSYQDITNISIKDQRLLFHSEQ

SEQ ID NO: 116359 - protein, 243 aa, Unknown
  Bacterial polypetide isolated from the Sargasso Sea
MSINYQKVNDLKVSEKLLSFVNNDLLKETNISPNEFWSGFNSAVHELASKNKDLIKIRENLQKKIDDWHIKNKGKEIVIDEYKKFLKEIGYLKDEGPDFKIETSNVDDEIAKIAGPQLVVPIMNARYTLNAANARWVSLYDSLYGTNIIESEEGGSERYDPNRGQEVIKYVREFFDKYIPIKGTSWKNISALKIINKELIIFKGDHEYYLEEKNKFIGHRGDTKKPDAIIIKNNNLHFEIIIN

SEQ ID NO: 116360 - protein, 202 aa, Unknown
  Bacterial polypetide isolated from the Sargasso Sea
HAIGGMSAFIPNRKDPEVTEKAFENVKNDKLREATMGFDGSWVAHPDLVSICKDVFNDHLNGKANQISFVPRYDIEDSMLHNFEIENSSITTQGIHTNIKVGILYMHSWLNGQGAAALFNLMEDAATAEISRSQLWQWLHNSVETENGETITESFMEEAFETVFSEISDIENIEKARDEFRKLVFDEDFSDFLTLPAYHLIN

SEQ ID NO: 116361 - protein, 247 aa, Unknown
  Bacterial polypetide isolated from the Sargasso Sea
MIKKDDMKKTKWLEAYENNNVDVGLKCGFSGKISIGKGMFPAPDNMAQMMKEKISHLEAGANCAWVPSPTAAALHALHYHKIDVFEKQKEIEKRNKANLYNLLSFPVTNKPNWTAEEINNEISNCAQSILGYVVRWIDQGIGCSKVPNINNINLMEDRATLRISSQLIANWLHHGICSRKQVLEIMKKMAKVVDHQNKNDDIYQSMHPKFDKSIAFKTACELIFHGKYQPSGYTEPLLHLNRLIKKN

SEQ ID NO: 116362 - protein, 193 aa, Unknown
  Bacterial polypetide isolated from the Sargasso Sea
MSITEKNGLKINTKLLNFVNNEIIPGTDIQSEEFWTSFGKIVHELAPLNKKLIQKREDIQKKIDEWHKGNKGEKLNKKEYLKFLKSISYIVEEGDKFNIETANVDDEIATIAGPQLVVPVDNARYALNAANSRWGSLYDALYGTDAIPGDKGKDFNEQRAQTVIAYVRKFLDETIPLEKGSWNEISGMKIKDK

SEQ ID NO: 116363 - protein, 253 aa, Unknown
  Bacterial polypetide isolated from the Sargasso Sea
PKNKELLKVREKIQMEIDKWHIENSILDFNQNEYEKFLKEINYLKDEGPNFIIKTKNIDSEIAKIAAPQLVVPIMNARYALNAANARWMSLYDSLYGTDVIESEESASERYDPERGSEVIKFTKKFLDKHFSLNNYSWSKVTDIKIINNELNIFIINNKTTIKDDNKFIGFRGRADKPSAIILENNNLHLEIIINPDAFSAKGDPAGISDIIVESAVTTICDHEDSVAGVDAEDKVLGYRNWLGLMRGNLKTE

SEQ ID NO: 116364 - protein, 154 aa, Unknown
  Bacterial polypetide isolated from the Sargasso Sea
MENYIKRASLNIHNALDSFLNDEVLPGLDITSDDFWKKFEGLLGEFHQRNKDLLAKRSLLQDQISAWHKNNDFNLNEYKKFLLEIGYLEEVPPDFAITTRNTDPEISSIPGPQLVVPIMNARFALNATNARWGSLYDALYGTDVISEDGGASKE

SEQ ID NO: 116365 - protein, 60 aa, Unknown
  Bacterial polypetide isolated from the Sargasso Sea
AHPGPVRDHAAYRAFLEQIGYLVPVPSNVAAATANVDSEIATQAGPQLVVPLSNARYALN

SEQ ID NO: 116366 - protein, 149 aa, Unknown
  Bacterial polypetide isolated from the Sargasso Sea
MTSKYHSVNNLKVSEELLHFVNNELFNGTDISPEKFWKDFDKAVHELAPKNKELIDFRKTLQKKIDKWHIDNKGNDIQINEYKDFLKEIGYLKDEGPDFKIETSNIDEEIASIAGPQLVVPIMNARYALNAANARWMSLYDSLYGTECD

SEQ ID NO: 116367 - protein, 252 aa, Unknown
  Bacterial polypetide isolated from the Sargasso Sea
MQEKYIKINNLQVSEKLSNFVNDELLKNTNVSSDNFWLGLEKTLDELAPKNKELIKFREELQKKIDDWHIENKGKEIKPDVYKKFLLEIGYLKNEGPDFKIETKNVDEEISSIAGPQLVVPVMNARYALNAANARWMSLYDSLYGTDIIEQSEDSVSERYDPLRGEMVIKYGRDFLDKYFPLAGLSWSKITSFAVKNGKLKVLKGADIFDLEDENKFVGHRGESDNPSAIILKNNNLHIEILKDSRAFAAQQ

SEQ ID NO: 116368 - protein, 92 aa, Unknown
  Bacterial polypetide isolated from the Sargasso Sea
RISSQHIANWLFHGICSKKHVLEIMKKMAKVVDSQNLKDLSMKGQAPYQTMSGNFDKSIAFKAACELVFHGRSQPSGYTEPILHINRLLKKN

SEQ ID NO: 116369 - protein, 226 aa, Unknown
  Bacterial polypetide isolated from the Sargasso Sea
MSTNYQSVNNLKVAEKLLVFINEELLKDTNISPKEFWSGFDKAVHELAPKNKELIKTREILQKQIDDWHISNKGNQIKIEEYKKFLKKIGYLKDEGPDFKIETTKIDEEIANIAGPQLVVPIMNARYTLNAANARWVSLYDSLYGTNLIESEEGGSERYDPLRGQEVIKYVREFFDKYIPIEGTSWKNIAALKVKNKNLIIFKDGYEYKLKDEKKFIGHRGDANKP

SEQ ID NO: 116370 - protein, 126 aa, Unknown
  Bacterial polypetide isolated from the Sargasso Sea
MREQYIKIHNLSVAKNLADFVKNELLLDTNIGPDKFWKGFDKVVHELAPKNKKLLEIRETLQQEIDLWHKKNRDHEIDYNKYKNFLEEIGYLKKEGEDFKIATRNLDEEISNIAGPQLVVPIMNSR

SEQ ID NO: 116371 - protein, 294 aa, Unknown
  Bacterial polypetide isolated from the Sargasso Sea
MANPLSSQSSLQLPQGMEITAEIKPGYEAILTREALELVAALHRTFEPRRQQLLQARVERTKRLDAGERPDFLAETKSVREGDWKIAPLPQDLQCRRVEITGPVERKMIINALNSGADSYMTDFEDSNAPSWDNQITGHINLKDAVRRTISLEQNGKSYTLNDKIATLIVRPRGWHLDEKHVTVDGKRVSGGIFDFALFMVHNAKEQVARGTAPYFYLPKMESHLEARLWNDIFLAAQEGVGVPRGTIRATVLIETIVAAFEMDEILYELREHSSGLNAGRWDYIFSAIKKSRA

SEQ ID NO: 116372 - protein, 229 aa, Unknown
  Bacterial polypetide isolated from the Sargasso Sea
MRAYTELLVKTCHTRGTLAIGGRAAFIPSRRDEEVNRVALEKVRQEKEREANDGFDGSWVAHPDLVQVCTEVFSNSFEDGRVNQMHRMREDVQVSSEMLLNFQIPGGKITEDGLRNNISVGIQYISAWLRGTGAVAIFNLMEDAATAEISRSQVWQWCQHPDGMLDDGRNITIEMVKSMVPEELAKIRVAYGDAFDEEKMNQATELFLTLVTQKEFEEFLTIRAYDQLD

SEQ ID NO: 116373 - protein, 261 aa, Unknown
  Bacterial polypetide isolated from the Sargasso Sea
MREQYIKIHNLSVAKDLADFVKNELLLDTNVSPDEFWKGFDRVVHELAPKNKKLIEIRETLQQEIDLWHKKNRDQEIDYNKYKNFLEEIGYLKKEGEDFKIATKNLDEEISNIAGPQLVVPIMNSRYSLNAANARWVSLYDSLYGSNIIESEESGSEKYDPLRGQEVIKYTRNFLNKYFPINDLDWKDITGLAVNNKKLSIYKENEEYNLLDKEKFIGHRGDAAKPNTIILKNNNLHLEIIINPRAFSDARDAAGISDIIV

SEQ ID NO: 116374 - protein, 144 aa, Unknown
  Bacterial polypetide isolated from the Sargasso Sea
MKFISKNELKINQTLFNFINEEVLPGTDIKQDDFWSKFSKVVHETAPINKKLIEKREKIQKQIDDWHLNNSKEKFDKDKYTEFLKSISYIVDEGDDFKITTSNIDDEIAKIAGPQLVVPVDNARYALNAANARWGSLYDSLYGT

SEQ ID NO: 116375 - protein, 351 aa, Unknown
  Bacterial polypetide isolated from the Sargasso Sea
MTYIVKPKNHHPNLERNELGLTRRDYEGAISTLCAGCGHDSISAAIIDACFQLSIPSYQVAKLSGIGCSSKAPAYFLNQSHGFNSVHGRMPSIATGANVANHELLYLGVSGDGDSASIGIGQFIHAARRQPNMIYIVENNGTYGLTKGQFSATNDLESKSKYGEDNLFPAIDLCGMAIQLGASFVARGFSGDKDQLVPLIKAAINHKGFCLLDIISPCVTFNNHNTSTKSYDHIREHNESVSRPDFVPLGKEITAEYSEGENIDVALHDGSILSLEKLSDDYNPLDKKSALENLIKSEKEGKVTTGLLYIDPNAKDLKETINMTDKPLNKLEDGDLCPGNKYISSLNDKLR

SEQ ID NO: 116376 - protein, 282 aa, Unknown
  Bacterial polypetide isolated from the Sargasso Sea
MQDKYIKINNLQVSEKLSNFVNDELLKNTNVSSENFWLGMEKTLDELAPKNKELIKFREELQKKIDDWHIKNKGKKINSDEYKKYLLEIGYLKNEGPDFKIETENVDEEIASIAGPQLVVPVMNARYALNAANARWMSLYDSLYGTDVIEQSEDSVSERYDPLRGEMVIKYGRDFLDKYFPLAGLSWNKITSFAVKYSKLKVLKGADIFDLEDENKFVGHRGESDNPSAVILKNNNLHIEILKDSRAFAAQQDHAGISDIILESAVSTICDNEDSVAAVDSE

SEQ ID NO: 116377 - protein, 225 aa, Unknown
  Bacterial polypetide isolated from the Sargasso Sea
MREQYIKIHNLSVAKELADFVKNELLQDTNVGPDEFWKGFDKVVHELAPKNKKLLEIRETLQQEIDLWHKKNRDHEIDYNKYKNFLEEIGYLKKESEDFKIATKNLDEEISNIAGPQLVVPIMNSRYSLNAANARWVSLYDSLYGSNIIETEESGSEKYDPLRGQEVIKYTRNFLNKHFPINDLDWKDITGLAVNNKKLSIYKENKEYNLSDLEKFIGHRGDATS

SEQ ID NO: 116378 - protein, 112 aa, Unknown
  Bacterial polypetide isolated from the Sargasso Sea
SRYRLFKVPDINNIGLMEDRATLRISSQHIANWIHHGITTKLQVLGIMKEMAKIVDNQNKSDDKYIKMSDDFDRSLAFKTACDLVFSGKEQPSGYTEPLLHLNRLKKKINQN

SEQ ID NO: 116379 - protein, 228 aa, Unknown
  Bacterial polypetide isolated from the Sargasso Sea
MEILDTSVPGIEKVLTEECLEFIYDLEKNFGHKRKELLKIRAEKQKEYDAGELPNFPPETEEVRNSDWKVAPIPKDLQDRRVEITGPVDRKMVINALNSGAKTFMTDFEDSMSPTWNNVINGQINLYDLWRGQIDFLDPNNGKEYKLNPDPAVLIVRPRGWHLEEAHIEIDGVRISGGIFDFAVYLFHNHEKLKENETGPYFYLPKMETYLEARLWNEVFVYAQEKLG

SEQ ID NO: 116380 - protein, 129 aa, Unknown
  Bacterial polypetide isolated from the Sargasso Sea
AQGILGYVVRWIDQSVRCSKVPDINGIGLMEDRATCRISSQHIANWLHHGICSKKQVLEIMKKMAKVVDYQNLKDRGMKDQDPYQPMAGNFEKSIAFKAACDLIFHGKYQPSGYTEPLLHFNRLIKKSI

SEQ ID NO: 116381 - protein, 235 aa, Unknown
  Bacterial polypetide isolated from the Sargasso Sea
MQEKYIKINNLQVSEKLSNFVNDELLKNTSVSSKNFWLGLEKTLDELAPKNKELIKLREDLQKKIDDWHIKNKLKEFNLDEYKKFLLKIGYLKNEGPDFKIETENIDEEISSIAGPQLVVPVMNARYALNAANARWMSLYDSLYGTDIIEQSEDSVSERYDPLRGEMVIKYGRDFLDKYFPLAGLSWNKITSFAVKYGKLKVLKGADIFDLEDENKFIGHRGESDTPSAIILKNN

SEQ ID NO: 116382 - protein, 201 aa, Unknown
  Bacterial polypetide isolated from the Sargasso Sea
MTSKYHSISNLKVSEELLHFVNNELFDGTDISPEKFWKDFDKVVHELAPKNKELIDFRETLQKKIDKWHIDNKGKDIQIKEYKNFLKEIGYLKDEGPDFEIETSDIDEEIATIAGPQLVVPIMNARYALNAANARWMSLYDSLYGTDVIEASEDSTSERYDPERGEIVIKYGREFLDKYFTLKDFSWKKITGIAIQDKDLK

SEQ ID NO: 116383 - protein, 225 aa, Unknown
  Bacterial polypetide isolated from the Sargasso Sea
MKITIGGLEVDETLFDFVTTSLLSGSNRDEADFWVNLESLLKEFSPRMEHLLRVRDDYQSQIDDWHVRRRGNPHDHEAYTSFLTEIGYVQERPTSVQVDTKNVDPEIASIPGPQLVVPVDNARYAINAANARWGSLYDALYGTDVISEDDGAEKAGAYNPVRGAKVIAYGRSLLDQHFPLNGISHTASAGYKVINSELRVHSESEETGLIDPEQFVGFVGNPAKP

SEQ ID NO: 116384 - protein, 277 aa, Unknown
  Bacterial polypetide isolated from the Sargasso Sea
MSEKYLKVQNLSISEILFNFINNEIIPGSGIEEKRFWKGFNDSVHQLAEKNRRLIKMREQFQMNINKWHIDNKDKEFKQSEYQNFLRKIGYLVENKGDFFISPKNIDNEISIIAGPQLVVPITNSRYALNAANARWMSMYDSLYGTDVIESEESASERYDPERGMEVIKYSKNFLNKHFSLEKSNWEKVNKIEIKENKLLLITDKEKLYLKDKKKFIGYRGEKKNPTAVILKNNNLHIEIIINRYAYSAKSDPAGIADIILESAIFYICDHEDSVAA

SEQ ID NO: 116385 - protein, 303 aa, Unknown
  Bacterial polypetide isolated from the Sargasso Sea
MKVSSDLVQFVKDELLKETEISPENFWAGFEKTVNELAPKNRELISIRKDLQSKIDDWHIKNKGSEFNFEEYKKFLIEIGYLKNEGPDFQIETKDVDDEIAKIAGPQLVVPVMNARYALNAANARWMSLYDSLYGTDIIEQSEDSVSERYDPLRGEMVIKYGRDFLDKYFPLKDLSWKKITSFAVKDGKLKILKGADLVSLIDVDKFIGHRGESDNPSAIILRNNNLHIEILKDSRAFAAQQDHAGISDIIVESAVSTICDNEDSVAAVDSEDKIICYRNWLGLMRGDLKSKFEKDGKYMRES

SEQ ID NO: 116386 - protein, 309 aa, Unknown
  Bacterial polypetide isolated from the Sargasso Sea
LNKKDYEKFLTNIGYLVKPSPNFKIETKNVDYEISNVAAPQLVVPIMNSRYALNAANARWMSLYDSLYGTDIIQSDESASERYDPERGEEVIRYTKKFLDKHFTLKKKSWSQVSGISIEKSDLILNLINENTTIKDKNKFIGYRGKTNKPSAIILKNNNLHVEIIINPEAFSAKSDPAGISDIIMESAVTTICDHEDSVAGVDAKDKVLGYRNWLGLMKGNLKAEFEKNGKKLIRKLNPDRKFVLKTGDLSHLHGRSLLLNRNVGHLMTNPSILLSDGSEIPEGIMDAFVISIAWLHDLKIGKNSRTGS

SEQ ID NO: 116387 - protein, 278 aa, Unknown
  Bacterial polypetide isolated from the Sargasso Sea
VRNSDWKVAPIPKDLQDRRVEITGPVDRKMVINALNSGAKTFMTDFEDSMSPTWNNVINGQINLYDLWRGQIDFLDPNNGKEYKLNPDPAVLIVRPRGWHLEEAHIEIDGVRISGGIFDFAVYLFHNHAKLKEYGTGPYFYLPKMETYLEARLWNEVFVYAQEKLGIENGTCKATILIETLPAAFQMDEILYELKDHIVGLNCGRWDYIFSYIKRLALNPNYILPDRSQVIMGDAFLNSYSLLLIKTCHKRGAFAMGGMAAQIPVKNNDEENDKALKK

SEQ ID NO: 116388 - protein, 227 aa, Unknown
  Bacterial polypetide isolated from the Sargasso Sea
DIGLSCGLSGKAQIGKGMWAMPDEMKDMVDTKIAHPLSGATCAWVPSPTAATLHAMHYHEVDVLSKQDELSSRQHADLDSILTIPLLKEDLDKQTIRNEIANSAQGILGYVVRWIDQGIGCSKVPDINNIGLMEDRATCRISSQHISNWIHHGICSEEEVIDIFKEMALVVDEQNKDDSEYQKMGSNFSGFAFQASLDLAIKGTSQPSGYTEPLLHKWRLEFKKNTS

SEQ ID NO: 116389 - protein, 211 aa, Unknown
  Bacterial polypetide isolated from the Sargasso Sea
WAMPDLMAEMMKQKINHPKSGANCAWVPSPTAATLHALHYHDVDVKEVQEKILSSASSGALNDLLTLPLLKGENLSDIDIAREIENNAQGILGYVVRWIDQGIGCSKVPDINNIGLMEDRATCRISSQALANWIEHGIVSKDQVLKAFDKMAKVVDKQNADDEKYIDMSGNENSIAFKAAKELVLDGINQPSGYTEPILHQRRLEFKLQNN

SEQ ID NO: 116390 - protein, 318 aa, Unknown
  Bacterial polypetide isolated from the Sargasso Sea
LKDRRVEITGPVDRKMIINALNSNVNVFMADFEDSLSPSWENIQNGLINMRDAAHRTISFQHRVTLKKYNLRSNPAILMCRVRGLHLKEKHISCNGVPLYGALVDFVMYLYHNHKALEAFGSGPYFYIPKLQSYHEAKLWNDIISFCEDELKLKRGTVRVTCLIETLPAVFQMEEILYHLKDHIIGLNCGRWDYIFSFIKTLQSYPEKLLPDRSIITMNQPFLTSYSSLLVNTCHKRGAFAMGGMAAFVPSKDHDENRKILQKVNEDKLFEINNGHDGTWIAHPGLADYVNEIFKDKFDTFQTNQLDFISDKKITAEQ

SEQ ID NO: 116391 - protein, 352 aa, Unknown
  Bacterial polypetide isolated from the Sargasso Sea
MKILDTSVPGIEKVLTEECLEFIYDLEKNFGHKRKELLKIRAEKQKEYDAGKLPDFPSETEEVRNSDWKVAPIPKDLQDRRVEITGPVDRKMVINALNSGAKTFMTDFEDSMSPTWNNVINGQINLYDLWRNQIDFLDPNNGKEYKLNPDPAVLIVRPRGWHLEEAHIEIDGVRISGGIFDFAVYLFHNHAKLKENGTGPYFYLPKMETYLEARLWNEVFVYAQEKLGIENGTCKATILIETLPAAFQMDEILYELKDHIVGLNCGRWDYIFSYIKRLALNPNYILPDRSQVIMGDAFLNSYSLLLIKTCHKRGAFAMGGMAAQIPVKNNDEENDKAFEKVRNDKEREVNNG

SEQ ID NO: 116392 - protein, 282 aa, Unknown
  Bacterial polypetide isolated from the Sargasso Sea
ARYDAGDLPDFRADTADIRAGNWTVAAIPADLQDRRVEITGPVDRKMIINALNADVKVFMADFEDSQAPSWDGVIEGQINLRDANLGTISYSDPQSGKQYALRDKQALLIARVRGLHLWEKHLEVDGEAVPGSLVDFALYFFHNYQTRLANGSGVYYYLPKLQSYKEAAWWDAVFRFTQTKFNQAVGTIRATVLIETLPAVFEMDEILHALREHIVALNCGRWDYIFSYIKTLKNHADRVLPDRQVVTMDQPFLSAYSKLLIKTCHKRGALAMGGMAAFIPA

SEQ ID NO: 116393 - protein, 267 aa, Unknown
  Bacterial polypetide isolated from the Sargasso Sea
NMAKKYTSVGQLSVASELLNFVNNELLPGTGISNEVFWNGLDKCVHELAPKNKKLLENRENLQKKIDVWHKDRKGENINIKEYINFLEEIGYLKKTGEKFKIETKNVDEEISNIAGPQLVVPVMNARYALNAANARWGSLYDALYGTDVIPEDNGAERGKKYNYVRGERVIQYSRKLLDNFVPLQSGSWNDIKEIPKVENNQLSLKLKNIKQFAGYNKKSDVLSSLLLINNNLHIDIKFDPKHKIEGTKDKAGIYDIILESALTTIM

SEQ ID NO: 116394 - protein, 176 aa, Unknown
  Bacterial polypetide isolated from the Sargasso Sea
LREANAGHDGTWIAHPGLSQIAMNAFNQAMGSSPNQIPNKRNDVLVNAQDLIKVPDGNITEDGLRQNISIGIQYIEAWLSGNGCVPIHNLMEDAATAEISRSQIWQWIHHRAKTTDSNKTITEEYFIKTLEDEMDQLKTARGSEGDYLQPAINLFKEMSTDSEFDEFLTLPAYKHL

SEQ ID NO: 116395 - protein, 318 aa, Unknown
  Bacterial polypetide isolated from the Sargasso Sea
LISKNELKINQTLFNFINEEVLPGTDIVQDDFWSKFANVVHELAPINKKLIEKRERIQKQIDDWHLSNSKEKFDKKKYTQFLKSISYIVEEGDNFKIDTSNVDDEIAKIAGPQLVVPVDNARYALNAANARWGSLYDSLYGTDVIPGEKGKSFNKERADKVITYVRDFLDEIFSLKKDSWKNIDKIEIENDKLILNINGKKINLKNENQFVGFNGDKSSPTSILLKNNNLHFDIIIDPNSPIGKNDKANISDFIVESAISTIIDNEDSVAAVDGEDKVSCYRNWLGLMKGDLTADMEKNGKKFVKKLNPNRTYLSKRG

SEQ ID NO: 116396 - protein, 239 aa, Unknown
  Bacterial polypetide isolated from the Sargasso Sea
MKKISLNNLQINEDLLQFVNEEAIPGTNLDINNFWRDFDAAVHKLAPINKKLLKKRDEIQKQIDEWHLSKKGSDFEKKEYINFLNSIGYIAKNQGDFKIETTNVDEEISSIAGPQLVVPVDNARYALNAANARWGSLYDAVYGTDVIPGEIGKAYSEERGKKVIKYVREFLDDIFKINDGSWKEVTKIQIKNSELQFLVGDKLVFLENKNHFIGFNGKKESPSSVLLKNNKLHIDIIID

SEQ ID NO: 116397 - protein, 161 aa, Unknown
  Bacterial polypetide isolated from the Sargasso Sea
RKKAKLDDLLEIPIHLKQSWSKEQISKELRNNAQGILGYVVRWIDQSVGCSKVPDINGIGLMEDRATCRISSQHIANWLHHGICSKKQVLEIMKRMAKIVDNQNLKDKSMRGQAPYQAMASNYYQSIAFKTSCDLIFHGKNQPSGYTEPLLHFNRIMKKSI

SEQ ID NO: 116398 - protein, 172 aa, Unknown
  Bacterial polypetide isolated from the Sargasso Sea
NVFSIHQKIKFRKSAKLDDLLTIPVDKKKNWSKEDIEKELKNNAQGILGYVVRWVDQSVGCSKVPDINGVGLMEDRATCRISSQHIANWLHHGICSKKQVLEIMKKMAKVVDYQNLKDRGMKDQDPYQPMAGNFEKSIAFKAACDLVFHGKFQPSGYTEPLLHFNRLMKKSI

SEQ ID NO: 116399 - protein, 288 aa, Unknown
  Bacterial polypetide isolated from the Sargasso Sea
YGTDAMGSLPKSGTYDADRGQDVIDFAKSYLDKILPLNNCIWENLTNIQLLEKKITFKNNEKNISLQDETSLIGYIKNNSNELKEVIFEINNLKIRILFDANDRIGKEDKANISDIYFESAISTIMDCEDSVATVDGTDKVLAYRNWLGLMKGDLSASLKKGDKVIERKLNKDINYISIDGKEKFLKSRSLMLIRNVGHLMLNPGILDADGNEMPEGIMDAIFTSLIAIHDLKKIEEPRNSEKRSIYVVKPKMHGPEEVEFADEIFTEVEEMLKLPKYTVKLGIMDEE

SEQ ID NO: 116400 - protein, 186 aa, Unknown
  Bacterial polypetide isolated from the Sargasso Sea
NCAWVPSPTAAALHALHYHQINIFDIHSKLKNREKAKLDDLLNIPIIKKPKWSVEEVNKEISNSSQTILGYVVRWIDQGVGCSKVPDINNVGLMEDRATLRISSQHITNWLYHGICSRKQVLEIMKKMAKVVDEQNKNDKLYEKMSPNYDRSIAFKTACELVFQGKDQPSGYTEPLLHLNRLIKKN

SEQ ID NO: 116401 - protein, 165 aa, Unknown
  Bacterial polypetide isolated from the Sargasso Sea
KELAKRKSANLSDLLTIPIAKKPNWSFEEITKELKNNAQGILGYVVRWIDQSVGCSKVPDINGIGLMEDRATCRISSQHIANWLHHGICSKKHVLEIMKKMARVVDNQNLKDPSMKGNSPYISMSDNYEKSTAFKAACELVFHGKTQPSGYTEPILHLNRLLKKN

SEQ ID NO: 116402 - protein, 203 aa, Unknown
  Bacterial polypetide isolated from the Sargasso Sea
MLNMYKTKTMHPESGANCAWVPSPTGATLHAMHYHQILVSDRQEKLLERTKASLDDILTIPVMSDHESLSSEDVQKELDNNAQGILGYVVRWVDQGVGCSKVPDINNIGLMEDRATCRISSQHIANWLHHSICSEDQVLETMKRMALVVDQQNSGDPTYQPMAPSYDGIAFKAACNLAIQGRVQPSGYTEPILHKMRLKFKAQ

SEQ ID NO: 116403 - protein, 294 aa, Unknown
  Bacterial polypetide isolated from the Sargasso Sea
FINNEALKGIEIDEEIFWNGFSDIVDTYYPKNVALLEKRKNLQNQINNWHKENRSRDTDLDEYKSFLKEINYIVDEGPNFKITTSNVDEEISTICGPQLVVPITNARFAINAVNARWGSLYDALYGTDALGELPQGNSYDAERGNKVVKFAKSHLDKFAPLENIKWSEINKIELKDNKITLGSINENSVNFVNKNQLIGWKSSKDDKLLELILLKNNLHCRILINENDAIGKNDPANIADILVESAISSILDCEDSVATVDADDKILAYENWLGLIKGDLEAEFVKIIRLSREC

SEQ ID NO: 116404 - protein, 265 aa, Unknown
  Bacterial polypetide isolated from the Sargasso Sea
MNLVEKNGLKISSALYEFINNEAIPGTKVDSEDFWKSFSNVAHELAPINKSLIEKREVIQKKIDEWHKSNQGKEFDKEKYIKFLKSIGYLVEEKEDFEIETRNVDKEIASIAGPQLVVPVDNARYALNAANARWGSLYDALYGTDVIPGDKFKDYNSQRASKVVKYVRDFLNKSFPLKDKTWEEISKIIIKEDKLIFLIDSKKTELKNNEQFIGFNGERDNPNSILLKNNNLHVDISIDPSSIVGKNDKASISDIIVESALSTIV

SEQ ID NO: 116405 - protein, 151 aa, Unknown
  Bacterial polypetide isolated from the Sargasso Sea
YIPVNTKKDWSKDEIEIQLKNNAQGILGYVVRWVDQSVGCSKVPDINGIGLMEDRATCRISSQHIANWLHHGICSKKQVLEIMKKMARVVDYQNLKDRGMKDQDPYQPMAGNFEKSIAFKAACDLIFHGKHQPSGYTEPLLHFNRLIKKSI

SEQ ID NO: 116406 - protein, 212 aa, Unknown
  Bacterial polypetide isolated from the Sargasso Sea
APDLMGEMMKQKISHPLAGANCAWVPSPTAAALHALHYHEVDVFAKQKELSKRKVAKLSDLLTIPIEKKPRWSMDEITKELKNNAQGILGYVVRWIDQSVGCSKVPDINGIGLMEDRATCRISSQHIANWLHHGICSKKHVLEIMKKMAKVVDSQNLKDPSMKGHTPYKPMSDNFDKSTAFKAACELVFHGKTQPSGYTEPILHLNRLLKKN

SEQ ID NO: 116407 - protein, 258 aa, Unknown
  Bacterial polypetide isolated from the Sargasso Sea
NKGSEFNFEEYKKFLIEIGYLKNEGPDFQIETKDVDDEIAKIAGPQLVVPVMNARYALNAANARWMSLYDSLYGTDIIEQSEDSVSERYDPLRGEMVIKYGRDFLDKYFPLKDLSWKKITSFAVKDGKLKILKGADLVSLIDVDKFIGHRGESDNPSAIILRNNNLHIEILKDSRAFAAQQDHAGISDIIVESAVSTICDNEDSVAAVDSEDKIICYRNWLGLMRGDLKSKFEKDGKLYERKLNPNRSYISKEGKGLK

SEQ ID NO: 116408 - protein, 227 aa, Unknown
  Bacterial polypetide isolated from the Sargasso Sea
DIGISCGLSGKAQIGKGMWAMPDEMKDMVETKIAHPLSGATCAWVPSPTAATLHAMHYHEVDVLSKQDELSSRQQADLDNILTIPLLKQDLDKQTIRNEIANSAQGILGYVVRWIDQGIGCSKVPDINNIGLMEDRATCRISSQHISNWIHHGICSEEEVIDIFKEMALVVDEQNKDDSDYQKMGSNFSGFAFQASLDLAIKGVSQPSGYTEPLLHKWRLEFKKNTP

SEQ ID NO: 116409 - protein, 157 aa, Unknown
  Bacterial polypetide isolated from the Sargasso Sea
LKKRKKAKLDDLLTLPIVKKPNWSLDEINKEISNSSQTILGYVVRWIDQGVGCSKVPDINNVGLMEDRATLRISSQQITNWLYHGVCSRKQVLEIMKKMAKVVDEQNKHDKNYQKMSPNYDRSIAFKTACELVFQGKDQPSGYTEPLLHLNRLIKKS

SEQ ID NO: 116410 - protein, 154 aa, Unknown
  Bacterial polypetide isolated from the Sargasso Sea
MTKRLNRGNLQISETLINFIEKEALPNTHVDEASFWNNFELILNKFVPKNKELLEIRNKMKKLIDEFYKSNSGKIIDQDEYVSFLKKINYIVPVGDDFKIETKNIDPELATKAGPQLVVPVTNARYALNAANARWGSLYDALYGTDAISDEGNA

SEQ ID NO: 116411 - protein, 105 aa, Unknown
  Bacterial polypetide isolated from the Sargasso Sea
KVPDINNVGLMEDRATLRISSQHIANWLHHGICKEDQVMEVMKKMAKIVDEQNKNDPTYQKMSDNFDKSVAFSAACDLVFKGRVQPSGYTEPLLHQKRLEKKASN

SEQ ID NO: 116412 - protein, 261 aa, Unknown
  Bacterial polypetide isolated from the Sargasso Sea
MKPKEVGLIISPSLKEFVRTEVLPGLDISTHYFWSSFESLIDKFVNRNNELLDKRNYMQDQINDWHIKNRNSEFNLEEYKNFLTDIGYIYPRSGDFKIETWNVDPEIRKIAGPQLVVPVMNARFALNAVNARWGSLYDALYGTDVISEENGAQREGGYNPVRGDKVIEFAKKFLDDTIPLDKGTYDQVIKFDFIDSELLMTLKDGSKVNLKDIDKYVGYKDKGEGAYGLLFKNNNLHFEIQIDRSHPIGQEDIAGNQDILM

SEQ ID NO: 116413 - protein, 218 aa, Unknown
  Bacterial polypetide isolated from the Sargasso Sea
LKGNAQIGKGMWPMPDEMLEMYKTKTMHPEAGANCAWVPSPTAATIHAMHYHQISVQDQQGKIINRDKAKLDDLLNIPFLKKDKLPSKEEITAELENNAQGILGYVVRWVDQGIGCSKVPDINDIGLMEDRATCRISSQHISNWLHHGLCSEVEVVETMKKMAKKVDQQNKNDVNYKKMAPSYDGIAFKAACELAIKGKHQPSGYTEPILHEMRLRRK

SEQ ID NO: 116414 - protein, 223 aa, Unknown
  Bacterial polypetide isolated from the Sargasso Sea
MIDQAGLQVAPALSQFIENEALPGTGIDKAAFWSGFSALVHDLAPRNRELLAERDRLQQELDTWHRAHPGPVRDHAAYRAFLEQIGYLVPVPSNVAAATANVDSEIATQAGPQLVVPLSNARYALNAANARWGSLYDALYGTDALPEDGGAERTTAYNPTRGQRVIDYARNVLDNAAPLASGSHRDALRYRVQDGQLAVETAKGVVHLAQPAQFVGYKGAADA

SEQ ID NO: 116415 - protein, 209 aa, Unknown
  Bacterial polypetide isolated from the Sargasso Sea
MPDKMKEMMDEKISHLKAGANCAWVPSPTAASLHALHYHQINIFDEQKKILKREQAKLDNLLTIPIANRPNWSLDEINSEISNSAQTLLGYVVRWIDQGVGCSKVPDINNVGLMEDRATLRISSQHIANWIHHGITTKLQVIEIMKQMAKIVDKQNESDKNYIKMSDDFERSQAFKTACDLVFKGKEQPSGYTEPLLHYNRLKKKINQN

SEQ ID NO: 116416 - protein, 280 aa, Unknown
  Bacterial polypetide isolated from the Sargasso Sea
KDELILETFKKKTKLKNKNKFIGYRGSKEKTEAVILKNNNLHVEIIINPDAFSAKGDAAGISDVIVEAAVTTICDHEDSVASVDASDKVIGYKNWLGLMKGSLKANFEKKGKSLIRKLNPDRKYITKNGVVSKLHGRALLLNRNTGHLMTSPAILLQDGSEIPEGIMDAFITSLCSLHDLKIKKNSKEGSIMIVKPKQHGPDECEFTDYLFSKVEQVLNLKKYTIKCGIMDEERRTSINLKECIRKLQNRVFFINTGFLDRTGDEIHTSMESGPRLKRET

SEQ ID NO: 116417 - protein, 207 aa, Unknown
  Bacterial polypetide isolated from the Sargasso Sea
APDEMKKMIEEKIGHLKAGANCAWVPSPTAASLHALHYHEIDIFDVQKKLALRSPAKLDDLLNIPIANRPNWSVDEINSEISNSAQTLLGYVVRWIDQGIGCSKVPDINNIGLMEDRATLRISSQHIANWIHHGITTKIQVIEIMKEMAKVVDEQNKNDINYKKMSDNFDKSLAFKTACELIFKGKEQPSGYTEPLLHFYRLEKKLS

SEQ ID NO: 116418 - protein, 236 aa, Unknown
  Bacterial polypetide isolated from the Sargasso Sea
MVEKSGLKVSSTLLEFINNEVIPNTNVNIDKFWKKFSEVVHELSPINKALIQKRETIQKKIDDWHKSNKGKEFNKKEYVNFLKSIDYLIDEKNDFEIETADIDEEISSIAGPQLVVPVDNARYALNAANARWGSLYDALYGTDIISGSIGKSWDQERAKKVINFVRDFLDERIPLAQTSWKNVSKFKIEKNKLVVFSNSKEYFLKNNEQFIGYKGDKENPNSILIKNNNLHIDILI

SEQ ID NO: 116419 - protein, 259 aa, Unknown
  Bacterial polypetide isolated from the Sargasso Sea
VDNEISSICGPQLVCPVSNARFLLNAANARWVSLYDSLYGTDLIPETHGALRGKTYNPIRGKKVILYARDLLDKYIPLEGKSWKEISKIPEVKNNKLNLKLKYPKQFVGYRKKTNKLCSLLFINNNLHIDILFDQSGDMEINNPEGNQDVLKIHDIILESAISTICDHEDSVAAVDAEDKVLGYQNWLGLMKLELKSEFKKNGKNIIRKLNPDRYYVSSKGKKIKLHGRSLMLNRNVGHLMTNPAILLKDGSECPEGIH

SEQ ID NO: 116420 - protein, 255 aa, Unknown
  Bacterial polypetide isolated from the Sargasso Sea
MNKKYQNVNNLKVSDELLSFVNDELLKETSISPEKFWQGFDNIVHELSPLNKKLIEKREILQKKIDDWHIKNRGAEIKIEEYKKFLKEIDYLKDEGSDFQIETSNVDDEIARIAGPQLVVPIMNARYTLNAANARWVSLYDSLYGTNIIESEEGGSERYDPNRGQEVIKYVREFFDKCIPIQGTSWKNIAALKIVNKELVILKDDYEYKLKDKSKFVGHRGDANKPEAVIIKNNNLHFEIIINPKAFSAAHDMQE

SEQ ID NO: 116421 - protein, 255 aa, Unknown
  Bacterial polypetide isolated from the Sargasso Sea
IKNKDKFFNKEVYKSFLYKIGYIVPERENFKIKTKNIDDEISSLAGPQLVVPLLNARYAINAANARWGSLYDALYGSDIISSKGKLKISKNYNRYRGAEVIKLAKSHLDKYFPLEGYSYYDVKNVEIIDSKLNFFSSDSEKVKLVNEMQFVGYIGQKKSPDEIILEQNGLKIRLQIDKLDPIGKNDNFNLKDIKVESALSVIMDCEDSIVSVDASDKVSTFKNWLGLLDETIQVKVSKNQKSFIRKLNNDLEYIL

SEQ ID NO: 116422 - protein, 227 aa, Unknown
  Bacterial polypetide isolated from the Sargasso Sea
TLKKYNLRSNPAILMCRVRGLHLKEKHITYNNTQLYGALVDFVMYLYHNHKALDRFGSGPYFYIPKLQSYKEAKLWNDIICFCEDELNLDRGTVRVTCLIETLPAVFQMEEILYYLKDHIIGLNCGRWDYIFSFIKTLQSFPEKLLPDRNIITMNQPFLTAYSTLLVNTCHKRGAFAMGGMAAFVPSKNHDESRKILQKVRDDKLFEINNGHDGTWIAHPGLAVLCK

SEQ ID NO: 116423 - protein, 255 aa, Unknown
  Bacterial polypetide isolated from the Sargasso Sea
IGYTGNPKAPSSVLLKNNGLCVELVFDRAHVIGSRDQAGLADVRLESALSAIIDLEDSVACVDGADKVSAYASWLGLMKGNLTSEFEKNGKKITRSLNSDLSFISPDGDDFSVKSKALLWIRNVGHLMTTPAVIDANGDEVYEGLLDAMVTTMIGIHDLKKPDGNSRHGSIYIVKPKMHGPAEVAFADKMFSAVETFLGLKQYSVKLGIMDEERRTSVNLKECIRAAKGRVAFINTGFLDRTGDEIHTSMEAGPF

SEQ ID NO: 116424 - protein, 190 aa, Unknown
  Bacterial polypetide isolated from the Sargasso Sea
MNKIKNQYHLVGKLFVNKILYNFVNKELLKKTKIKPKQFWSGLDRSLYLLRDKNQKLIETRKELQNHIDRWHLKNKNKKFNINKYKKFLSEIGYLKKQTSNFKIQTSNIDNEIAKIPGPQLVVPVSNARYALNAANARWGSLYDALYGTDAIGSEKLDNRYNPIRGGKVIRYCRDFLDEIFPLKNGSGKK

SEQ ID NO: 116425 - protein, 96 aa, Unknown
  Bacterial polypetide isolated from the Sargasso Sea
IGLMEDRATLRISSQHIANWLHHGLCSNRQVLEILKKMAKVVDKQNEDDSNYESMSPEYDKSIAFKAACELIFHGKSQPSGYTEPLLHLNRLIKKS

SEQ ID NO: 116426 - protein, 214 aa, Unknown
  Bacterial polypetide isolated from the Sargasso Sea
MQAGSFMKKNDMKNASWISSYEKRNVSIGLECGLKGKAQIGKGMWAMPDLMAEMIKQKINHPKSGANCAWVPSPTAATLHALHYHEVNVKDVQEEILSSASSGTLNDLLTLPLLKGENLSEIDITREIENNAQGILGYVVRWIDQGIGCSKVPDINNIGLMEDRATCRISSQALANWIEHGVVSKDQVLKAFDKMAKVVDEQNSNDEKYIPMSD

SEQ ID NO: 116427 - protein, 183 aa, Unknown
  Bacterial polypetide isolated from the Sargasso Sea
MPETTKVAGLSVATTLFNFINDEAIPGTGLSSEPFWKEFAALIEKLSPRNKELLEKREMLQSKIDAWHIGHRDQDFDPQEYREYLLSIGYLIPEGDTFSINTKNVDPEISSVAGPQLVVPVTNARYALNAANARWGSLYDALYGTDVISEDEGAERDGAYNPLRGAKVIKFAKDFLDRAAPLA

SEQ ID NO: 116428 - protein, 182 aa, Unknown
  Bacterial polypetide isolated from the Sargasso Sea
IYYISEEKEDFKIETSDVDQEIASIAGPQLVVPVDNARYALNAANARWGSLYDALYGTDVIPGDKGENFNEDRAKKVITYVRNFLDEAAPIIDISWKEITSIKVKDSDIVFFSVNKESYLKDKKQFIGFNGKEDNPTSVLIKNNNLHIDILIDSNHKIGKSDKASISDIIIESALSTIIDNE

SEQ ID NO: 116429 - protein, 275 aa, Unknown
  Bacterial polypetide isolated from the Sargasso Sea
IISRGKLSILDILFKFVNEELLPGTNVDKEKFWNGFENCVHELAPINKKLVEFREILQKKINNWHKERKGKQININEYSNFLKEIGYLKEEGKNFQIETENVDKEISTIAGPQLVVPIMNARYSLNAANARWGSLYDALYGTDVIPESGGAERGKKYNYIRGEKVIAYARQILDKNIPLENGSWKDISEIPKVEKNKLNLKLKNPKQFVGYLKDKNNLTSLLFQNNNLHIDVRFDVNQTRGGLKDKAGIYDVVLESAITSIMDHEDSVAAVDAQD

SEQ ID NO: 116430 - protein, 156 aa, Unknown
  Bacterial polypetide isolated from the Sargasso Sea
MEREPANLDDILRIPLEEQPNWSEEEIRKELENNCQGILGYVVRWIDQGVGCSKVPDIQDVGLMEDRATLRISSQMLANWLLHGIVSEEQVTQALERMATVVDRQNAGDPFYQPMAPSFEGIAFQAARDLVFKGTEIPNGYTEPTLHARRRELKSA

SEQ ID NO: 116431 - protein, 201 aa, Unknown
  Bacterial polypetide isolated from the Sargasso Sea
MDQKTGHLKAGANCAWVPSPTAAALHALHYHQINIFDEQKKLYNRDQAKLDDLLTIPVADRPNWSVEEINKEICNSAQTLLGYVVRWIDQGVGCSKVPDINNVGLMEDRATLRISSQHIANWIHHGITTKIQVKEIMKEMARVVDKQNEGDKNYIKMSDNFEKSLAFNTACNLIFKGKDQPSGYTEPLLHSNRITKKLLSI

SEQ ID NO: 116432 - protein, 146 aa, Unknown
  Bacterial polypetide isolated from the Sargasso Sea
MIDKNNLKISSTLFEFINKEAIPGTNINEDEFWSNFSKYVHELSPINKKLIEERENIQKKIDEWHKSKSGSDFNSSEYINFLKSINYLVEEKDDFKIETSDVDSEISSIAGPQLVVPVDNARYALNAANARWGSLYDALYGTDVIP

SEQ ID NO: 116433 - protein, 174 aa, Unknown
  Bacterial polypetide isolated from the Sargasso Sea
LHYHQINIFDEQQNIKKREQAKLDDLLDIPIATNPDWSEKEIYTEISNSAQTLLGYVVRWIDQGIGCSKVPDINNIGLMEDRATLRISSQHIANWIHHGIVTKKKVMEIMQEMAKVVDKQNMNDKRYINMSDDFERSRAFKTACDLIFKGKEQPSGYTEPLLHFNRLKRKINQN

SEQ ID NO: 116434 - protein, 267 aa, Unknown
  Bacterial polypetide isolated from the Sargasso Sea
PLKNCSWNEINKIQKEKGELKFYFNDIKYTTLKFVEQIVGLKTSSSNKINELILIKNNLHVRIIFNPEHPIGKNDSANISDIILESAISTILDCEDSVATVDAEDKILAYQNWLGLMKGDLKTNFSKNGKTITRSLNNDIKIQSLKEEEITLKGRSLMLIRNVGHLIQTPMILDQNGDEVYEGLVDAVITSLIALFNFKKKENKNSNYNSLYIVKPKMHGPEEVSFACKTFDEIEKFLKLAKNTIKIGIMDEERRTSVNLKECIREA

SEQ ID NO: 116435 - protein, 225 aa, Unknown
  Bacterial polypetide isolated from the Sargasso Sea
MNYIEKNNLKIDSILFEFINKEVIPGTDITPEDFWKNFGKTVHELAPTNKSLIEKREAIQKKIDDWHKKNGGKDFNKEQYINFLKSISYIIDAKEDFKINTSNVDKEISSIAGPQLVVPVDNARYALNAANARWGSLYDALYGTDVIPGEKGKGHNKERANKVISYVREFLDQVFSIGGGSWKEISKIQIDGDELVLIINEKKNYLKNKKQFVGFNGEKNEPHSV

SEQ ID NO: 116436 - protein, 216 aa, Unknown
  Bacterial polypetide isolated from the Sargasso Sea
MWAMPDKMKDMMEQKTGHLKAGANCAWVPSPTAAALHALHYHEINIFDEQKKLTDRKPAELDDLLTIPIADRPNWSVEDINKEISNSAQTLLGYVVRWVDQGVGCSKVPDINNIGLMEDRATLRISSQHIANWIHHGITTKIQVTEIMKDMAKIVDEQNKNDPQYIKMSKDYENSIAFQTACDLVFKGKEQPSGYTEPLLHLNRLKKKSNLSSKTN

SEQ ID NO: 116437 - protein, 195 aa, Unknown
  Bacterial polypetide isolated from the Sargasso Sea
KISHLEAGANCAWVPSPTAAALHALHYHKINIFEKHAELEKRQKAKLNDLLNIPIVRKPNWSIEEINKEISNSAQTILGYVVRWIDQGVGCSKVPDINNVGLMEDRATLRISSQQITNWLYHGICSRKQVLEIMKKMAKVVDDQNKNDKLYQKMSPNYDRSIAFKTACELVFQGKDQPSGYTEPLLHLNRLIKKN

SEQ ID NO: 116438 - protein, 228 aa, Unknown
  Bacterial polypetide isolated from the Sargasso Sea
MSLTEKNGLKISSKLFDFINNEVIPGTNVKSDEFWNNFEKSVHELAPINKNLIEKRENIQKKIDEWHKKNKNIEHDKKKYTEFLKSISYIVEEKEDFKIGTSNVDNEISSIAGPQLVVPVDNARYALNAANARWGSLYDALYGTDVIPGSKFKEFNEERASKVIAYVRKFLDEIAPLEKLSWSEISEIKVKDEDIQFLSGKNEIYLKDKNQFIAFNGEKNKPSSILIK

SEQ ID NO: 116439 - protein, 119 aa, Unknown
  Bacterial polypetide isolated from the Sargasso Sea
GYVVRWVDQGVGCSKVPDINNVGLMEDRATLRISSQHIANWLHHGICNKEQVMKIMKKMAKTVDDQNKNDPKYKKMSEDFEKSIAFSAACDLVFKGRVQPSGYTEPLLHQKRLEKKSTN

SEQ ID NO: 116440 - protein, 179 aa, Unknown
  Bacterial polypetide isolated from the Sargasso Sea
MSYVEAGGFRVADVFFRFINEEALPGTEINQDSFWNSFGAIVADFAPINRKLLETRDAMQAKLDSWHREHRGQPIDAEAYKDFLKQIGYLVDEGPEFEIGTKNVDAEFTSMAGPQLVVPVTNARYALNAANARWGSLYDALYGTDAVDEKDGASRVGAFNPVRAERVVSWSKSLLDQAA

SEQ ID NO: 116441 - protein, 287 aa, Unknown
  Bacterial polypetide isolated from the Sargasso Sea
KYQRNCYFFVNNELFKGTDISPEKFWKDFDKAVHELAPKNKELIDFREILQKKIDKWHIDKKGKDIQIEDYKNFLKEIGYLKNEGSDFKIETSDIDDEIATIAGPQLVVPIMNARYALNAANARWMSLYDSLYGTDVIEDSEDSTSERYDPERGEIVIKYGRDFLDKYFTLKDFSWRKITGIAIQNKELKVLKGVDVTTLKDENKFIGHRGEADNPSAIILKNNNLHIEILKNPRAFSAQQDHAGISDIILESAVSTICDNEDSVAAVDAQDKVVCYRNWLGLMKGD

SEQ ID NO: 116442 - protein, 257 aa, Unknown
  Bacterial polypetide isolated from the Sargasso Sea
LEKKGKKINLNDYKKFLKKINYLKKSGKNFKIQTKNVDNEISNICGPQLVCPVSNARFLLNAANARWVSLYDSLYGANIIPETKGALKGKTYNPIRGEKVIYYSRELLDKYIPLKNQSWKNLKKIPHIKKGKLNIKLKDTKQFVGFRKKNGKLFSILFVNNNLHLDILFDQKGNLEVNNPDGNQDPLKIHDIFLESAITTICDHEDSVAAVDAEDKVLGYRNWLSLMKGNLTSKFRKNNKTIKRKLKLDREYLSPKR

SEQ ID NO: 116443 - protein, 216 aa, Unknown
  Bacterial polypetide isolated from the Sargasso Sea
MWAMPDLMKDMMKQKIVHPLAGANCAWVPSPTAASLHALHYHEVDVFAKQRELSKRKSAKLSDLLTIPVANKTNWSIDEINRELKNNAQGILGYVVRWIDQSVGCSKVPDINGIGLMEDRATCRISSQHIANWLHHGICSKKQVMEIMKKMAKVVDGQNLKDKSMKGQLPYQSMAGHFDKSIAFKAACDLVFHGKHQPSGYTEPLLHFNRLMKKSI

SEQ ID NO: 116444 - protein, 286 aa, Unknown
  Bacterial polypetide isolated from the Sargasso Sea
NFWSGFSSAAHELSKKNKELLEKREELQIKINTYNKNKKGKKFIVKEYERFLYKIGYIKKKGQNFKIKTKNVDDEVAKICGPQLVCPVSNSRFLLNAANARWVSLYDSLYGSDLIESEESASERYDPERGLEVIKYTKKFLDDFFPLKKDKWINIKKIKIEKKQLKLITYKCVDELKNKNKFVGYRGDKENPSTVILKNNNLHLEIIINPKAFSAKSDAAGISDIIVEAAITTICDFEDSVAAVDAEDKINCYRNWLGLMKKELSSQFIKNGKSYRRKLNPDRKYF

SEQ ID NO: 116445 - protein, 134 aa, Unknown
  Bacterial polypetide isolated from the Sargasso Sea
EINSEITNSAQTLLGYVVRWIDQGIGCSKVPDINNIGLMEDRATLRISSQHIANWVHHGITTKIQVIEIMKEMAKVVDEQNKNDKNYTKMSDDFENSIAFQTACDLIFKGKEQPSGYTEPLLHSNRLTKKLNLN

SEQ ID NO: 116446 - protein, 244 aa, Unknown
  Bacterial polypetide isolated from the Sargasso Sea
IKGTGIDRDNFWSGFDKAVHELAPINKKLLQKRDEIQKKIDEWHLLNKGNSFDEKKYFNFLKSIGYMVEQKEDFKINTSNVDEEIATIAGPQLVVPVDNARYALNAANARWGSLYDALYGTDATPGNKGKEYNEERGYAVISYVRNFLDESVPISNAKWNEVKKFKIEDDKLVLFFTSEKYFLKNNDQFIGFQGEKNSPKSILLKNNNLHIDIVIDSNSRVGKMDSANISDVIIESAISTIVDN

SEQ ID NO: 116447 - protein, 309 aa, Unknown
  Bacterial polypetide isolated from the Sargasso Sea
LGYRNWLGLMKGNLQTSFVKSGKIYLRKLNPDRKCMSPEGKEFRLQGRSLLLCRNVGHLMTNPAILLKDGSEIPEGIMDSFITVACALHDLKKRKNSQNGSVYIVKPKMHGPDECKFTVEIFESVEKLLKLKKNTIKIGLMDEERRTSVNLKECVRILKDRIVFQNTGFLDRTGDEIHTSNNAGPMIKKAEMKKSKWIQAYENNNVEVGLKCGFSGLAQIGKGMFAMPDLMAEMMKEKISHPLSGANCAWVPSPTAAALHSLHYHEVNVFDIHKKIIKKNNTSSIDDLLTIPISDKTNWSIEEINLKIS

SEQ ID NO: 116448 - protein, 174 aa, Unknown
  Bacterial polypetide isolated from the Sargasso Sea
HYHQINIFDEQQKIINRNRAKLNDLLTIPVADRPNWSVNEINKEISNSAQTLLGYVVRWIDQGIGCSKVPDINNIGLMEDRATLRISSQHITNWIHHGITTKIQVMEIMKQMAKIVDDQNAGDKNYVRMSDNFEKSLAFKTACDLIFKGKEQPSGYTEPLLHLNRLKKKASQNL

SEQ ID NO: 116449 - protein, 270 aa, Unknown
  Bacterial polypetide isolated from the Sargasso Sea
RNIELLEKRKNYKNKIDEWHKKNISKNIDIEQYKSFLKEISYIVEEGPDFKITTSNIDEEISTISGPQLVVPITNARFAINAVNARWGSLYDALYGTDALGEGPQGKSYDPERGNKVVIFAKSHLDKFAPLENTKWNEINKIKIKDNKIILGSFKESNVNFVNKNNLVGWLSSKDNRISELILKKNNLHCRILINADDPIGKKDPANISDILIESAISTILDCEDSVATVDATDKILAYKNWLGLIKGDIKATFVKNTQTVNRVLNKDIV

SEQ ID NO: 116450 - protein, 266 aa, Unknown
  Bacterial polypetide isolated from the Sargasso Sea
KDHIIGLNCGRWDYIFSFIKTLQSFPEKLLPDRSIITMNQPFLTSYSTLLVKTCHKRGAFAMGGMAAFVPSKNHDENRKILQKVNEDKLFEINNGHDGTWIAHPGLADYVNEIFKDKFDTFQTNQLDFISDEKITAEQLLQGCDGVSSEDCLRSNIRISLKYIEAWISGLGCVAIYGLMEDAATAEISRTSIWQWIKHKNKLDNGKIVDEQLFRTYLEEELLNVKNEVGIEIFENGKFDLAKSIFEQITLSENVEEFLTTKAYEEL

SEQ ID NO: 116451 - protein, 139 aa, Unknown
  Bacterial polypetide isolated from the Sargasso Sea
FSKQIEIMKRKKAKLDDLLEIPINSPKNKWSKSQISEELKNNTQGILGYVVRWIDQSVGCSKVPDINGIGLMEDRATCRISSQHIANWLHHGICSKKQVLEIMKKMAKIVDNQNLKDKSMKGQDPYQSMGANYYQSIAF

SEQ ID NO: 116452 - protein, 187 aa, Unknown
  Bacterial polypetide isolated from the Sargasso Sea
SPTAAAIHALHYHAVNVFSIHQKLKNRKRAKLDDLLTIPVETKKDWTKDEIEKELKNNAQGILGYVVRWVDQSVGCSKVPDINGVGLMEDRATCRISSQHIANWLYHGICSKKQVLEIMKKMARVVDYQNLKDRGMKDQNPYQPMAGNFEKSIAFKAACDLIFHGKYQPSGYTEPLLHFNRLIKKSI

SEQ ID NO: 116453 - protein, 201 aa, Unknown
  Bacterial polypetide isolated from the Sargasso Sea
KKMLEEKIGHLNAGANCAWVPSPTAASLHALHYHKVNVFDIQKKLSSRTQAKLDDLLTIPIADRPNWSVDEINSEISNSAQTLLGYVVRWIDQGIGCSKVPDINNVGLMEDRATLRISSQHIANWIHHGITTKMQVIEIMKQMAKIVDEQNKNDKNYVKMSDNFDSSIAFKAACDLIFKGLEQPSGYTEPLLHHNRLIKKS

SEQ ID NO: 116454 - protein, 147 aa, Unknown
  Bacterial polypetide isolated from the Sargasso Sea
MSITEKNGLKISSNLFNFINNEVLPGTDILPDKFWDGFEKAVHELAPINKNLILKREDIQKKIDEWHKQNKGIELNKKDYTKFLESISYIAKEKEKFSIETSNVDSEISSIAGPQLVVPVDNARYALNAANARWGSLYDALYGTDVI

SEQ ID NO: 116455 - protein, 281 aa, Unknown
  Bacterial polypetide isolated from the Sargasso Sea
MIQKKNIKINEKLYDFINNEALKGIEIDEEIFWNGFSDIVDTYFPKNVTLLEKRKNLQNKINNWHEENRSRDTDLDEYKSFLKEINYIVDEGPDFKITTSNVDKEISTICGPQLVVPITNARFAINAVNARWGSLYDALYGTDALGEVPQGNSYDPERGNKVVGFAKSHLDKFAPLENIKWSEINKIELQDNKIILGSIKENSVNFVNKNQLIGWRSSKDGQLLEIILLKNNLHCRILINENDAIGKNDPANISDILLESAISSILDCEDSVATVDADDKI

SEQ ID NO: 116456 - protein, 245 aa, Unknown
  Bacterial polypetide isolated from the Sargasso Sea
MVPILKYKQKNVDNEISSICGPQLVCPVSNARFLLNAANARWVSLYDSLYGADIIPETRGALKGSTYNPIRGKEVILYSRNLLDKIVPLKNKSWRDLNEIPKILNNKLKLDLLNQNQFIGYSKVSNNISSILFKNNNLHIDILFDQSGKMEVNNPEGNQDPLKIHDIFLESAITTICDHEDSVAAVDAEDKVHGYKNWLLLMKGELKSSFIKNGKKTLRKLNKDRNYISTKGSKYKLHGRSLLLN

SEQ ID NO: 116457 - protein, 198 aa, Unknown
  Bacterial polypetide isolated from the Sargasso Sea
LTKKISHLEAGANCAWVPSPTAAALHALHYHELNIFDKHLEIKKRQKAKLENLLQIPVVKKPNWSVEEVNKEISNSAQTILGYVVRWIDQGIGCSKVPDINNIGLMEDRATLRISSQQVANWLHHGICSRKQVLEIMKKMAKVVDEQNKGDKFYQSMSPHYDRSIAFKTACELVFQGKDQPSGYTEPLLHLNRLIKKN

SEQ ID NO: 116458 - protein, 227 aa, Unknown
  Bacterial polypetide isolated from the Sargasso Sea
LNSYSLLLIKTCHKRGAFAMGGMAAQIPVKNNDEENDKAFEKVRNDKEREVNNGHDGTWVAHPGLVPVAMEIFDNQLSGDNQLDVSLDNITITQDDLLEVHKGQRTEEGMRECIKVGVQYIEAWLAGRGAVPLYNLMEDAATAEISRAQIWQWLKHATKLDDGRTVNEELFKDILTSEIDNLKNVLGDDVWAKGKYEKAVEIFEKMSISPVCEEFLTLPAYEEIVSS

SEQ ID NO: 116459 - protein, 218 aa, Unknown
  Bacterial polypetide isolated from the Sargasso Sea
MGIAQIGKGMFAEPDNMNKMMIEKINHLNAGANCAWVPSPTAAALHSLHYHEIDIFKRQLELKKRKKVRQKDLLKIPYANGKRWKIEEIRSEIANCAQSILGYVVRWIDQGIGCSKVPDINGIFLMEDRATLRISSQLIANWLHHGVCSRKQVLEIMKKMAKVVDNQNVKDKNYQNMFPNYDKSIAFKTACELIFQGKDQPSGYTEPLLHLNRLIKKN

SEQ ID NO: 116460 - protein, 172 aa, Unknown
  Bacterial polypetide isolated from the Sargasso Sea
NIFNEQKKLTDREPAKLDDLLTIPIADRPNWSVEDINKEISNSAQTLLGYVVRWVDQGVGCSKVPDINNIGLMEDRATLRISSQHIANWIHHGITTKIQVTEIMKEMAKIVDDQNKDDPLYVKMSSDYENSIAFQTACDLVFKGKEQPSGYTEPLLHLNRLKKKSNLSSKPN

SEQ ID NO: 116461 - protein, 217 aa, Unknown
  Bacterial polypetide isolated from the Sargasso Sea
DKAVHELFPINKKLISIRSEMQKKIDDWHIKNKGKQLDIKKYENFLKEIGYLVKEGSKFSIETKNVDSEISNIAGPQLVVPVKNARYSLNAANARWGSLYDALYGTDVIPESNGAERGKKYNYVRGEKVIEYARKFLDSIIPLEKGSWKDISEIPKVENNLLNLKLKNPKQFVGYSKKSNDISSLLFLNNNLHIDVKFDSNKTRGETKDKAGIYDII

SEQ ID NO: 116462 - protein, 278 aa, Unknown
  Bacterial polypetide isolated from the Sargasso Sea
PSILLEDGSEIPEGILDAFITCLCCLHDLKSKKNSKTGSIMIVKPKQHGPDECGFTDLIFEKVEKVLGLEKYTIKCGIMDEERRTTLNLKECIRKLENRVFFINTGFLDRTGDEIHTSMESGPMIKKGDMKQSVWIKAYENNNVDIGLKCGFSGIAQIGKGMYPEPDNMSKMLNEKIVHLNAGANCAWVPSPTAAALHALHYHDIDIFKRHEIIKKRKKINKFDLLDIPTISKPNWSNNEIRNEIANCAQSILGYVVRWIDQGIGCSKVPDLNGINLM

SEQ ID NO: 116463 - protein, 155 aa, Unknown
  Bacterial polypetide isolated from the Sargasso Sea
MNYVEKNNLKIDSKFFEFINKEVIPGTNINSEDFWTNFGKIVHELAPINKSLIKKREIIQKKIDDWHKKNMGKDFNKEQYINFLKSISYIVDSKEDFKINTSNVDKEISSVAGPQLVVPVDNARYALNAANARWGSLYDALYGTRCNSRRKRRKL

SEQ ID NO: 116464 - protein, 183 aa, Unknown
  Bacterial polypetide isolated from the Sargasso Sea
MTKRLRRGNLQVSETLTNFIENEALTDTNISPDMFWEKLEAILNQFVPRNKELLQIRSEIKSKIDKFYLENSSKDINHEEYIKFLKKINYIVSERENFQINTKNVDDELALKAGPQLVVPVTNARYALNAANARWGSLYDALYGTDAISENGNAERSTSYNPIRGNKVISYAKEFLDKNFPLQ

SEQ ID NO: 116465 - protein, 125 aa, Unknown
  Bacterial polypetide isolated from the Sargasso Sea
AQTLLGYVVRWIDQGIGCSKVPDINDVGLMEDRATLRISSQHIANWIHHRIISKNKVLEIMKDMAKIVDKQNKNDKRYINMSDDYDRSRAFKTACDLIFKGKEQPSGYTEPLLHLNRLKRKINQN

SEQ ID NO: 116466 - protein, 186 aa, Unknown
  Bacterial polypetide isolated from the Sargasso Sea
VPSPRAATLHSMHYHQVNVINIQNEIIKKGIKTNLNNLINLPLLRGKNLSEEEITSEIENNAQGILGYVVRWIDQGIGCSKVPDINNIGLMEDRATCRISSQSLVNWILHDIVSKDKVEKSLKKMAQIVDNQNKHDPNYIKMSPDFNTLAFKAAHDLIFEGLNQPSGYTEPILHKRRLQIKNLNNS

SEQ ID NO: 116467 - protein, 227 aa, Unknown
  Bacterial polypetide isolated from the Sargasso Sea
FNSYSLLLIKTCHKRGAFAMGGMAAQIPVKNNDEENDKAFEKVRNDKEREVNNGHDGTWVAHPGLVPVAMEIFDNQLSGDNQLDVSLDNITITQDDLLEVHKGQRTEEGMRECIKVGVQYIEAWLAGRGAVPLYNLMEDAATAEISRAQIWQWLKHATKLDDGRTVNEELFKDILTSEIDNLKNVLGDDVWAKGKYEKAVEIFEKMSISPVCEEFLTLPAYEEIVSS

SEQ ID NO: 116468 - protein, 234 aa, Unknown
  Bacterial polypetide isolated from the Sargasso Sea
MQVDEDLKNFVNNELLNGLDITPDFFWQTLENLIYVYGPLNKSLLEKRKLLQDKIDEWHINNKDKNFNFDNYKNFLYEIGYIVPESDDFSIATKNVDPEISSIAGPQLVVPVMNARFALNAANARWGSLYDALYGTNIISEEDGASRVGSYNPARGEKVIAFAKEFLDETIPLELGSFKNVTKFNFKDGFLSMILNDGTNTMLKNAKQYLGYSRYENDSFGLLFRNNNLHFEIQ

SEQ ID NO: 116469 - protein, 291 aa, Unknown
  Bacterial polypetide isolated from the Sargasso Sea
QVLYDFINNEALNGTGLDKKKFWKGFSNSAHTLTHQNRKILNDRRKIQIDIDRYHIDNRTKKLNKKNYKKFLKKIGYINKIGPDFKIETKDNDIEITNIAGPQLVVPVMNARYALNAANARWVSLYDSLYGTDIIESEESASQRYDPERGLEVIRFSKKFLDKYFKIKNSTWIKVHKIEIEGENLKLITFENNFYLLNNKKFIGYRGDKKNPSAIILKNNNLHIEIIINPDAFSAKSDPAGISDIIMEAAITTICDHEDSVAGVDAKDKVLGYRNWLGLMKGNLTTKFEKS

SEQ ID NO: 116470 - protein, 199 aa, Unknown
  Bacterial polypetide isolated from the Sargasso Sea
HPMSGANCAWVHSPTAAAIHALHYHAVNVFSIHQKIKLRKSAKLDELLTIPVDDKKKWSKEDIEKELKNNAQGILGYVVRWVDQSVGCSKVPDINGVGLMEDRATCRISSQHMANWLHHGICSKKQVLEIMKKMAKVVDYQNLKDHGMKDQDPYQPMAGNFEKSIAFKAACDLVFHGKYQPSGYTEPLLHFNRLMKKSI

SEQ ID NO: 116471 - protein, 127 aa, Unknown
  Bacterial polypetide isolated from the Sargasso Sea
NSAQTLLGYVVRWIDQGVGCSKVPDISNTYLMEDRATLRISSQHIANWLHHGITTKIQVMEIMKEMAKIVDKQNKNDKKYINMSDDYDNSIAFQTACELIFKGKEQPSGYTEPLLHLNRLNKKVNQN

SEQ ID NO: 116472 - protein, 145 aa, Unknown
  Bacterial polypetide isolated from the Sargasso Sea
MQISTGFIDFIEQEVLPETTIAADKFWAGLAKVVKELTPTNKKLLERRTYFQRQIDQWHRANKGEEFNSADYKRFLYSIGYIVPEKEPFSIDTKQVDPEISKIAGPQLVVPIMNARFALNAANARWGSLYDALYGTDAIKPVKKQ

SEQ ID NO: 116473 - protein, 149 aa, Unknown
  Bacterial polypetide isolated from the Sargasso Sea
YIVKPKQHSPDECKFTDKIFTNVEEILNLKKNTVKIGLMEEERRASVNLKECIRAFENRIFFINTGFLDRTGDEIRTSMEAGPMAKKLDLKKSIWIQAYENNNVDIGLECGFSGKAQIGKGMFAAPKAMAQMMNEKISHLEAGANCAWV

SEQ ID NO: 116474 - protein, 166 aa, Unknown
  Bacterial polypetide isolated from the Sargasso Sea
KSRNKAKLEDILQIPKADRPNWSVTDINRELENNAQGILGYVVRWIDQGVGCSKVPDINNIGLMEDRATLRISSQHMANWIHHGICTKEQVMSTMKKMAKIVDKQNEKDPAYNRSGRSGYKKMSDDFENSIAFAAACDLVFKGRTQPSGYTEPLLHEKRLEKKNSN

SEQ ID NO: 116475 - protein, 126 aa, Unknown
  Bacterial polypetide isolated from the Sargasso Sea
GILGYVVRWIDQSVGCSKVPDINGIGLMEDRATCRISSQHISNWLYHGICSKKQVLEIMKKMAKVVDDQNLKDPGMKGQAPYQAMSGNFDKSIAFKAACELVFHGRHQPSGYTEPILHLNRLLKKN

SEQ ID NO: 116476 - protein, 145 aa, Unknown
  Bacterial polypetide isolated from the Sargasso Sea
MTKRLRRGNLQVSEILVNFIENEALADTNISPDMFWEKLETILDQFVPRNKELLQIRSEMKSKIDKFYLDNSGKDVDHDEYVNFLKKINYIVPEGEKFLIKTKNVDDELALKAGPQLVVPVTNARYALNAANARWGSLYDALYGT

SEQ ID NO: 116477 - protein, 202 aa, Unknown
  Bacterial polypetide isolated from the Sargasso Sea
MLEEKINHPMSGANCAWVPSPTAATLHVMHYHKINVEKQQNYIKEKKSKNELDELLTLPLLKGKNLSEGEIKNELENNVQGILGYVVRWIDQGIGCSKVKDINNIGLMEDRATCRISSQAITNWLTHGIITKEQIKKTLKKMAKVVDKQNKNDPNYINMSKSYDTLAFQAAERLALEGLDQPSGYTEPILHEMRLKFKSLNN

SEQ ID NO: 116478 - protein, 253 aa, Unknown
  Bacterial polypetide isolated from the Sargasso Sea
GSLYDALYGTDMIIESEGAIREGGYNPIRGDRVIAFAKNFLDETFPLENGTFNKVTDFEFIDGEIVVTLVDGSKTHLLNKDQYIGYMDKGEGAYGLLFKNNNLHIEIQVDRSHPIGQDDLAGIKDILVESAITTIQDCEDSVAAVDDEDKIIVYRNWLGLMKGDLKRSFNKNGKYLTRELNGDRRYLLKNGKMILLPGRSLLLVRNVGHLMTNPAIKDENGNAVPEGIMDGFFTICASIHDLIGNGLYKNSKT

SEQ ID NO: 116479 - protein, 274 aa, Unknown
  Bacterial polypetide isolated from the Sargasso Sea
SKYRGPQLVCPVSNARFLLNAANARWVSLYDSLYGTDIIPETKGAVKGNTYNPIRGNEVIKYARNILDKYIPLKKQSWKNLKDIPNVKSNKLNLSLLYPNQFVGYSKKRGKLSSLLFKNNNLHIDILFDLSGNMEINNPDGNQDKLKIHDIFLESAITTICDHEDSVAAVDAEDKVLGYKNWLNLMKADLKASFAKSGKKVYRKLNNDRFYISKKGSKIKLHGRSLLLNRNVGHLMTNPSILLKDGSECPEGILDAFITSAACLHDFKKIKNSR

SEQ ID NO: 116480 - protein, 187 aa, Unknown
  Bacterial polypetide isolated from the Sargasso Sea
MSKININNLKVDNELYNFVNQEVIPGLDINVDKFWSGLSNAVHELAPINKELLKKRDEIQKKIDQWHLSRKGSPLNQDEYLKFLKSINYIVEEKEDFKIETSDVDKEISSIAGPQLVVPVDNARYALNAANARWGSLYDALYGTDVISKNKSKEFDQDKANKVVDYVRNLFDRIFPTESGSWKSVSK

SEQ ID NO: 116481 - protein, 213 aa, Unknown
  Bacterial polypetide isolated from the Sargasso Sea
MPDLMKDMMKQKIVHPLAGANCAWVPSPTAASLHALHYHEVDVFAKQRELSKRKSAKLSDLLTIPVANSTNWSIEEINKELKNNAQGILGYVVRWIDQSVGCSKVPDINGVGLMEDRATCRISSQHIANWLHHGICSKKQVLEIMKKMAKIVDGQNLKDKSMKGQLPYQSMAGYFDKSIAFKAACDLVFHGKHQPSGYTEPLLHFNRLMKKSI

SEQ ID NO: 116482 - protein, 276 aa, Unknown
  Bacterial polypetide isolated from the Sargasso Sea
RNVGHLMTNPAVLLRDGSECPEGILDAFITSLACIHDFKKKRNSSVNNIYIVKPKMHGPEECSFTDEIFNNVEKLLGLKKNQILCGIMDEERRTSVNLYECIRALKNRVFFINTGFLDRTGDEIHTSMEVGPMVRKAEMKKTKWINAYENNNVDIGLKCGFSGKCQIGKGMYAAPDKMKDMIKQKIIHPKSGANCAWVPSPTAAALHSLHYHEVDVFNIQKIIKKRKSARLSDLLTIPIKKNPKWNLNEITEELKNNAQGILEYVVRWVDQSVGVQ

SEQ ID NO: 116483 - protein, 264 aa, Unknown
  Bacterial polypetide isolated from the Sargasso Sea
KECIRTLKNRVFFINTGFLDRTGDEIHTSMEVGPMIKKGDMKSSKWIHAYENNNVDIGLKCGFSGKCQIGKGMYPAPDLMNEMMKQKIIHPLTGANCAWVPSPTAASLHALHYHEVNVFNKQKEIAKRKPAKLSDLLTIPVQKKHNWSIEEINKELKNNAQGILGYVVRWIDQSVGCSKVPDINGIGLMEDRATCRISSQHIANWLHHGICSKKQVLEVMKKMAKVVDSQNLKDPSMKGHAPYKPMSDNFDKSTAFKTACELVF

SEQ ID NO: 116484 - protein, 245 aa, Unknown
  Bacterial polypetide isolated from the Sargasso Sea
MKIVDKNGLKISSTLFDFVNNEAIPGTGVNSEDFWLKFSNYVHELAPINKRLIDKRETIQKKIDEWHKSKKGKEFNKKEYINFLKSLGYLIEEKNDFKIETSNVDQEISSIAGPQLVVPVDNARYALNAANARWGSLYDALYGTDVIAGEKFKNYNIERANKVINFVRNFLDENFKLSKISWKEITKIEVENDKLVLIKDSEKDYLKNNDQFIGFNGDINSPKSILIKNNNLHIDIIIDPNSEVG

SEQ ID NO: 116485 - protein, 303 aa, Unknown
  Bacterial polypetide isolated from the Sargasso Sea
GKIFKIKSMDWFIKRKNIKFNFDEYFSFLREIGYVINEKEDFIIDTKDVDDEISSIAGPQLVVPVNNARYAINAANARWGSLYDALYGSDIIPEDNGCEKGDNYNPKRGNNVINYTRKILDKSCPVKNLSWSEIEKFSINDGNLNIISGDKYFELSNPKQFVGYVNEQNNLRKILLIKNKLHIEILINPYGKIGSNDKANIDDVILESAVTTIMDCEDSIAAVDGNDKVLAYKNWQKLVNGELEFKMIKNEKNFVRKLNVNKEFLTPHGKKYTISGRSLMLIRNVGHLMKNPAILLSDDTEIP

SEQ ID NO: 116486 - protein, 162 aa, Unknown
  Bacterial polypetide isolated from the Sargasso Sea
KILKQKEKNSLSDLLSLPLLNRKNLSEQEIRFEIENNVQGILGYVVRWIDQGIGCSKVPDINNVGLMEDRATCRISSQALANWLHHSIITKDQVMNALKKMAAVVDEQNKNDTNYIPMSKNFNTFAFIAAKDLIFDGKNQPSGYTEPILHKKRLEFKLNKIN

SEQ ID NO: 116487 - protein, 270 aa, Unknown
  Bacterial polypetide isolated from the Sargasso Sea
HRVSQRAADGVARRRRADHGRRPDRRRDRRVWRKVRTGRANRPRRHTKRRGLASQRTRVFHSPGGITMIDQAGLQVAPALSQFIENEALPGTGIDKAAFWSGFSALVHDLAPRNRELLAERDRLQQELDTWHRAHPGPVRDHAAYRAFLEQIGYLVPVPSNVAAATANVDSEIATQAGPQLVVPLSNARYALNAANARWGSLYDALYGTDALPEDGGAERTTAYNPTRGQRVIDYARNVLDNAAPLASGSHRDALRYRVQDGQLAVETAK

SEQ ID NO: 116488 - protein, 246 aa, Unknown
  Bacterial polypetide isolated from the Sargasso Sea
KIQIINNELIFSDKNSNLKKLLNPSQFCGYIGFELNPDEIILKKNSLRIRLQLDKEHPIGKIDSFHLKDIVIESAPSVIMDCEDSVVSVDTNDKIKTYRNWVKLLNGTIQTEVKKDNVSFIRKLSKDISYKKPNGEGDSMKGLSLLLIRNVGHLMTSSSIIDHNKNEIGEGIIDTFLTALCFLKTIDNSKNSKFKSLYIVKPKMHGPEEVKFSVDTFSKIEKLLKIPENTIKIGLMDEERRTTLNL

SEQ ID NO: 116489 - protein, 131 aa, Unknown
  Bacterial polypetide isolated from the Sargasso Sea
SEISNSAQTLLGYVVRWIDQGVGCSKVPDINNIGLMEDRATLRISSQHIANWIHHGITTKLQVLGIMKEMAKIVDSQNKNDNKYIRMSDDFDRSLAFKTACDLVFNGKEQPSGYTEPLLHLNRLKKKINQN

SEQ ID NO: 116490 - protein, 184 aa, Unknown
  Bacterial polypetide isolated from the Sargasso Sea
MNKVASDKLREANAGHDGTWIAHPGLSQVAMSAFNQAMGSSPNQITNKRNDVSVNARDLIKVPQGNITEEGLRQNISIGIQYIEAWLSGNGCVPIHNLMEDAATAEISRSQIWQWIHHRAKTTDSNKTITEEYFIKTLEDEMDQLKTARGSEGDYLQPAINLFKEMSTDSEFDEFLTLPAYKHL

SEQ ID NO: 116491 - protein, 207 aa, Unknown
  Bacterial polypetide isolated from the Sargasso Sea
SWKNIKKIPYIQKGELSIKLKNSKQFVGFRKKKGKIFSLLFVNNNLHLDILFDQKGNLEVNNPAGNQDPLKIHDIFLESAISTICDHEDSVAAVDAEDKVLGYRNWLSLMKGNLTTKFRKNNKTILRKLNSDREYLSLKGKKIKLHGRSLLLNRNVGHLMTNPAILLKDGSECPEGILDAFVTSAACLHDFKRKGNSRTNSIYIVKP

SEQ ID NO: 116492 - protein, 275 aa, Unknown
  Bacterial polypetide isolated from the Sargasso Sea
IVEKLGAKNKTLIQKREDIQSKIDEYHITHRGQDIDIEDYKSFLYDIGYLVPEGENFKIDTSNVDEEIADLCGPQLVVPIMNARYALNAANARWGSLYDAFYGTDAMGDLPPKGGYSNDRGDKVISNAKAHLDKVAPLDSNNWHEISEINVVEGQLILSVNEKEVSLLNQNQFVGYIQNNNSINEVILLINGLHIRILIDPDHVIGKNDKANISDIILEAAITTIMDCEDSVAAVDGEDKVLAYKNWLGLMKGDLTEDLEKSGKIITRRLNQDIK

SEQ ID NO: 116493 - protein, 101 aa, Unknown
  Bacterial polypetide isolated from the Sargasso Sea
NVGLMEDRATLRISSQHIANWLHHGICKKEQVMEIMKKMAKIVDEQNKNDPKYKKMSDNFEKSLAFSAACDLVFKGKYQPSGYTEPLLHKKRLEKKTLINR

SEQ ID NO: 116494 - protein, 240 aa, Unknown
  Bacterial polypetide isolated from the Sargasso Sea
MDKIKKNYQKVEKLFVSKILYNFVNKELLKKTKINPKRFWVALNKSFYSLREKNAKLIQIRKEFQNSINEWHLNNKSKKFNLIKYKKFLFDIGYLKKNVANFKIQTKNVDEEISKIAGPQLVVPISNARYALNAANARWGSLYDALYGTDAIGSEKLDNRYNPIRGGKVISYCRDFLDEIFPLKNGSWKKINTLKIQNNKLVLKIDNKIIQLKNSKQYRGYRSDKKKLKGVLLINNNLPR

SEQ ID NO: 116495 - protein, 216 aa, Unknown
  Bacterial polypetide isolated from the Sargasso Sea
MIDQAGLQVAPALSQFIENEALPGTGIDKAAFWSGFSALVHDLAPRNRELLAERDRLQQELDTWHRAHPGPVRDHAAYRAFLEQIGYLVPVPSNVAAATANVDSEIATQAGPQLVVPLSNARYALNAANARWGSLYDALYGTDALPEDGGAERTTAYNPTRGQRVIDYARNVLDNAAPLASGSHRDALRYRVQDGQLAVETAKGVVHLAQPAQFVG

SEQ ID NO: 116496 - protein, 119 aa, Unknown
  Bacterial polypetide isolated from the Sargasso Sea
MHGPDEVQFSCDLFSEIEKIFKLPQNTIKIGIMDEERRTTLNLKECIEIAKDRVIFINTGFLDRTGDEIHTSMEAGPMVTKAEMKNQKWIQAYENWNVDIGLGVGFKGNAQIGKGMWPM

SEQ ID NO: 116497 - protein, 201 aa, Unknown
  Bacterial polypetide isolated from the Sargasso Sea
MLEMYKSKTVHPKSGANCAWVPSPTAATLHAIHYHQISVQDEQDKIMKREKANLDDILSIPLISSDNVPSPQEIQKELDNNAQGILGYVVRWVDQGVGCSKVPDINDVGLMEDRATCRISSQHISNWLYHDLCSEEQVIDTMKKMARIVDIQNKDDTNYRPMAPSFDGIAFKAACDLATKGKDQPSGYTEPILHEMRLKRK

SEQ ID NO: 116498 - protein, 278 aa, Unknown
  Bacterial polypetide isolated from the Sargasso Sea
KNFIRNGYLKNEGPDFKIETENVDEEIASIAGPQLVVPVMNARYALNAANARWMSLYDSLYGTDVIEQSEDSVSERYDPLRGEMVIKYARDFLDKYFPLAGLSWNKITSFAVKYGKLKVLKGADIFDLEDENKFIGHRGESDNPSAIILKNNNLHIEILKDSRAFAAQQDHAGISDIILESAVSTICDNEDSVAAVDSEDKIICYRNWLGLMKGDLKSKFEKEGKLFERKLNPHRSYISKDGKGLKLHGRSLLLVRNVGHLMTNPSILLSDGSEIPEG

SEQ ID NO: 116499 - protein, 233 aa, Unknown
  Bacterial polypetide isolated from the Sargasso Sea
MQGYITKGRLQVAEQLDNFINEQALPGTGVDQEAFWQGAEALFEKFIPQNRALLEKREQLQRAIDDYHKAGNPVGGSEYTDFLKNIGYLVEQPANVTADTQNVDAEIATMAGPQLVVPINNARYALNAVNARWGSLYDALYGTDVISDEGGAEAGKSYNPVRGAKVVAKAKTYLDNMIPLAKGSHADVTQYKIDTGKLAITLTDGDETTLANTEQWQGYQGDINAPSSLLFAH

SEQ ID NO: 116500 - protein, 114 aa, Unknown
  Bacterial polypetide isolated from the Sargasso Sea
RQVDRPGSRLLKVPDILDIGLMEDRATLRISSQHIANWLHHGIVTEDQVMASLERMAAVVDRQNFADPQYQPMAPGCDGVAFEAACDLIFRGREVCNGYTEPPLHLRRLQKKSG

SEQ ID NO: 116501 - protein, 292 aa, Unknown
  Bacterial polypetide isolated from the Sargasso Sea
QTKNVDREVSDICGPQLVCPVSNARFLLNAANARWVSLYDSLYGADIIPETKGAVKGNTYNPIRGKEVISYARDILDKLVPLKKESWKNLREIPLIKNNKLELNLLNPKQFIGYSKVSGKLYSILFKNNNLHIEILFDQTGKMEINNPEGNQDPLKIHDIFVEAAITTICDHEDSVAAVDAEDKVLGYRNWLLLMKGKLKSSFIKNGKKIFRKLNKDKNYISSNGSKLKLHGRSLLLNRNVGHLMTNPCILLKDGSECPEGILDAFVTSAACLHDFKINGNSRNKRIYIVKP

SEQ ID NO: 116502 - protein, 114 aa, Unknown
  Bacterial polypetide isolated from the Sargasso Sea
VRWIDQGIGCSKVPDINNVGLMEDRATLRISSQHIANWLYHGICSRKQVLEIMKKMAKVVDEQNKNDKLYQKMSPKYDTSIAFKTACELVFQGKDQPSGYTEPLLHLNRLIKKN

SEQ ID NO: 116503 - protein, 215 aa, Unknown
  Bacterial polypetide isolated from the Sargasso Sea
MSYVEAGGLRVADVFFRFINEEALPGTEINQDTFWNSFGAIVADFAPINRTLLETRDAMQAQLDSWHREHRDQPIDAEAYKVFLKQIGYLVDEGPAFVIGTKNVDAEFTAMAGPQLVVPVTNARYALNAANARWGSLYDALYGTDAVDEKGGASRVGAFNPVRAERVIAWSKRLLDQAAPLANGSHAEVTAYSVVDCQLRVTLSNETITKLADPA

SEQ ID NO: 116504 - protein, 185 aa, Unknown
  Bacterial polypetide isolated from the Sargasso Sea
MNYVEAGGLRVADVLFRFINEEALSGTGIGQDSFWTSFGAIVADFAPLNRTLLETRDAIQTKLDSWHRDHQGQPIDADAYKAFLKEIGYLVDEGPAFAIGTENVDAEFAAIAGPQLVVPVTNARYALNAANARWGSLYDALYGSDAIDEEGGAARGDAFNPVRAKRVIAWSKRLLDDAAALAEGS

SEQ ID NO: 116505 - protein, 201 aa, Unknown
  Bacterial polypetide isolated from the Sargasso Sea
VLKGADIFHLEYENKFVGHRGESDNPSAIILKNNNLHIEILKDSRAFAAQQDHAGISDIILESAVSTICDNEDSVTAVDSNDKIICYRNWLGLMKGDLKSKFEKEGKLFERKLNPHRSYISKDGKGLKLHGRSLLLVRNVGHLMTNPSILLIDGSEIPEGIMDAFITTAAALHDIKNKNNSGTGSVYIVKPKMHGPDETAF

SEQ ID NO: 116506 - protein, 107 aa, Unknown
  Bacterial polypetide isolated from the Sargasso Sea
IGCSKVPDINNIGLMEDRATLRISSQHIANWLHHGICSRKQVLEIMKKMAKVVDEQNKKDKLYQRMYPEFDKSIAFKTACELVFQGKDQPSGYTEPLLHLNRLIKKN

SEQ ID NO: 116507 - protein, 151 aa, Unknown
  Bacterial polypetide isolated from the Sargasso Sea
NDLLNIPIAAKPDWSKEEINTEISNSAQTLLGYVVRWIDQGIGCSKVPDINDIGLMEDRATLRISSQHIANWIHHKITTKNEVLEIMKEMAKVVDKQNKNDKRYINMSDDYDRSRAFKTACDLIFKGKEQPSGYTEPLLHLNRLKRKINQN

SEQ ID NO: 116508 - protein, 130 aa, Unknown
  Bacterial polypetide isolated from the Sargasso Sea
NKEISNSAQTLLGYVVRWIDQGVGCSKVPDINNIGLMEDRATLRISSQHIANWIHHGITTKIQVTEIMKEMAKIVDNQNKDDTLYVKMSDDYENSIAFQTACDLVFKGKEQPSGYTEPLLHLNRLKKKLI

SEQ ID NO: 116509 - protein, 189 aa, Unknown
  Bacterial polypetide isolated from the Sargasso Sea
MIHLENKFGIKISTEFIDFVEQEVLPETTIVADKFWAGLARLVKELTPTNKKLLERRTFFQRQINEWHRANKGREFSSADYKSFLYSIGYIVPEKEPFLIDTKQVDPEIAKIAGPQLVVPIMNARFALNAANARWGSLYDALYGTDAIKPVEKATAYNKDRGQKVIQWGRKFLDDTFPLINGSWEQVTE

SEQ ID NO: 116510 - protein, 551 aa, Unknown
  Bacterial polypetide isolated from the Sargasso Sea
MTEQTLSEQQLNSAQKQNKTTANGALTIVGNTIPGQEVIFTEGALALLESLCREFATEVPTLLAKRKDRQTRIDKGTLPDFLPETRAIRDGAWKIRGIPNDLLDRRVEITGPVERKMVINALNANAKVFMADFEDSLAPSWQKVVEGQINLRDAVRGEIEYTAPETGKHYKLGPNPAVLICRVRGLHLKEKHVEFNQQSIPGALFDFAMYFYHNYRQLLAKGSGPYFYIPKLESHIEARWWAKVFAFVEERFCLQPGTIKCTCLIETLPAVFEMDEILYELRSNIVALNCGRWDYIFSYIKTLKRHSDRVLPDRQAVTMDTPFLSAYSRLLIKTCHKRGALAMGGMAAFIPAKDPVQNEAVLQRVRKDKELEARNGHDGTWVAHPGLADTAMGIFNEYIGQDHQNQLHITRDVDAPILAAELLKPCDGERTEQGMRLNIRIALQYLEAWISGNGCVPIYGLMEDAATAEISRASIWQWIQHGKSLSNGKPVTKQLFKDMLVEELANVKKEVGSDRFTHGKFTQAAVLLEDITTSDELVDFLTLPGYEMLTA

SEQ ID NO: 116511 - protein, 131 aa, Unknown
  Bacterial polypetide isolated from the Sargasso Sea
NSAQTLLGYVVRWVDQGVGCSKVPDINNIGLMEDRATLRISSQHIANWIHHGITTKLQVTEIMKEMAKIVDDQNKDDPLYVKMSGDYENSIAFQTACDLVFKGKEQPSGYTEPLLHLNRLKKKSNLSSKPN

SEQ ID NO: 116512 - protein, 147 aa, Unknown
  Bacterial polypetide isolated from the Sargasso Sea
MNVTEKNGLKINTKLLDFVNNEIIPGTNIRSEEFWTNFGKIVHELAPINKELIQKRDDIQKKIDEWHKKNKGKEFNKKQYLDFLKSISYIVEEKDEFKIETSNVDDEIATIAGPQLVVPVDNARYVLNAANARWGSLYDALYGTDVI

SEQ ID NO: 116513 - protein, 334 aa, Unknown
  Bacterial polypetide isolated from the Sargasso Sea
NELAIKNKNLLYRRDKIQRKINGWHQDRLGKKFKSKEYEKFLKDIGYILNEGNKFKIQTKNIDDEISSIAGPQLVVPIMNARYTLNAANARWVSLYDSLYGTDVIESDESGGERYDPIRGEEVIKYSKNFLDNYFPINKIKWKDVTSFVIEKKELKLFKNNQIFSLKKKNKFIGFRGEKNKPSAIILRNNNLHLEIIINPKAFSAKNDPAGISDIILESALSTICDNEDSVAAVDSEDKILCYKNWLQLMKGNLTTRFEKTGKVFERKLNPDRNFYLPSGKKSKLHGRSLLLIRNVGHLMTSSCILLKNGSEIPEGIMDAFFTSAACLHDIKKK

SEQ ID NO: 116514 - protein, 205 aa, Unknown
  Bacterial polypetide isolated from the Sargasso Sea
MKDMMNKKTGHLKAGANCAWVPSPTAAALHALHYHEINIFDEQKKILNRNQAKLDDLLTIPVADRTNWSVEEINNEISNSAQTLLGYVVRWVDQGIGCSKVPDINNVGLMEDRATLRISSQHIANWIHHGITTEIQVTEIMKEMAKIVDGQNKNDSKYIKMSDDFENSIAFKTACDLVFKGKQQPSGYTEPLLHINRLEKKSNLN

SEQ ID NO: 116515 - protein, 186 aa, Unknown
  Bacterial polypetide isolated from the Sargasso Sea
KVRNDKEREVNNGHDGTWVAHPGLVPVAMEIFDNQLSGDNQLDVSLDNVTITQDDLLEVHEGQRTEEGMRECIKVGVQYIEAWLAGRGAVPLYNLMEDAATAEISRAQIWQWLKHATKLDDGRTVNEELFKDILTSEIANLKEVLGDEIWAKGKYEKAVEIFEKMSISPVCEEFLTLPAYEEIVSS

SEQ ID NO: 116516 - protein, 132 aa, Unknown
  Bacterial polypetide isolated from the Sargasso Sea
IQQELDNNCQGILGYVVRWVEQGVGCSKVPDIHNVGLMEDRATLRISAQHIANWLHHGVVSEAQVRETLQRMAQVVDGQNAGDAAYRPMAPNFEQSHAFRAASDLVFKGREQPSGYTEPLLHAWRLRFKEEV

SEQ ID NO: 116517 - protein, 523 aa, Unknown
  Bacterial polypetide isolated from the Sargasso Sea
MIDIKSEKKSQYQNILTDEAISFLEKVCSTFENTRQEILKNRVKMQNDISSGKRLSFPKDKKIREDNWKVTAPPADVANRNVEITGPVDRKMIINALNSGADVFMADFEDSTSPTWKNIMDGQVNLLDANLRDLEFVDPKNEKTYSLNPESNTSLFVRPRGLHLDDKNVLLNGAPVSGAFLDFALYTFHNAKLRLENGIGTYFYIPKLENSSESQLWDDIFSFSEDELSLPRGTLRATVLLETISASFEIEEILYSLKEHSLGMNAGRWDYIFSAIKKHRDLPEINFPDRSQITMTVPFMKAYTELLVQSCHKRGAHAIGGMSAFIPNRRDPEITEKAIDQVKKDKEREVTMGFDGSWVAHPDLVQVCKDVFKDSLGAKENQIDFIPNEPVISEDMLQDFNIPGATITEEGIRTNIRVGILYVQSWLLGQGAAALFNLMEDAATAEISRSQLWQWIKNEAKTDVNKSIDKSFVTELIEDEVNKIKEIQENSEMLSEAVTLFSDLIFDEDFEEFLTLPAYNLID

SEQ ID NO: 116518 - protein, 523 aa, Unknown
  Bacterial polypetide isolated from the Sargasso Sea
MIEIQSNKKNEYQSILSNDAINFLEKICSNFEISRQEILENRKKIQNAISSGTKLSFPKDKKIREGDWKVTPPPKDVANRNVEITGPVDRKMIINALNSGADVFMADFEDSTSPTWNNIMNGQINLLDANLKKLEFVDPKNKKTYTLDSESNTSLFVRPRGLHLDEKNVLINELPISGAFLDFALYTFHNAKLRLDNGIGTYFYIPKLENSKESQLWDDIFSFSEDELDLPRGTIRATVLLETISASFEIEEMLYSLKEHSLGMNAGRWDYIFSAIKKHRDLEEINFPDRSQITMTVPFMKAYTELLVQSCHKRGAHAIGGMSAFIPNRRDTDVTEKALENVKKDKEREVSMGFDGSWVAHPDLVKVCKDVFQNSLGTKENQIDYVPNEPTISEEMLQDFNIPNSTITEEGIRTNIRVGILYIQSWLLGQGAAALFNLMEDAATAEISRSQLWQWLNNKAVTESDNMINKGFISELIDDEVNKIKEIQKNSEMLNEAVEVFSDLIFDENFEEFLTLSAYNLID

SEQ ID NO: 116519 - protein, 129 aa, Unknown
  Bacterial polypetide isolated from the Sargasso Sea
MHKVFLGYVVRWVDQSVGCSKVPDINGIGLMEDRATCRISSQHIANWLHHGICSKKHVLEIMKKMAKVVDNQNLKDPSMKGHSPYIPMSDNFAKSIAFKAACELVFHGKTQPSGYTEPILHLNRLLKKN

SEQ ID NO: 116520 - protein, 237 aa, Unknown
  Bacterial polypetide isolated from the Sargasso Sea
MTHTLTHSGLSVDLELADFVKTKLLPGTHLSEQQFWQSFAKIVQTLTPINKALLAKREQLQQQIDQYHIANKTWDSKQYQRFLSDIGYLVPEPANFKIETQQVEPEIAVTAGPQLVVPVSNARFALNAANARWGSLYDALYGTDVLSEDDGAEKGTTYNPVRGFKVMAYARQFLDKALPLENGSHIESTNYSVVNGALVITLRDSSQTTLADPSQLIGYQGEAQNPSVVLLKTMAYI

SEQ ID NO: 116521 - protein, 233 aa, Unknown
  Bacterial polypetide isolated from the Sargasso Sea
MSLKISPPLQDFVRNEMLPGLNISENYFWASLQNILNKFSKINEELLDKRKYLQNKIDNWHIDRRNKEFDIKEYKNFLVEIGYLYPRSENFSINTRDVDPEIRKIAGPQLVVPVMNARFALNAANARWGSLYDALYGTDIISEDNGATREGGYNPIRGNKVIEFSKNFLDETIPLENGTYQDVTNFEFVDSELLVTLKDNSKTTLTNKDKYIGYMDKGEGAYGLLFKNNNLHL

SEQ ID NO: 116522 - protein, 165 aa, Unknown
  Bacterial polypetide isolated from the Sargasso Sea
EVQEGIISSGSTGSLDDLITLPLLKGINLSEDEISREVENNAQGILGYVVRWIDQGIGCSKVPDINNIGLMEDRATCRISSQALANWIEHGIISKEQVLIVLKKMAKVVDDQNADDKNYIPMSENEDSIAFKAARDLVFEGKNQPSGYTEPILHRRRLEFKLKNN

SEQ ID NO: 116523 - protein, 523 aa, Unknown
  Bacterial polypetide isolated from the Sargasso Sea
MIEIESNKKKDYQSILTDDAINFLEKICSTFESSRQEILENREKMQQSISSGSKLSFPKDQKIREDNWAVTPPPPDVVNRNVEITGPVDRKMIINALNSGADVFMADFEDSTSPTWKNLMDGQVNLLDANNRKLEYVDPKNEKTYALNEDSNTSLFVRPRGLHLDDKNVLIDGKPVSGAFLDFALYTFHNAKLRLENNIGTYFYIPKLENSHESQLWDDIFTLSEDELDLPRGTIRATVLLETISASFEIEEMLYSLKEHSLGMNAGRWDYIFSAIKKHRDLKDINFPDRSQITMTVPFMKAYTELLVQSCHKRGAHAIGGMSAFIPNRRSPEITEKAIDQVKKDKEREVNMGFDGSWVAHPDLVKVCKDVFQDSLGTKENQIDFVPNEPVISENMLQDFNIPGSTITEEGIRTNIRVGILYIQSWLLGQGAAALYNLMEDAATAEISRSQLWQWLNTESHTDSKITINKEYIDELMSDEVTKIKDFQEDPKRLDEAVNLFRELIFDENFEEFLTLPAYTLID

SEQ ID NO: 116524 - protein, 187 aa, Unknown
  Bacterial polypetide isolated from the Sargasso Sea
MEKKYIKINGISVASKLADFVKNELLENTEVDVKHFWNGFEKSINKLVPMNKELLKKRQQIQKKIDDWHNRNEFEEFDYLKYKKFLTQIGYIVEEKEDFKIETTNVDAEISKIAGPQLVVPVMNARYALNAANARWGSLYDALYGTDFLESNKGLDSHYNPFRGGKVIKYCRGILDKFFPLNENTWK

SEQ ID NO: 116525 - protein, 259 aa, Unknown
  Bacterial polypetide isolated from the Sargasso Sea
MNLFSKFFKSSKHSAKEINLKISSSLEDFIKNEVLPGLNISPHYFWSSFENLIEKFSNRNKNLLIKRSEIQEKINDWHIQNRNKEFNLEEYKNFLTDIGYLHPRAGDFMIKTWNVDPEIRKIAGPQLVVPVMNARFALNAANARWGSLYDALYGTNIITEEDGATREGGYNPIRGNKVIEFAKKFLDETIPMQSGTYDQVIQFQFIDSELSMKLEDGKKVNLKDIDQYVGYKDEGEGAYGLLFKKIIFTLKYKLIDRIQ

SEQ ID NO: 116526 - protein, 209 aa, Unknown
  Bacterial polypetide isolated from the Sargasso Sea
MWPMPDEMLNMYETKTMHPESGANCAWVPSPTGATLHAMHYHQILVSDIQQTILERPKANIDDILTIPLMENPEGLSAEDIQKELDNNAQGILGYVVRWVDQGVGCSKVPDINNVGLMEDRATCRISSQHIANWLHHSICTEDQVIDTMRRMALVVDQQNSGDPSYLPMGPSYDGVAFKAACNLAIEGRSQPSGYTEPILHEMRLKFKA

SEQ ID NO: 116527 - protein, 268 aa, Unknown
  Bacterial polypetide isolated from the Sargasso Sea
MNPKTIALIESLHDNFENQRRKLLEDREILQKELDDGKFPNFLTQTKDIRESSYVVSPIPEDLQDRRVEITGPPDRKMVINALNSPVKTFMCDFEDSCSPTWKNIIQGHVNVRDAVEESIEFTRESDSKVYRLNDKIATLIIRPRGWHLNEKHVSINDQPISASLFDFAVYLSNNYEALSKKGTGPYFYLPKLENHLEARLWNDVFVHAQNFLNIDRGTIKATVLIETITAAFEMDEIIFELKEHSAGLNCGRWDYIFSFIKKFRNHQ

SEQ ID NO: 116528 - protein, 316 aa, Unknown
  Bacterial polypetide isolated from the Sargasso Sea
MKINYQTVNNLKIASELLKFVNEELLKNTGISSEKFWTGFDKYVHELAPKNKELLKIREDLQKKIDDWHIKNKGKEININDYKKFLKDIGYLKKEGDDFKIETSNVDDEIAKIAGPQLVVPVMNARYALNAANARWVSLYDSLYGTNIIESEEGGSERYDPNRGQEVIKYVREFFDKFIPIDGTSWKNIAALKVVNKDLVILKDDYEYKLKDKNKFIGHRGDANKPEAIIIKNNNLHFEIIINPKAFSAAHDIAGISDVIAESAVSTICDNEDSVAAIDAEDKVICYRNWLGLMKGDLKIQFEKNGKNLERKLNPD

SEQ ID NO: 116529 - protein, 176 aa, Unknown
  Bacterial polypetide isolated from the Sargasso Sea
YHTINVFSVHQKLKKRKLAKLDDLLTIPVETNKNWSKDEIEKELKNNAQGILGYVVRWVDQSVGCSKVPDINGIGLMEDRATCRISSQHIANWLHHGICSKKQVLEIMKKMAKVVDYQNLKDHGMKDQDPYQPMAGNFEKSIAFKAACDLVFHGKYQPSGYTEPLLHFNRLIKKSI

SEQ ID NO: 116530 - protein, 207 aa, Unknown
  Bacterial polypetide isolated from the Sargasso Sea
DKMKEMLDEKISHLKAGANCAWVPSPTAASLHALHYHQINIFDEQKKIMKREQSKLDDLLTIPVADRPNWSVDEINKEITNSAQTLLGYVVRWIDQGVGCSKVPDINNIGLMEDRATLRISSQHITNWIHHGITTKIQVMEIMKAMAKVVDKQNENDRNYVRMSDNFENSLAFKTACDLIFKGKDQPSGYTEPLLHLNRIEKKSSLN

SEQ ID NO: 116531 - protein, 217 aa, Unknown
  Bacterial polypetide isolated from the Sargasso Sea
KGNAQIGKGMWLMPDEMLEMYKAKSVHPRSGANCAWVPSPTAATIHAIHYHQIYVQSEQDKILNRDKASLNDLLKIPLIKSYEMPSAEEIQEELDNNAQGILGYVVRWVDQGIGCSKVPDLNDIGLMEDRATCRISSQHIANWLHHGLCSEKQVIETMKKMAKVVDLQNKDDVNYKKMSPAYDGIAFKAACDLAIMGRTQPSGYTEPILHEMRLKRK

SEQ ID NO: 116532 - protein, 286 aa, Unknown
  Bacterial polypetide isolated from the Sargasso Sea
IETLPAAFQMDEILYELKDHIVGLNCGRWDYIFSYIKRLALNPNYILPDRSQVIMGDAFLNSYSLLLIKTCHKRGAFAMGGMAAQIPVKNNDEENDKAFEKVRNDKEREVNNGHDGTWVAHPGLVPVAMEIFDKQLSGDNQLDVSLDNITITQDDLLEVHKGQRTEEGMRECIKVGVQYIEAWLAGRGAVPLYNLMEDAATAEISRAQIWQWLKHSTKLDDGRTVNEGLFKDILTSEIDNLKEVLGEEVWSKGKYEKAVEIFEKMSISPVCEEFLTLPAYEEIVSS

SEQ ID NO: 116533 - protein, 549 aa, Unknown
  Bacterial polypetide isolated from the Sargasso Sea
MTEHTLGEQQLNSTQNKATANGTLALVGNTIPGQEVIFTEGALALLESLCREFATEVPTLLAKRKDRQARIDKGALPDFLPETRAIRDGAWKIRGIPNDLLDRRVEITGPVERKMVINALNANAKVFMADFEDSLAPSWQKVVEGQINLRDAVRGEIEYTAPETGKHYKLGPNPAVLICRVRGLHLKEKHVEFNQQSIPGALFDFAMYFYHNYRQLLAKGSGPYFYIPKLESHIEARWWAKVFAFVEERFCLQPGTIKCTCLIETLPAVFEMDEILYELRSNIVALNCGRWDYIFSYIKTLKRHSDRVLPDRQAVTMDTPFLSAYSRLLIKTCHKRGALAMGGMAAFIPAKDPAQNETVLQRVRKDKELEARNGHDGTWVAHPGLADTAMGIFNEYIGQDHQNQLHITRDVDAPILAAELLKPCDGERTEQGMRLNIRIALQYLEAWISGNGCVPIYGLMEDAATAEISRASIWQWIQHGKSLSNGKPVTKQLFKDMLVEELANVKKEVGSDRFTHGKFTQAAVLLEDITTSDELVDFLTLPGYEMLTA

SEQ ID NO: 116534 - protein, 217 aa, Unknown
  Bacterial polypetide isolated from the Sargasso Sea
TCHKRGAFAMGGMAAQIPVKNNDEENDKAFEKVRNDKEREVNNGHDGTWVAHPGLVPVAMEIFDKQLSGDNQLDVSLDNITITQDDLLEVHKGQRTEEGMRECIKVGVQYIEAWLAGRGAVPLYNLMEDAATAEISRAQIWQWLKHSTKLDDGRTVNEELFKDILTSEIANLKEVLGEEVWAKGKYEKAVEIFEKMSISPVCEEFLTLPAYEEIVSS

SEQ ID NO: 116535 - protein, 256 aa, Unknown
  Bacterial polypetide isolated from the Sargasso Sea
IHTSMKAGPMVRKTDMKGQKWIQSYEDWNVDVGLACGFSGKAQIGKGMWAMPDEMADMVKNKIGHPMAGANCAWVPSPTAATLHAIHYHRVNVLERQQELMEREPANLYDILKIPLEEQPNWSEEEIRKELENNCQGILGYVVRWIDQGVGCSKVPDIQDVGLMEDRATLRISSQMLANWLLHGIVSEEQVTQALERMATVVDRQNAEDPLYQPMAPSFEGIAFQAARDLVFKGTEIPNGYTEPTLHARRRELKSA

SEQ ID NO: 116536 - protein, 320 aa, Unknown
  Bacterial polypetide isolated from the Sargasso Sea
GGEEMTRTLNEDRNYSDKNGQEITLPGRSVLLVRNVGHLMTNPAILDGNNNEVPEGIMDAMFTICIGKHDLLKEGKQSNSRTGSIYIVKPKMHGPEEVKFTCDLFAKVEQELGLDPLTVKIGIMDEERRTTVNLKECIRVASDRVIFINTGFLDRTGDEIHTSMEAGPVVPKAEMKQQSWIAAYEDWNVDIGLETGFKGKAQIGKGMWAMPDEMLGMYENKSMHPEAGANCAWVPSPTAATLHAIHYHKVSVSERQEELASRPRADLKDILSIPLLENPESLTPEVIQTELDNNCQGILGYVVRWVDLGVGCSKVPDINN

SEQ ID NO: 116537 - protein, 317 aa, Unknown
  Bacterial polypetide isolated from the Sargasso Sea
MRKNFKILTKNVDREISSICGPQLVCPVSNARFLLNAANARWVSLYDSLYGTDIIPETQGAVKGKTYNPIRGKKVIEYARNLLDMYVPLKGKSWKDLTKIPEVINNKVDLKLNNYKQFVGYKKKKKKLSSLLFVNNNLHIDILFDQSGKMEINNPDGNQDKIKIHDIILESAISTICDHEDSVAAVDAEDKVQGYRNWLGLMKGDLKEEFVKNGKKILRKLNPDRDYVSIKGKKFKLHGRSLLLNRNVGHLMTNPAILLKDGSECPEGIMDAFITTLACLHDFKKKGNSRVNSIYIVKPKMHGPDECRFTNLIFEKV

SEQ ID NO: 116538 - protein, 324 aa, Unknown
  Bacterial polypetide isolated from the Sargasso Sea
FTDLIFKNVEKVLKLKNNQILCGIMDEERRTSLNLKECIRALKKRVFFINTGFLDRTGDEIHTSMEYGPMILKGDMKASKWIRAYENNNVDVGLSCGFSGKAQIGKGMWAMPDLLNDMMKQKISHPEAGANCAWVPSPTAAAIHSLHYHHVDVFSKQKDIMKRKKAKLDDLLEIPINSPKNKWSKSQISEELKNNTQGILGYVVRWIDQSVGCSKVPDINGVGLMEDRATCRISSQHIANWLHHGVCSKKQVLEIMKKMAKIVDNQNLKDKSMKGQDPYQSMGANYYQSIAFKTACDLVFHGKSQPSGYTEPLLHFNRIMKKSI

SEQ ID NO: 116539 - protein, 314 aa, Unknown
  Bacterial polypetide isolated from the Sargasso Sea
LKGKTYNPIRGKKVIEYGRTILDKYVPLKNKSWEKLKKIPEVKNNKLYLKLKNPKQFVGYKKKSNEISSILFKNNNLHIDILFNVKRNMETNNPESQRMQDELKIHDILLESAITTICDHEDSVAAVDAEDKVLGYKNWLGLMRRNLKVEFKKNGKKIFRKLNSDRDYISPEGKKFKLHGRSLLLNRNVGHLMTNPAILLKNGSECPEGILDAFITSLACLHDFKIKGNSRTNSIYIVKPKMHGPEECSFTNLIFEKVEKVLNLKKNQILCGIMDEERRTSVNLKECIRILKNRVFFINTGFLDRTGDEIHTSM

SEQ ID NO: 116540 - protein, 370 aa, Unknown
  Bacterial polypetide isolated from the Sargasso Sea
TTLKDANKFIGHRGEADSPSAIILKNNNLHIEILKNPRAFSAQQDHAGISDIILESAVSTICDNEDSVAAVDAQDKVICYRNWLGLMKGDLLTRFEKEGKTLERKLNPNRSYISKEGKGLKLHGRSLLLIRNVGHLMTNPSIILKDGSEIPEGLMDAFITTAAALHDKKKKGNSRAGSIYIVKPKMHGPDETAFTNEIFTKVEEVLKLKKYTCKIGIMDEERRTSSNLKECIRTLKHRVFFINTGFLDRTGDEMHTSMEAGPMIKKGDMKSSKWIGAYENNNVDIGLACGFSGKAQIGKGMWAMPDKMKDMLDQKTGHLKDGANCAWVPSPTAAAIHALHYHEINIFDVQKKLSNRDKAKIDDLLTIPIA

SEQ ID NO: 116541 - protein, 252 aa, Unknown
  Bacterial polypetide isolated from the Sargasso Sea
MEAGPMIKKGDMKESKWIKTYEDNNVDIGLKCGFSGVAQIGKGMWAMPDKMNEMMEQKIGHVNAGANCAWVPSPTAAALHVMHYHEVNVFEKQKAIIKREPSKLSDLLTIPIADRPNWSVDEINAEISNSAQTILGYVVRWIDQGIGCSKVPDINDIGLMEDRATLRISSQHIANWLHHGLCSNRQVLEILKKMAKVVDKQNKDDSNYESMSPEYDKSIAFKAACELIFHGKSQPSGYTEPLLHLNRLIKKS

SEQ ID NO: 116542 - protein, 314 aa, Unknown
  Bacterial polypetide isolated from the Sargasso Sea
RLVDQRLLFHTEQDQITYLKNEDQFKGFNGSPENPSEVLLVNNNLHLEIQIDPNHPVGKTDKANIKDIVLESAVSTIQDCEDSVAAVDAEDKVIAYRNWLGLMKGNLSETFEKNGKQLTRVLKEDREYLDTNGNSFSLPGRSLLLVRNVGHLMQNPSVILGNGEEVFEGILDAMFTICIALHDLNKLNILSNSRNKSMYIVKPKMHGSEEVAFTCDLFDAVERLFNLEKNTVKVGIMDEERRTTINLKACIKKAKERIIFINTGFLDRTGDEIHTSMEAGPMVPKSDMKAQSWINAYEDWNVDIGLSCGLSGKA

SEQ ID NO: 116543 - protein, 323 aa, Unknown
  Bacterial polypetide isolated from the Sargasso Sea
YLKEEGNDFKIDTKKLDSEISSIAGPQLVVPIMNSRYTLNAANARWVSLYDSLYGTDLIESEETGSQKYDPLRGQEVIKFARNFLNDHFSINGIHWKDINGFKIEGSKLKILKDNKEFELVDKNKFIGYRGEPDNPTTIILENNNLKIEIIINPKAFSAVQDAAGISDIIIESAISTICDNEDSVAAVDSEDKILCYRNWLGLMKGTLKSVFEKDGKTLERKLNPDRSYISKDNKKEKLHGRSLLLIRNVGHLMTNSAIILEDGSEVPEGIMDAFITTAAAIHDLKRKGNSRTGSIYIVKPKMHGPEETAFTDKIFTKVEEVL

SEQ ID NO: 116544 - protein, 350 aa, Unknown
  Bacterial polypetide isolated from the Sargasso Sea
EKKGKTYIRKLNPDRKFVKKDGSLSKLHGRALLLNRNVGHLMTNPCILLKDGSEIPEGILDAFVTSLCSMHDIKLKKNSRTGSIMIVKPKQHGPEECSFTNLIFEKVEKVLRLEKYTIKCGIMDEERRTSLNLKECIRELKDRVFFINTGFLDRTGDEIHTSMEFGPMIKKADMKNADWIKAYENNNVDIGLKCGFMGIAQIGKGMFAEPDNMNKMMIEKINHLNAGANCAWVPSPTAAALHSLHYHEIDIFKKQLELKKRKKIRQKDLLKIPYANGKRWKIEEIRNEIANCAQSILGYVVRWIDQGIGCSKVPDINGVFLMEDRATLRISSQLIANWLHHGICSRKQVL

SEQ ID NO: 116545 - protein, 324 aa, Unknown
  Bacterial polypetide isolated from the Sargasso Sea
KLKIHDIFLESAISTICDHEDSVAAVDAEDKVVGYKNWLGLMKGNLKVKFKKKGKNVLRKLSRDRKYISPYGKQFKLHGRSLLLNRNVGHLMTTPSILLKNGSECPEGILDAFITSAACIHDFKKKQNSKKNSIYIVKPKMHGPDECAFTNLIFEKVEKLLKLKKYTIKCGIMDEERRTSVNLKECIRSLKNRVFFINTGFLDRTGDEIHTSMELGPMMKKGEMKSSTWISAYENNNVDIGLSCGFSGKCQIGKGMYAAPDLMADMIKQKISHPLGGANCAWVPSPTAAALHVLHYHEVNVFSKHKELLKRKPAKILDLLTIPI

SEQ ID NO: 116546 - protein, 224 aa, Unknown
  Bacterial polypetide isolated from the Sargasso Sea
MWFSGKAQIGKGMWAMPDKMKEMLDEKISHLKAGANCAWVPSPTAASLHALHYHQINIFDEQKKIMKREQSKLDDLLTIPVADRPNWSVDEINKEITNSAQTLLGYVVRWIDQGVGCSKVPDINNIGLMEDRATLRISSQHIANWIHHGITTKIQVMEIMKAMAKVVDKQNENDKNYIKMSDNFENSLAFKTACDLIFKGKDQPSGYTEPLLHLNRIEKKSSLN

SEQ ID NO: 116547 - protein, 315 aa, Unknown
  Bacterial polypetide isolated from the Sargasso Sea
NWLGLMKGDLKSIFEKNGKELERKLNPDRSYTSLNGEKLKLHGRSLLLVRNVGHLMTNPAITLNDGSEVPEGIMDAFITSAACIHDLKRKGNSREGSIYIVKPKMHGPEETEFTNLIFTKVEEVLKLEKNTIKCGIMDEERRTSANLKECIRTLKDRVFFINTGFLDRTGDEMHTSMEAGPMIKKGDMKASKWIKTYEDNNVDIGLKCGFSGVAQIGKGMWAMPDKMNEMMEQKIGHVNAGANCAWVPSPTAAALHVMHYHEVNVFEKQKAILKREPSKLSDLLTIPIANRPNWSIDEINTEISNSAQTILGYVV

SEQ ID NO: 116548 - protein, 217 aa, Unknown
  Bacterial polypetide isolated from the Sargasso Sea
AQIGKGMWAMPDRMADMMNQKISHPESGANCAWVPSPTAATLHATHYHKIDVFQKQNKIKSRKKANLENILKIPKADRPNWSVEDINKELENNAQGILGYVVRWVDQGVGCSKVPDINDIGLMEDRATLRISSQHMANWLHHNICSKDQVMSVMKKMAAIVDQQNKEDKNYLPMSPNFEKSVAFTAACDLVFKGREQPSGYTEPILHKKRLEKKSNR

SEQ ID NO: 116549 - protein, 320 aa, Unknown
  Bacterial polypetide isolated from the Sargasso Sea
LNPDRSYISKDGKKLKLHGRSLLLVRNVGHLMTNPSILLKDGSEIPEGIMDAFITSAACLHDFKRKGNSRKGSIYIVKPKMHGPDETAFTDLIFSKVEEVLGLKKYTCKIGIMDEERRTSVNLKECIRTLKNRVFFINTGFLDRTGDEIHTSMNAGPMIKKGDMKKSKWISAYENNNVDIGLECGFSGVAQIGKGMWAMPDKMSDMMNQKIDHLKAGANCAWVPSPTAAALHSLHYHEIDIFKKQKELLKRKKTNPDDLLVIPTANRPNWSIEDINQEISNSAQTLLGYVVRWIDQGVGCSKVPDINNIGLMEDRATLRI

SEQ ID NO: 116550 - protein, 288 aa, Unknown
  Bacterial polypetide isolated from the Sargasso Sea
QVYRLNDEIATLIIRPRGWHLNEKHVTINDQAISASLFDFAVYLSNNYEALSKKGTGPYFYLPKLENHLEARLWNDVFVHAQNFLNIDCGTIKATVLIETITAAFEMDEIIFELKEHSAGLNCGRWDYIFSFIKKFRNHQNFLLPNRTEVTMERHFLKSYVDLLIRTCHKRNVHAMGGMAAQIPIRGDEEQNQIAMNKVSLDKLREANAGHDGTWIAHPGLSQAAMNAFNQAMGSSPNQITNKRNDVSVNAQDLIKAPDGNITEDGLRQNISIGIQYIEAWLSGNGCV

SEQ ID NO: 116551 - protein, 129 aa, Unknown
  Bacterial polypetide isolated from the Sargasso Sea
ILGYVVRWIDQGVGCSKVPDINNIGLMEDRATLRISSQHIANWLHHGICTKDQVMTVMKKMATIVDKQNDKDPAYSRSGRSGYKKMSDNFEKSIAFSAACDLVFKGRIQPSGYTEPLLHEKRLEKKLSS

SEQ ID NO: 116552 - protein, 338 aa, Unknown
  Bacterial polypetide isolated from the Sargasso Sea
PGRSLMLNRNVGHLMTNPSILLSDGSEIPEGIMDAFITTAAAIHDFKNKGNSKTNSVYIVKPKMHGPDEVAFTNLIFEKVEKVLKLKKFTIKVGIMDEERRTTVNLKECIRAVKNRVVFINTGFLDRTGDEIHTSMEAGPVIKKGDMKSSKWIAAYEKNNVEVGLACGFSGIAQIGKGMWAAPDKMADMISQKINHPKSGANCAWVPSPTAATLHVLHYHQINVFFKQKELKNKTSSKISDILTIPIADRPNWSTEEITKELENNAQGILGYVVRWIDQGVGCSKVPDIDNVGLMEDRATLRISSQHIANWLQHGVCSKKQVLETMKKMANIVDKQNI

SEQ ID NO: 116553 - protein, 320 aa, Unknown
  Bacterial polypetide isolated from the Sargasso Sea
EIGYLNKEGKKFQIGTKNVDSEISTIAGPQLVVPVMNARYSLNAANARWGSLYDALYGTDVISESNGAERGKKYNYIRGEKVIAYARNFLDINVPLKKGSWKNISEIPKVENNKIKLKLKNPKQFIGYAKKSNYLSSLLFKNHNLHIDIKFDPYYTIGGLKDKSAGELQDKAAIYDIILESAITTIVDHEDSVAAVDAKDKVHGYRNWLGLMKGNLLYKGEKNGKKLIRKLNPDREYIDPNGNEIKLHGRALMLNRNVGHLMTNPSILLSDGSEIPEGIMDAFITTAAAIHDFKNKKNSRTNSVYIVKPKMHGPDEAAFT

SEQ ID NO: 116554 - protein, 211 aa, Unknown
  Bacterial polypetide isolated from the Sargasso Sea
MQDMLSQKIGHPKSGANCAWTPSPTAATLHAMHYHKIDVFDIHKKIKNKIKFDLDNLLNIPVISKPSWNIDDVKNELENNCQGILGYVVRWINSGIGCSKVPDINNIGLMEDRATLRISSQHIANWLYHNICTKSQVLETMKKMAKIVDDQNRDDQSYEKMSNNFEKSIAFKTACDLVFKGKDQPSGYTEPLLHANRYLKKKLNLGSIFKS

SEQ ID NO: 116555 - protein, 312 aa, Unknown
  Bacterial polypetide isolated from the Sargasso Sea
DLFDAVERLFNLEKNTVKVGIMDEERRTTINLKACIEKAKERIIFINTGFLDRTGDEIHTSMEAGPMVPKSDMKAQSWINAYEDWNVDIGLSCGLSGKAQIGKGMWAMPDEMKDMVETKIAHPLSGATCAWVPSPTAATLHAMHYHEVDVLSKQDELSSRQHADLDSILTIPLLKEDLDKQTIRNEIANSAQGILGYVVRWIDQGIGCSKVPDINNIGLMEDRATCRISSQHISNWIHHGICSEEEVIDIFKEMALVVDEQNKDDSEYQKMGSNFSGFAFQASLDLAIKGAFQPSGYTEPLLHQWRLEFKKN

SEQ ID NO: 116556 - protein, 313 aa, Unknown
  Bacterial polypetide isolated from the Sargasso Sea
IKEYEKFLKEIGYLNEEGEDFKIDTKNIDDEIAKIAGPQLVVPVMNARYALNAANARWMSLYDSLYGTDVIQSEESASERYDPERGLEVINYTKKFLDENFSLENNSWRNVNKIKVVDNDLCLEISKEKVGLKDKNKFIGFRGNDRSPSGVILKNNNLHVEIIINPNAFSAKSDAAGISDIILESAITTICDHEDSVAAVDAEDKVAGYRNWLGLMKGNLVSTFEKRGKKLIRKLNPDRKFIDKSGKEQKLFGRSLLLNRNVGHLMTSPAILLHGGSEIPEGIMDAFITTLCALHDLRTRKNSRQSSIYIVSL

SEQ ID NO: 116557 - protein, 286 aa, Unknown
  Bacterial polypetide isolated from the Sargasso Sea
LIAIHDLKKTSNKNSIYNSIYIVKPKMHGPEEVEFTVNLFERIEAMLNLPNNTIKVGIMDEERRTSINLKECIRAAKSRLAFINTGFLDRTGDEIHTSTQAGSFITKADMKNTAWIKSYEDRNVDIGLECGLKGKAQIGKGMWAMPDLMMEMVEQKISHPKAGANCSWVPSPTAATLHAMHYHYVNVFDIQDEIKANGKRGTLNDLLTLPLLNKRNLSEEEINNEIENNAQGILGYVVRWVDQGIGCSKVPDINNIGLMEDRATCRISSQAIANWIENGLITKEQA

SEQ ID NO: 116558 - protein, 325 aa, Unknown
  Bacterial polypetide isolated from the Sargasso Sea
FLKTINISNNSEYKSLYIVKPKMHGPEEVEFSIDTFTKIEELLTIPKNTIKIGIMDEERRTTLNLKECIRAAKDRVFFINTGFLDRTGDEIHTSMEAGTMIKKSEMKNVGWIKAYENWNVEIGLNCGFSGLAQIGKGMWAMPDMMSRMMEEKIAHCQSGANTAWVPSPTAATLHALHYHKVDVMELHKKNTKKRIVTIDDLIDLPIVNNPNWTEKEVKTELENNIQGILGYVVKWINNGIGCSKVPDINNIGLMEDRATLRISSQHISNWLYQGVCKESQVLETFKKMAVVVDEQNKYDDKYIPMSQDFDNSIAFNTAIELILKV

SEQ ID NO: 116559 - protein, 283 aa, Unknown
  Bacterial polypetide isolated from the Sargasso Sea
TDIIPENYGAVKGKTYNPIRGKKVIEYARSLLDRYVPLKDKSWKELTKIPEIIDNKINLKLKNSEQFVGYKKKSNKISSLLFVNNNLHIDILFDQDGKLEVNNPDGNQDKIKIHDILLESAISTICDHEDSVAAVDAEDKVLGYRNWLGLMKGNLKVEFIKNGKKIIRKLNSDRNYISKKGKKLKLHGRSLLLNRNVGHLMTNPAILLKDGSECPEGILDAFITSLACIHDFKKKQNSRVNSIYIVKPKMHGPEECEFTNLIFEKVEKVLNLKKYQILLWNYG

SEQ ID NO: 116560 - protein, 244 aa, Unknown
  Bacterial polypetide isolated from the Sargasso Sea
KGDMKSSTWINAYENNNVDIGLECGFSGVAQIGKGMWAMPDKMADMVNQKIVHLEAGANCAWVPSPTAAALHALHYHQISVFKKHDELKKRKKTQLSDLLTIPVVNNPKWKIEEINKEISNSAQTILGYVVRWIDQGIGCSKVPDLNNIGLMEDRATLRISSQHIANWLHHGICSRKHVLEIMKKMAKVVDKQNEGDKNYQNMSPHYDKSIAFKTACELIFQGKSQPSGYTEPLLHLNRLIKKN

SEQ ID NO: 116561 - protein, 280 aa, Unknown
  Bacterial polypetide isolated from the Sargasso Sea
KFEKDGKKLIRKLNPNRNYISKDGTKESLHGRALLLNRNVGHLMTNSAVLLQDGSEIPEGILDAFVTSLCAIHDLKNKNNSRTGSIYIVKPKQHGPDETSFTNLLFSKVEKVLGLEPFTIKCGIMDEERRTTINLKECIRTLENRVFFINTGFLDRTGDEMHTSMEAGPMIKKGDMKTSAWINAYENNNVDIGLKCGFSGIAQIGKGMWAMPDKMADMLNQKISHLEAGANCAWVPSPTAAALHAIHYHKINIFEQHDKIKKRNTAKLDDLLTIPVIKNP

SEQ ID NO: 116562 - protein, 123 aa, Unknown
  Bacterial polypetide isolated from the Sargasso Sea
SAQTILGYVVRWVDHGIGCSKVPDINNVGLMEDRATLRISSQHIANWLHHGICSNRQVLEILKKMAKIVDKQNKGDPEYQNMSPNYDRSISFKAACELIFHGKSQPSGYTEPLLHLNRLIKKS

SEQ ID NO: 116563 - protein, 319 aa, Unknown
  Bacterial polypetide isolated from the Sargasso Sea
IDMANISDVIVESALSTIVDNEDSVAAVDAEDKVKCYRNWLGLMKGDLTSTFEKNGKIIVRKLNPDRIYTSKYEKKINLHGRALLLNRNVGHLMTNSSILLKDGSEIPEGIMDAFVSTLCALHDFKNKKNSRTGSVYIVKPKMHGPEEVAFTNTLFEKVEETLGIKKYSIKVGIMDEERRTTVNLKECIRKVKNRIVFINTGFLDRTGDEMHTSFEAGPMIFKGEMKKSTWLNSYENWNVDVGLSCGFSGKAQIGKGMWAMPDQMANMLEQKIDHPKSGANCAWVPSPTAATLHSLHYHKINVFDEQTKIKLRDKAKIE

SEQ ID NO: 116564 - protein, 292 aa, Unknown
  Bacterial polypetide isolated from the Sargasso Sea
MTNVITHGGLTVAKDLYDLVNNEILANGTISADQFWSGLDESVHQLAPKNHDLLQKRTKLQKQIDEWLKANSDGGVDAIAYETFLGDIGYLHNDAGDFNIETSNVDPEIATIAGPQLVVPITNARYALNAANARWGSLYDALYGTDTICDQGGASKTFTYNPVRGAKVIAFTRDLLDRSVPLATSSWTEASGFTINNNRLEVKIGSMTSSLRDASQFIGYTGTSNAPDSIILIKNGLHLEVIIDADGTIGSGDAAHINDVIVESALTSIIDLEDSIAAVDAEDKVLAYRNGT

SEQ ID NO: 116565 - protein, 308 aa, Unknown
  Bacterial polypetide isolated from the Sargasso Sea
DKGGKFITRELNPDRKYLLKNGKMILLPGRSLMLVRNVGHLMTNPAVRDRKGNEVPEGIMDAFFTVCIAIHDIIGNGVYKNSKTKSIYIVKPKMHGPEEVKFTCDLFSEVERIFNLPENTVKLGIMDEERRTTVNLKECIEIAKQRVIFINTGFLDRTGDEIHTSMEAGPMVTKAEMKNQDWIKAYENWNVDIGLETGFKGNAQIGKGMWPMPDEMLDMYNTKTMHPKAGANCAWVPSPTAAIIHAIHYHQINVQDEQEKISKREKADLDDLLKIPFMEKNQLPSQEEINAELENNAQGILGYVVRWV

SEQ ID NO: 116566 - protein, 277 aa, Unknown
  Bacterial polypetide isolated from the Sargasso Sea
NVNKIKVVDNDLCLEISKDKVGLKDKNKFIGFRGKNQSPSGIILKNNNLHVEIIINPNAFSAKSDAAGISDIILESAITTICDHEDSVAAVDAEDKVVGYRNWLELMKGNLVSTFEKRGKKLIRKLNPDRKFIDKNGKEQKLFGRSLLLNRNVGHLMTSPAILLNGGSEIPEGIMDAFITTLCALHDLKTRKNSRQSSIYIVKPKMHGPDECSFTDLIFHTVEKILGLDEYTIKCGIMDEERRTSVNLRECIRRLKDRVFFINTGFLDRTGDEIHTS

SEQ ID NO: 116567 - protein, 313 aa, Unknown
  Bacterial polypetide isolated from the Sargasso Sea
WGSLYDALYGTDAIGSEKLDNRYNPVRGGKVIRYCRDFLDETFPLKNGSWKKINSLKILGHKLLLKIDNKSFKLKNPKQYKGYRSDKKKLKGVLLVNNNLHVELIINPYAFSANNDPIGLSDLVIESAVSTIIDHEDSVAAVDAEDKVLGYRNWLGLMKGDLKVKFDKLGKKYERFLNSDRNYISSNGKGIKLHGRALLLNRNVGHLMKTPAVLFSDKAQIPEGILDAFITSAACLYDLNKKKNSRKGSIYIVKPKMHGPDEVAFADEIFSKVEEVLKIKKDTIKIGIMDEERRTSANLKQCIKKVKKRSSIY

SEQ ID NO: 116568 - protein, 259 aa, Unknown
  Bacterial polypetide isolated from the Sargasso Sea
ITINDQPISGSLFDFGVYLSNNFEALSEKGTGPYFYLPKLENHLEARLWNDVFLHAQDFLNIDRGTIKATVLIETITAAFEMDEIIFELRDHSAGLNCGRWDYIFSFIKKFRNHEEFLLPNRTEVTMERHFLKSYVDLLIQTCHKRNVHAMGGMAAQIPIRSNEKQNQIAMDKVASDKSREANAGHDGTWIAHPGLSDVAMNAFNQAMGTSANQISNKRNDVSVRAQDLIKVPNGSITEEGLRQNITIGIQYIEAWLSG

SEQ ID NO: 116569 - protein, 258 aa, Unknown
  Bacterial polypetide isolated from the Sargasso Sea
NVDDEISIIAGPQLVVPIDNARYALNAANARWGSLYDAYYGTDAIKETDGLQKTNKYNPKRGLKVIEKGRDFLDQIFPLEKQKWSDVEKIFVDKENLAFNCQNNSQDKLKNIKQFIGYNGKKENPISIILKNNNLHIEIIIDPKSQVGKNDKAHISDILIESAISTIMDLEDSVAAVDAEDKVKCYRNWLGIMKNELKTTVNKNGNSFDRKLNDDKKFIDINGNEKFLNGRSLLLIRNVGHLMRNNTVILDNGEEIPE

SEQ ID NO: 116570 - protein, 263 aa, Unknown
  Bacterial polypetide isolated from the Sargasso Sea
MNARYSLNAANARWGSLYDALYGTDVISESNRAERGKKYNYIRGEKVIKYARNFLDINFPLKKDSWKNISEIPKVENNKLNLKLKNPKQFIGYKKKSNHLSSLLLKNNNLHIDIKFDPYYTIGGLKDKSVGELQDKAAIYDIILESAITTIMDHEDSVAAVDAKDKVHGYRNWLGLMKGDLLYKGKKNGKKLIRKLNPDRKYTDHNGNEIKLHGRALMLNRNVGHLMTNPSILLSDGSEIPEGIMDAFITTAAAIHDFKNKKN

SEQ ID NO: 116571 - protein, 190 aa, Unknown
  Bacterial polypetide isolated from the Sargasso Sea
ESGANCAWVPSPTAATLHSLHYHEIDIFNKHKELKKRESAKLSDILTIPIINNPNWSIDEINKEISNSAQTLLGYVVRWIDQGVGCSKVPDIDNVGLMEDRATLRISSQHIANWLHHGICSKKQVLEILKKMAKVVDQQNKEDKNYKKMSPEFDKSIAFKTACELIFQGKDQPSGYTEPLLHLNRLIKKN

SEQ ID NO: 116572 - protein, 299 aa, Unknown
  Bacterial polypetide isolated from the Sargasso Sea
KYSIKVGIMDEERRTTVNLKECIRQVKNRIVFINTGFLDRTGDEMHTSFEAGPMIFKGEMKKSTWLNAYENWNVDVGLNCGFSGKAQIGKGMWAMPDQMANMMDQKISHPKSGANCAWVPSPTAATLHSLHYHKVNVFEEQNKLKLRNKTKLENILEIPKADRPNWSVEDINRELENNAQGILGYVVRWIDQGVGCSKVPDINNVGLMEDRATLRISSQHIANWLHHGICSEDQVMKILKKMAKTVDSQNEKDPLYVKMSDNFEKSIAFSAACDLVFKGRFPPSGYTEPLLHKKRLEKK

SEQ ID NO: 116573 - protein, 174 aa, Unknown
  Bacterial polypetide isolated from the Sargasso Sea
LHAMHYHKLNIFEKHKKLNNNKINYIDNLLTIPIADRPNWGKEEIKNELCNSAQTILGYVVRWVDQGIGCSKVPDINNVGLMEDRATLRISSQHIANWLHHGICSNRQVLEILKKMAKIVDKQNEGDPKYQKMSPNYDKSISFKAACELIFHGKSQPSGYTEPLLHLNRLIKKS

SEQ ID NO: 116574 - protein, 295 aa, Unknown
  Bacterial polypetide isolated from the Sargasso Sea
IAGPQLVVPVMNARYALNAANARWISLYDSLYGSDLIESEESASERYDPERGAEVIKFTKNFLDENFELNNSSWKNVSKIEFANKKLNLFIDDQITNLKDKSKFLGYRLKEEKLSAIILKNNNLHVEIIINPDAFSAKGDAAGISDIIVESAISTICDHEDSVAGVDAYDKVVGYKNWLGLMKGNLTAEFEKTGKKYVRKLNPDRSYIDKDGGKNKLHGRALLLNRNVGHLMTNPAILLSDGSEIPEGIMDGFITSLICLYDLKNKKNSRTGSIYIVKPKMHGPDEALFTDLVFS

SEQ ID NO: 116575 - protein, 299 aa, Unknown
  Bacterial polypetide isolated from the Sargasso Sea
SLLGDLFSAVEEALNLDQLTAKVGIMDEERRTTVNLKECIRVAKERIIFINTGFLDRTGDEIHTSMEAGPMIPKADMKKQPWILAYEDWNVDSGLETGFKGNAQIGKGMWPMPDEMLNMYQTKIMHPESGANCAWVPSPTSATLHAMHYHQILVSNRQQSILERPKASIDDILTIPLMENPEGLSGEDIQKELDNNAQGILGYVVRWVDQGVGCSKVPDINNVGLMEDRATCRISSQHIANWLHHSICSKDQVIDTMKRMALVVDQQNSEDPSYLPMGPSFDGIAFKAACNLAIEGKVS

SEQ ID NO: 116576 - protein, 310 aa, Unknown
  Bacterial polypetide isolated from the Sargasso Sea
LKLHGRSLLLNRNVGHLMTNSSILLEDGSECPEGILDAFITSLACLHDFKEKGNSRVNSIYIVKPKMHGPEECSFTNLIFEKVEKVLNLKKYQILCGIMDEERRTSVNLKECIRALKNRVFFINTGFLDRTGDEIHTSMEVGPMIKKGEMKSSKWIQAYENNNVNVGLECGFSGKCQIGKGMYAAPDLMSEMMKQKIIHPLSGANCAWVPSPTAAALHALHYHEVDVFVKQRELLKRKPAKLFDLLTIPITKKPNWSIEEINKELKNNAQGILGYVVRWVDQSVGCSKVPDINGVGLMEDRATCRISSQH

SEQ ID NO: 116577 - protein, 278 aa, Unknown
  Bacterial polypetide isolated from the Sargasso Sea
PDEVGFANELFGRVEEVLGLEKYFIKVGIMDEERITTVNLKECIRKVKERVVFINTGFLDRTGDEMHTSFEFGPMIFKGEMKKSTWLNTYENWNIDIGLSCGFSGKAQIGKGMWAMPDRMSDMMQQKKDHPRSGANCAWVPSPTAATLHSIHYHQFNVFKKQKELKSRVKAKLEDLLKIPVADRPNWSVEEINRELENNAQGILGYVVRWIDQGVGCSKVPDINNVGLMEDRATLRISSQHIANWLHHGICSKEQVLKIMKKMAAIVDKQNINDKNYQ

SEQ ID NO: 116578 - protein, 288 aa, Unknown
  Bacterial polypetide isolated from the Sargasso Sea
EDFQIETSNVDLEISSIAGPQLVVPVDNARYALNAANARWGSLYDALYGTDALPGKKVSGYDAERALKVINYVRDFLNDTIPLSDTSWNEVTNIIVKGDNLIFLTEKKESFLKNKNQFIGYRGDKENLESILVKNNNLHIDIIINPNNDIGKIDKASISDIIVESALSTIIDNEDSVAAVDADDKIKCYRNWLGLMKGDLETKMEKNGKKFTRKLNPNRSYISPNGEKISLHGRALLLNRNVGHLMTNPTIILKDGSEIPEGIMDAFFSTLCALHDFQNKNNSRTGSV

SEQ ID NO: 116579 - protein, 305 aa, Unknown
  Bacterial polypetide isolated from the Sargasso Sea
IKCGIMDEERRTSLNLKECIRELKDRVFFINTGFLDRTGDEIHTSMEFGPMIKKADMKNADWIKAYENNNVDIGLKCGFMGIAQIGKGMFAEPDNMNKMMIEKINHLNAGANCAWVPSPTAAALHSLHYHEIDIFKKQLELKKRKKIRQKDLLKIPYANGKRWKIEEIRNEIANCAQSILGYVVRWIDQGIGCSKVPDINGVFLMEDRATLRISSQLIANWLHHGICSRKQVLEIMKKMAKVVDKQNIKDKNYQNMFPNYDKSIAFKTACELIFQGKDPPSGYTEPLLHLNRLIKKNKYLYFFCF

SEQ ID NO: 116580 - protein, 304 aa, Unknown
  Bacterial polypetide isolated from the Sargasso Sea
NWLGLMKGDLEAQVEKNKKKFTRKLNPDRIYKSPNGSKITLHGRALLLNRNVGHLMTNPSIVLKDGSEIPEGIMDAFFSTLCALHDFKNKKNSRTGSVYIVKPKMHGPEEVSFTDEIFENVEKVLGLNKNTIKVGIMDEERRTTVNLKECIRRVKERVVFINTGFLDRTGDEMHTSFEAGPMIFKADMKKSTWLNTYENWNVDVGLSCGFSGKAQIGKGMWAMPDRMSDMMEQKIGHPKSGANCAWVPSPTAATLHSIHYHKINVFDKQSEITKRKKADLKNILEIPKADRPNWSIEDINKELE

SEQ ID NO: 116581 - protein, 249 aa, Unknown
  Bacterial polypetide isolated from the Sargasso Sea
QSIYIVKPKMHGPDECAFTNLIFSKVEEVLNLKKYTIKCGIMDEERRTSVNLKECIRILKNRVFFINTGFLDRTGDEMHTSMEAGPMIKKGDMKSSKWIKAYENNNVDVGLNCGFSGVAQIGKGMWAMPDKMSDMMKQKIGHLEAGANCAWVPSPTAAALHALHYHGLNIFNKHKALKKRTKAKLKDLLTIPITNKPNWSEQDINLEISNSAQTILGYVVRWIDQGIGCSKVPDINNIGLMEDRATLRI

SEQ ID NO: 116582 - protein, 301 aa, Unknown
  Bacterial polypetide isolated from the Sargasso Sea
IDQWHLSKKGSNFEKSEYINFLKSINYIVEEQSDFEINTSNVDKEISSIAGPQLVVPVDNARYALNAANARWGSLYDALYGTDAIPGEIGKDYNEDRGNKVIKFTREFLDNTFPISDASWKKITKIKINEKNLVFQVNEVNYNLKDNSQFVGYTGDDENISSLLLKNNNLHTDIIINPNSIIGKKDKAGITDLIVESAISTIVDNEDSVAAVDAKDKVRCYRNWLGLMKGDLETEVKKGQKKFIRKLNPDRIYKSPNGSKIVLHGRALLLNRNVGHLMTNPSILLKDGSEIPEGYNGCIYS

SEQ ID NO: 116583 - protein, 269 aa, Unknown
  Bacterial polypetide isolated from the Sargasso Sea
LDEEISNIAGPQLVFPIMNSRYSLNAANARWVSLYDSLYGSNIIESEESGSEKYDPLRGQEVIKYTRNFLNKYFPINDLDWKDITGLAVNNKKLLIYKENKEYNLSDLEKFIGHRGNAAKPNAIILKNNNLHLEIIINPRAFSAARDAAGISDIIVESAVSTICDHEDSVAAVDAEDKVTCYRNWLGLMKGNLKSIFEKNGKELERKLNPDRSYTSLNGEKLKLHGRSLLLVRNVGHLMTNPAITLNDGSEVPEGIMDAFITSAACIHD

SEQ ID NO: 116584 - protein, 260 aa, Unknown
  Bacterial polypetide isolated from the Sargasso Sea
GADIYDLVDENKFIGHRGEADNPAAIILKNNNLHIEILKDSRAFAAQQDHAGISDIILESAVSTICDNEDSVAAVDAEDKIICYRNWLGLMKGDLKSKFEKEGKLFERKLNPNRSYVSKDGKGLKLHGRSLLLVRNVGHLMTNPSIILKDGSEVPEGIMDAFITTAAALHDIKKKTNSRTGSIYIVKPKMHGPDETAFTDLLFSKVEEVLGLPKYTCKIGIMDEERRTSANLKECIRSLKNRVFFINTGFLDRTGDEMHT

SEQ ID NO: 116585 - protein, 290 aa, Unknown
  Bacterial polypetide isolated from the Sargasso Sea
VDNEDSVAAVDSSDKVKCYRNWLGLMKGDLKTEVNKNGKTFIRKLNSDRSYVGPDGSKINLHGRALLLNRNVGHLMTNPAILLKDGSEIPEGIMDAFISTLCAMHDFKLKNNSRKESVYIVKPKMHGPEEVEFTNNLFSKVEDALKIKKYSIKVGIMDEERRTTVNLKECIRKVKERVVFINTGFLDRTGDEMHTSFEAGPMIFKGDMKKSKWLNTYEDWNVDIGLACGFSGKAQIGKGMWAMPDKMSDMMKQKINHPKSGANCAWVPSPTAATLHATHYHYFDVFKKPR

SEQ ID NO: 116586 - protein, 284 aa, Unknown
  Bacterial polypetide isolated from the Sargasso Sea
KRMYKASKKIELFFINTGFLDRTGDEMHTSFEAGPMIFKGDMKKSTWLNTYENWNVDVGLKCGFSGKAQIGKGMWAMPDQMANMMAQKINHPKSGANCAWVPSPTAATLHSLHYHKVDVFDEQKRIKTRNIAKVDDILEIPKADRPNWSLEDINRELENNAQGILGYVVRWVDQGIGCSKVPDLNNVGLMEDRATLRISSQHIANWLHHGICNKDQVMKIMMKMAKTVDKQNENDPHYKNMSDNFEKSIAFSAACDLVFKGRVQPSGYTEPLLHKKRLEKKSVN

SEQ ID NO: 116587 - protein, 290 aa, Unknown
  Bacterial polypetide isolated from the Sargasso Sea
SILFKNNNLHIDILIDPNHFIGKIDKASISDFIVESAISTIIDNEDSVAAVDAEDKIKCYRNWLGLMKGDLTAHIEKNGKKFVRKLNPDRTYISKDGNKINLHGRALLLNRNVGHLMTNPAIILKDGTEIPEGIMDAFMATLCALHDFKNKKNSRSGSVYIVKPKMHGPEEVAFTNKLFEKVEEALGIKKYSIKVGIMDEERRTTVNLKECIRQVKNRIVFINTGFLDRTGDEMHTSFEAGPMIFKGDMKKSTWLGAYENWNVDIGLSCGFSGKAQIGKGMWAMPDQMGN

SEQ ID NO: 116588 - protein, 302 aa, Unknown
  Bacterial polypetide isolated from the Sargasso Sea
IIINPKAFSAVQDAAGISDIIIESAISTICDNEDSVAAVDSEDKIICYRNWLGLMKGTLKSVFEKGGKTLERKLNPDRSYISKENKKEKLHGRSLLLIRNVGHLMTNSAIILEDGSEVPEGIMDAFITTAAAIHDLKRKGNSRTGSIYIVKPKMHGPEETAFTDKIFTRVEEVLKLEKNTIKCGIMDEERRTSVNLKECIRTLKSRVFFINTGFLDRTGDEMHTSMEAGPMIKKGDMKKSKWIAAYEDNNVDVGLKCGFSGVAQIGKGMWAMPDKMKDMIDQKISHLEAGANCAWVPSPTAA

SEQ ID NO: 116589 - protein, 277 aa, Unknown
  Bacterial polypetide isolated from the Sargasso Sea
MVIKYGRDFLDKYFPLAGLSWNKITSFAVKYGKLKVLKGADIFDLEDENKFIGHRGESDNPSAIILKNNNLHIEILKDSRAFAAQQDHAGISDIILESAVSTICDNEDSVAAVDSEDKIICYRNWLGLMKGDLKSKFEKEGKLFERKLNPHRSYISKDGKGLKLHGRSLLLVRNVGHLMTNPSILLSDGSEIPEGIMDAFITTAAALHDIKNKNNSRTGSVYIVKPKMHGPDETAFTDLIFSKVEEVLNLPKYTCKIGIMDEERRTSANLKECIRSL

SEQ ID NO: 116590 - protein, 265 aa, Unknown
  Bacterial polypetide isolated from the Sargasso Sea
DRTGDEMHTSMEAGPMIKKGDMKSSKWITAYENNNVDIGLKCGFSGKAQIGKGMWAMPDKMKEMMKDKINHLKAGANCAWVPSPTAASLHALHYHEIDIFKEQQKIKKREPAKINDLLTIPVANRPNWSVDEINKEISNSAQTLLGYVVRWIDQGIGCSKVPDINNIGLMEDRATLRISSQHIANWIHHGVTTKIQVLEIMREMAKVVDKQNANDKNYIKMSDDYERSLAFKTACDLIFEGKNQPSGYTEPLLHKNRLKKKINQN

SEQ ID NO: 116591 - protein, 287 aa, Unknown
  Bacterial polypetide isolated from the Sargasso Sea
MKNDKQLIGYLGELESPSSVLLKNNNLHIDIIFDPKSSNGQQDKAGIHDIILESAISSIMDHEDSVAAVDAKDKIIGYRNWLGLMKGNLQVEMEKYGKKFVRKLNSDRVYTKFENDATKNNSKIILHGRSLMLNRNVGHLMTNSSILLEDKSEVPEGIMDAFITVAAAIHDFKRKGNSRTHSVYIVKPKMHGPEEVSFTDQIFERVEDVLLLKRNTIKIGIMDEERRTTVNLKECIRATKNRVVFINTGFLDRTGDEIHTSFVVGPMIKKGEMKKSGWIAAYEDWNV

SEQ ID NO: 116592 - protein, 233 aa, Unknown
  Bacterial polypetide isolated from the Sargasso Sea
ITLNDGSEVPEGIMDAFITSAACIHDLKRKGNSREGSIYIVKPKMHGPEETEFTNLIFTKVEEVLKLEKNTIKCGIMDEERRTSANLKECIRTLKDRVFFINTGFLDRTGDEMHTSMEAGPMIKKGDMKESKWIKTYEDNNVDIGLKCGFSGVAQIGKGMWAMPDKMNEMMKQKIGHVNAGANCAWVPSPTAAALHVMHYHEVNVFEKQKAILKREPSKLSDLLTIPIADRPN

SEQ ID NO: 116593 - protein, 266 aa, Unknown
  Bacterial polypetide isolated from the Sargasso Sea
DEIFPLKNGSWKEISKFKIQGNELQFSIKDKNQNLKNKNHFVGFSGKKENPSSVLLKNNELYIDIIIDPNSAAGKSDKANISNVIVESAISTIIDNEDSVAAVDSKDKVKCYRNWLGLMKGNLKAEVEKNGKKFIRKLNPDRIYEAPDGSQVILHGRALLLNRNVGHLMTNPSVTLKDGSEIPEGIMDAFISALCAIHDFKSQRNSRTGSMYIVKPKMHGPEEVAFTNDMFEIVEKVLGLKKYSIKVGIMDEERRTTVNLKECIRK

SEQ ID NO: 116594 - protein, 332 aa, Unknown
  Bacterial polypetide isolated from the Sargasso Sea
GKILLGLAVNNKKLTIYKENKEYNLSDLEKFIGHRGEAAKPNAIILKNNNLHLEIIINPRAFSAARDAAGISDIIVESAVSTICDHEDSVAAVDAEDKVTCYRNWLGLMKGNLKSIFEKNGKELERKLNPDRSFTSLNGEKLKLHGRSLLLVRNVGHLMTNPAITLNDGSEIPEGIMDAFITSAACIHDLKRKGNSREGSIYIVKPKMHGPEETEFTNLIFTKVEEVLKLEKNTIKCGIMDEERRTSANLKECIRTLKDRVFFINTGFLDRTGDEMHTSMEAGPMIKKGDMKESKWIKTYEDNNVDIGLKCGFSGVAQIGKGMWAMPDKMTK

SEQ ID NO: 116595 - protein, 304 aa, Unknown
  Bacterial polypetide isolated from the Sargasso Sea
NKSNSRTGSVYIVKPKMHGPDETAFTDLIFSKVEEVLNLPKYTCKIGIMDEERRTSANLKECIRSLKNRVFFINTGFLDRTGDEMHTSMEAGPMIKKGDMKSSKWITAYENNNVDIGLSCGFSGKAQIGKGMWAMPDKMRDMMEQKTGHLKAGANCAWVPSPTAAALHALHYHEINIFDEQKKLTDRKPANLDELLTIPIADRPNWSVEDINKEISNSAQTLLGYVVRWVDQGVGCSKVPDINNIGLMEDRATLRISSQHIANWIHHGITTKIQVTEIMKEMAKIVDDQNKDDPLYVKMSSDYE

SEQ ID NO: 116596 - protein, 247 aa, Unknown
  Bacterial polypetide isolated from the Sargasso Sea
LENFENEFNLKEYKSYIEKIGYLVKEGPDFKIKTKKLDKEISSIAGPQLVVPIMNARYALNAANARWMSLYDSLYGTDVISSEESISERYDPERGLRVIKYTKEFLDKNFKLKNSSWKKVNQLLIQNHKLELQTDKGVVKLEDESKYLGYRIDKEKISAIILKNNNLHIEIIINPSAFSSKGDPAGISDIIIESAISTICDHEDSVAAVDAEDKIVGYKNWLGLMKKDLVAEFEKDGKKLRRKLNPN

SEQ ID NO: 116597 - protein, 278 aa, Unknown
  Bacterial polypetide isolated from the Sargasso Sea
IIIESALTTIQDCEDSVATVDAEDKVMAYKNWLGLMKGDLEDTFEKNGKTITRKLNQDKVYISKNGEYRLPGRSVMLIRNVGHLMTNPGILDKNGEEIPEGIMDAMITSLIAIHDIKNSKMNSRTGSVYIVKPKMHGPEEVKFACDVFSAVEDALNLNKYTLKIGIMDEERRTTVNLKECIREAKERTVFINTGFLDRTGDEIHTAMEAGPIIRKGDIKNAKWISAYENNNVQIGLDCGLSGRAQIGKGMWAMPDLMNEMLKQKINHPKSGANTAWVP

SEQ ID NO: 116598 - protein, 179 aa, Unknown
  Bacterial polypetide isolated from the Sargasso Sea
PTAASLHAMHYHKVDIFEQHKGLKSNKIDYIDNLLRIPVADRPNWSKEEINNELCNSAQTILGYVVRWVDQGIGCSKVPDINNVGLMEDRATLRISSQHIANWLHHGICSNRQVLEILKKMAKIVDKQNEGDPEYQNMSPNYHKSISFKAACELIFHGKSQPSGYTEPLLHLNRLIKKS

SEQ ID NO: 116599 - protein, 323 aa, Unknown
  Bacterial polypetide isolated from the Sargasso Sea
SALTTIIDNEDSVAAVDAEDKIKCYRNWLGLMKGDLTANMEKNGKKFVRKLNPDRTFISKDGKKIALHGRALLLNRNVGHLMTNPAILLKDGSEIPEGIMDAFMATLCALHDFKNKNNSRTGSVYIVKPKMHGPEEVAFTNTLFGKAEEALGIEKYSIKVGIMDEERRTTVNLKECIRQVKNRIVFINTGFLDRTGDEMHTSFEAGPMIFKGDMKKSTWLGAYENWNVDVGLSCGFSGKAQIGKGMWAMPDQMANMMNQKIGHPKSGANCAWVPSPTAATLHSMHYHKVNVFDEQNKIKSRAKAKLNDILEIPAADRPNWAID

SEQ ID NO: 116600 - protein, 123 aa, Unknown
  Bacterial polypetide isolated from the Sargasso Sea
QGILGYVVRWINQGVGCSKVPDINNVGLMEDRATLRISSQHIANWLHHGICKEDQVMEVMKKMAKIVDEQNKNDPAYQKMSDNFDKSVAFSAACDLVFKGRVQPSGYTEPLLHQKRLEKKASN

SEQ ID NO: 116601 - protein, 246 aa, Unknown
  Bacterial polypetide isolated from the Sargasso Sea
IKKEEMKKTKWISAYENNNVDVGLECGFSGIAQIGKGMWAMPDKMADMMKQKISHLESGANCAWVPSPTAAGLHSLHYHEINVIKKQSELKKRKPAKELDLITIPISDRVNWSLEEINDEISNSAQTILGYVVRWIDQGVGCSKVPDINNIGLMEDRATLRISSQQIANWLHHGVCSKKRVLEIMKKMAKVVDKQNENDSKYEQMSPNFEKSIAFKAACELIFHGRKQPSGYTEPLLHFNRLLKKN

SEQ ID NO: 116602 - protein, 278 aa, Unknown
  Bacterial polypetide isolated from the Sargasso Sea
SRKGTDINKKDYFNFLKSINYIIQEKEDFKIETSNVDQEISSIAGPQLVVPVDNARYTLNAANARWGSLYDALYGTDIIPGAKGKDYDSDRGNKVISYVRKFLDESVPLDNLSWKDISRIQVDKKDLVLLSGEEKNHLKNKNQFIGFNGDKNKPTSILLKNNNLHIDILIDPNHFIGKTDKASISDIILESALSTIIDNEDSVAAVDAEDKVKCYRNWLGLMKGDLTVNMEKNGKKFVRKLSPDRTYTSKNGGEIVLHGRALLLNRNVGHLMTNPSII

SEQ ID NO: 116603 - protein, 149 aa, Unknown
  Bacterial polypetide isolated from the Sargasso Sea
GLLEIPKADRANWPVEDINRELENNAQGILGYVVRWIDQGVGCSKVPDINNIGLMEDRATLRISSQHMANWLHHNVCSKQQVMSVMRKMAAIVDKQNIADKNYKPMAENFEKSVAFQAACDLVFKGKDQPSGYTEPLLHKRRIEKKSNL

SEQ ID NO: 116604 - protein, 284 aa, Unknown
  Bacterial polypetide isolated from the Sargasso Sea
MKGDLMSTFEKNGKKIVRKLNADREYISKDNKKIKLHGRALLLNRNVGHLMTNPAIKLNNGEEIPEGILDAFISTLCALHDFQNKNNSRTGSVYIVKPKMHGPEEVSFTNSLFEKVEETLNIKKYSIKVGIMDEERRTTVNLKECIRQVKNRIVFINTGFLDRTGDEMHTSFEAGPMIFKGDMKKSSWLNTYENWNVDIGLKCGFSGKAQIGKGMWAMPDQMLNMMEQKIAHPKSGANCAWVPSPTAATLHSLHYHKVNVFDEQKKIKTRSESLLKNILEIQKP

SEQ ID NO: 116605 - protein, 277 aa, Unknown
  Bacterial polypetide isolated from the Sargasso Sea
LDLPNSTIKIGIMDEERRTSINLKECIRAAQSRVAFINTGFLDRTGDEIHTAMQAGSFLKKADMKNAPWISSYEKRNVSIGLECGLKGKAQIGKGMWAMPDLMAEMMKQKIGHPKSGANCAWVPSPTAATLHALHYHEVNVKEVQESIISSGSTGTLDDLLTLPLLKGINLSEDEIFREVENNAQGILGYVVRWIDQGIGCSKVPDINNIGLMEDRATCRISSQALANWIEHGIVSKEQVLIVLKKMAKVVDRQNEDDTNYIPMSGNEDSIALKQLE

SEQ ID NO: 116606 - protein, 289 aa, Unknown
  Bacterial polypetide isolated from the Sargasso Sea
YRLNDETATLIIRPRGWHLNEKHITINDQPISASLFDFAVYLSNNHQALLKKGTGPYFYLPKLENHLEARLWNDVFVHAQNFLNIDRGTIKATVLIETITAAFEMDEIIFELKEHSAGLNCGRWDYIFSFIKKFRNHRNFLLPNRTEVTMERHFLKSYVDLLIRTCHKRNVHAMGGMAAQIPIRGDDEQNQIAMNKVASDKLREANAGHDGTWIAHPGLSQVAMSAFNQAMGSSPNQITNKRNDVSVNARDLIKVPDGNITEDGLRQNISIGIQYIEAWLSGNGCVPNS

SEQ ID NO: 116607 - protein, 288 aa, Unknown
  Bacterial polypetide isolated from the Sargasso Sea
DGRGLKLHGRSLLLVRNVGHLMTNPSIILDDGNEVPEGILDAFITTAAALHDLKKKNNSRTGSVYIVKPKMHGPDETAFTDLIFSKVEEVLGLKKYTCKIGIMDEERRTSSNLKECIRSLKNRVFFINTGFLDRTGDEMHTSMMAGPMIKKGEMKSSKWITAYENRNVDIGLKCGFSGKAQIGKGMWAMPDKMKDMMEQKTGHLKAGANCAWVPSPTAAALHALHYHEINIFDEQKKILNRKQAELDDLLTIPVADRTNWSVEEINNEISNSAQTLLGYVVRWVDQGI

SEQ ID NO: 116608 - protein, 306 aa, Unknown
  Bacterial polypetide isolated from the Sargasso Sea
MKPWVGKIDNAAISDIVIESALSTIVDNEDSVAAVDAEDKVKCYRNWLGLMKGDLSSTFEKNGKKIVRKLSQDREYVSKNGEKINLHGRALLLNRNVGHLMTNPGVLLKDGAEIPEGILDAFVSTLCALHDFKNKKNSRTGSVYIVKPKMHGPEEVAFTNTLFEKVEETLGIKKYTIKVGIMDEERRTTVNLKECIRQVKNRIVFINTGFLDRTGDEMHTSFEAGPMIFKGEMKKSTWLNTYENWNVDIGLKCGFSGKAQIGKGMWAMPDQMANMMEQKIGHPKSGANCAWVASPTAATLHSLHYH

SEQ ID NO: 116609 - protein, 282 aa, Unknown
  Bacterial polypetide isolated from the Sargasso Sea
DSVSGRYDPLRGEMVIKYARNFLDDNFPLKGLSWQKITGFAVKDGKLKALKGADNFNLVDEKKFIGHRGENDNPIAIILKNNNLHIEILKDSRAFAAQQDHAGISDIILESAVSTICDNEDSVAAVDSQDKVVCYRNWLGLMKGDLKSEFEKEGKLFERKLNPNRSYISKNGKGLKLHGRSLLLIRNVGHLMTNPSILLSDGSEVPEGIMDAFITTAAALHDLKNKNNSRTGSVYIVKPKMHGPDETAFTDLIFTKVEEVLGLKKNTCKIGIMDEEREHLLI

SEQ ID NO: 116610 - protein, 255 aa, Unknown
  Bacterial polypetide isolated from the Sargasso Sea
HTSMEAGPMIKKGDMKASKWINAYENNNVDIGLNCGFSGVAQIGKGMWAMPDQMEKMIKQKIGHLEAGANCAWVPSPTAATLHAIHYYEIDIFKKHDELKKRQQAKLSDILTIPIINKPNWSIEEINNEISNSAQTLLGYVVRWIDQGVGCSKVPDINNVGLMEDRATLRISSQHIANWLHHGICNKEQILEIMKKMAKIVDEQNKEDKNYQNMSPNYEKSIAFKTACELIFQGKKQPSGYTEPLLHFNRLIKKN

SEQ ID NO: 116611 - protein, 309 aa, Unknown
  Bacterial polypetide isolated from the Sargasso Sea
ISSEESVSERYDPERGMQVREYTKKFLDQYFQLKNSSWKKINRISIKDHTLELHTDKEITKLGDNDKYVGYRLDKEKISAIILKNNNLHVEIIINPGAFSAKGDPAGISDIIIESAISTICDHEDSVAAVDAEDKIIGYRNWLGLMKKNLTSEFEKNGKKLIRKLNPNRNYITKDGNKKSLHGRALLLNRNVGHLMTNSSVLLQDGSEIPEGILDAFVTCLCAIHDLKNKNNSRTGSIYIVKPKQHGPDETAFTDLLFTKVEEVLGLEKFTIKCGIMDEERRTTVNLKECIRTLENRVFFINTGFLDRT

SEQ ID NO: 116612 - protein, 272 aa, Unknown
  Bacterial polypetide isolated from the Sargasso Sea
TGNKENPNSILLKNNNLHIDIIIDPNSSAGKSDKANISNVFIESAISTIIDNEDSVAAVDSKDKVKCYRNWLGLMKGDLKAEVEKNGKKFIRKLNADRVYNSIDGSKIVLHGRALLLNRNVGHLMTNPSITLNDGTEIPEGIMDAFISTLCAIHDFKNKKNSRKSSMYIVKPKMHGPDEVGFTNDIFETVEKVLGLKKYSIKVGIMDEERRTTVNLKECIRKVKNRVVFINTGFLDRTGDEMHTSFEAGPMIFKGDMKKSTWLNTYENWNVD

SEQ ID NO: 116613 - protein, 324 aa, Unknown
  Bacterial polypetide isolated from the Sargasso Sea
SIGYIGEEKSDFKISTSNVDQEISSIPGPQLVVPVDNARYALNAANARWGSFYDALYGTDVIPGKTNKGYDDERAKKVINYSREFLDNIFPITDASWKDITKIKLQEKNLALLINEKKFYLKNKKQFVGFNGEPENLNSILLKNNNLHIDILIDPNSTVGKNDKAGISDIIIESAISTIVDNEDSVAAVDSKDKIKCYRNWLGLMKGDLKTEVQKNNKKFIRKLNPDRVYNSPNGSKITLHGRALLLNRNVGHLMTNPAIILKDGSEIPEGIMDAFFSTLCALHDFKNKKNSRTNSVYIVKPKMHGTEEVDFTNEIFENVEKVL

SEQ ID NO: 116614 - protein, 185 aa, Unknown
  Bacterial polypetide isolated from the Sargasso Sea
WVPSPTAAILHAIHYHKVNVFEVQKQILSRKKAKLENLLEIPVADRPNWSTEDINKELENNAQGILGYVVRWIDQGIGCSKVPDINNTGLMEDRATLRISSQHMANWLHQKICTKDQVMKIMKKMAKIVDQQNKNDKKYIPMSKDFDNSIAFKTACDLVFNGKDQPSGYTEPLLHKMRIEKKSIR

SEQ ID NO: 116615 - protein, 285 aa, Unknown
  Bacterial polypetide isolated from the Sargasso Sea
LHGRSLLLVRNVGHLMTNSSILLSDGSEIPEGIMDAFMTTAAALHDLKIKNNSRAGSVYIVKPKMHGPDETAFTDLIFSKVEQVLNLPKYTCKIGIMDEERRTSANLKECIRSLKNRVFFINTGFLDRTGDEMHTSMQAGPMIKKGDMKSSKWIIAYENNNVDIGLSCGFSGKAQIGKGMWAMPDKMKDMMQQKTGHLKAGANCAWVPSPTAAALHALHYHEINIFNEQKKLIDREPAKLDDLLTIPIADRPNWSVEDINKEISNSAQTLLGYVVRWVDQRCGLF

SEQ ID NO: 116616 - protein, 297 aa, Unknown
  Bacterial polypetide isolated from the Sargasso Sea
EKFIKKFLKKIGYLKNSGSNFKIMTKNVDKEISSICGPQLVCPISNARFLLNAANARWVSLYDSLYGTDIIPETNGAVKGKTYNPIRGKKVIDHTRDLLDKYIPLENKSWKNLDETPKVINNKLNLRLKNPKQFVGYKKKLNQLSSLLFVNNNLHIDILFDQVGDVENKNPDGNQDKMKIYDIFLESAISTICDHEDSVAAVDAEDKVLGYRNWLGLMKGNLKVEFSKNGKKIIRKLSADRNYISSKGKKFKLHGRSLLLNRNVGHLMTNPSILLKDGSECPEGILDAFVTSLACLH

SEQ ID NO: 116617 - protein, 154 aa, Unknown
  Bacterial polypetide isolated from the Sargasso Sea
REPSKLSDLLTIPIANRPNWSIDEINTEISNSAQTILGYVVRWIDQGIGCSKVPDINNIGLMEDRATLRISSQHIANWLHHGLCSNRQVLEILKKMAKVVDKQNKDDTNYESMSPEYDKSIAFKAACELIFHGKSQPSGYTEPLLHLNRLIKKS

SEQ ID NO: 116618 - protein, 322 aa, Unknown
  Bacterial polypetide isolated from the Sargasso Sea
MHGPDEVALAVEMFDRIEDYLGLGRNTIKIGIMDEERRTSMNLLSCIHKAKERVVFINTGFLDRTGDEIHTSMEAGPFVPKTEMKAQEWLPAYEDINVDEGLAAGLLGHGQIGKGMWARPDDMTDMLREKVGHPKSGASCAWVPSPTAATLHALHYFEVDVVGVQADLEGRDATDRTVMLTIPLLESGRELSPDEVSAELRNNVQGILGYVSRWVGQGVGCSKVPDINDIQLMEDRATLRISSQHIANWLHHGVISDEEIISTMEEMAAFVDEQNEDDPEYHPMCGDLDSSIPYQAALALVFEGRDQANGYTEFLLTERRQR

SEQ ID NO: 116619 - protein, 251 aa, Unknown
  Bacterial polypetide isolated from the Sargasso Sea
KGDMKSSRWIKAYENNNVDVGLDCGFSGKAQIGKGMWAMPDLLKEMMEQKISHPMSGANCAWVPSPTAAAIHALHYHEVNVFSIHEKLKNRKPAKLDELLTIPVAKNKSWSKDEIEKELKNNAQGILGYVVRWIDQSVGCSKVPDINAVGLMEDRATCRISSQHIANWLHHGVCSKKQVLEIMKKMAKVVDYQNLKDRGMKDQDPYQAMAGNFEKSIAFKAACDLIFHGKYQPSGYTEPLLHFNRLIKKSI

SEQ ID NO: 116620 - protein, 281 aa, Unknown
  Bacterial polypetide isolated from the Sargasso Sea
MDEERRTTINLKECIRTLENRVFFINTGFLDRTGDEMHTSMEAGPMIKKGEMKTSDWIIAYENNNVDIGLSCGFSGTAQIGKGMWAMPDKMADMLEQKITHLEAGANCAWVPSPTAAALHAIHYHKINIFDKHLDLKKREKAKLENLLKLPIIRKPNWTPEEVNKEISNSAQTILGYVVRWIDQGIGCSKVPDINNIGLMEDRATLRISSQQITNWLYHGICSRKQVLEIMKKMAKIVDEQNKNDKSYQKMSPNYDRSIAFKTACELVFQGKDQPSGYTEP

SEQ ID NO: 116621 - protein, 308 aa, Unknown
  Bacterial polypetide isolated from the Sargasso Sea
MSKSYETVNNLKVSKELLAFVNNELLNDTNISAEKFWLGFDQAVHSLAPRNKELLKIREDLQKKIDGWHLKNKGNEFEIKEYKKFLKEIDYLRDEGPDFKIETKNVDDEITKIAGPQLVVPIMNARYTLNAANARWVSLYDSLYGTNIIESDEGGSERYDPLRGQEVIKYVREFFDTCIPIEGTSWKNIAGMRIVDKDLIILKDDYHYKLKDKDKFVGHRGDANKPSAIILKNNNLHFEIIINPKAFSAAHDIAGISDVIAESAVSTICDNEDSVAAVDAEDKVACYRNWLGLMKGDLKIQLKKMVKI

SEQ ID NO: 116622 - protein, 260 aa, Unknown
  Bacterial polypetide isolated from the Sargasso Sea
DFKKKGNSRTNSIYIVKPKMHGPEECAFTNLIFQKVEKVLKLKKNQILCGIMDEERRTSVNLKECIRILKNRVFFINTGFLDRTGDEIHTSIEMGPMILKGDMKSSKWISAYENNNVDIGISCGFSGKAQIGKGMWAMPDLMNNMMKEKINHPLSGANCAWVPSPTAAGLHVLHYHEINVFEKQKELSKRNSAKLLDLLNIPIENKPNWSTEKINNEIKNNAQGILGYVVRWIDQSVGCSKVPDINGIGLMEDRATCRIS

SEQ ID NO: 116623 - protein, 118 aa, Unknown
  Bacterial polypetide isolated from the Sargasso Sea
RWIDQGVGCSKVPDIYDIGLMEDRATLRISSQHIANWLYHGVCNEALVMDVMKEMATVVDRQNSGDPTYQKMAGRFDESVAFKAACDLVFRGREQPSGYTEPILHARRLEKKAEDQAA

SEQ ID NO: 116624 - protein, 193 aa, Unknown
  Bacterial polypetide isolated from the Sargasso Sea
IKKGDMKSSKWIMAYENNNVDIGLRCGFSGKAQIGKGMWAMPDKMRDMMEQKIGHLQAAANCAWVPSPTAAALHALHYHELNIFNKQKQILKREKAKLDDLLTIPKADRPNWSVDEINSEISNSAQTILGYVVRWIDQGIGCSKVPDINNVGLMEDRATLRISSQHIANWVHHGVTTKIQVIDIMKEMAKIVD

SEQ ID NO: 116625 - protein, 286 aa, Unknown
  Bacterial polypetide isolated from the Sargasso Sea
GHKCFFEDKKEIYLKNKDQFIGYNGEKEKLTSVLLKNNNLHIDIIIDPNHYIGKLDKASISDFIVESALSTIIDNEDSVAAVDAEDKIKCYRNWLGLMKGDLTANMEKNGKKFVRKLNPDRTYTSKEGKKFTLHGRALLLNRNVGHLMTNPAILLKDGTEIPEGIMDAFMATLCALHDFKIKNNSRTGSVYIVKPKMHGPEEVAFTNTLFGKVEEALGIKKYSIKVGIMDEERRTTVNLKECIRQVKNRIVFINTGFLDRTGDEMHTSFEAGPMIFKGDMKKSTWL

SEQ ID NO: 116626 - protein, 206 aa, Unknown
  Bacterial polypetide isolated from the Sargasso Sea
GPGEVKFTCDLFEAVEKLLGLTRNTLKVGIMDEERRTTLNLKACIKAASERVVFINTGFLDRTGDEIHTSMEAGPMIPKTKMKASNWISAYEDNNVDVGLACGLQGKAQIGKGMWAMPDLMEAMVEQKINHPESGANTAWVPSPTAAVLHAMHYHRIKVFEQQDKIKTRTVASIDEILKIPLLEDRASLTSEEISKELDNNAQGIL

SEQ ID NO: 116627 - protein, 262 aa, Unknown
  Bacterial polypetide isolated from the Sargasso Sea
MTKNIDDEISSICGPQLVCPISNARFLLNAANARWVSLYDSLYGTDIIPENHGALKGNTYNPIRGKKVIEYTRNLLDKYIPIKDKSWKNLKTIPEVKDNKLNLNLKNPNQFVGYKKKFNKISSLLFVNNNLHIDILFDQTGNMENNNPDGNQDNIKIHDIFLESAISTICDHEDSVAAVDAEDKVLGYRNWLGLMKGNLKVEFLKKGKKIIRKLNADRSYISKKGKKFKLHGRSLLLNRNVGHLMTNPAILLNDGSECPEGF

SEQ ID NO: 116628 - protein, 292 aa, Unknown
  Bacterial polypetide isolated from the Sargasso Sea
SERYDPERGLEVIKYSKKFLDDFFTLKNNLSWKNIQSIIIEKENLILFSYSSKSTLKNQNKFIGYRGEKNNPTAIILKNNNLHVEIIINPKAFSAKNDPAGISDIILESALTTICDNEDSVAAVDAKDKVDCYRNWLGLMKKSLTSKFNKNGKDYFRKLNPDRKYFSPKGKKLKLHGRSLLLNRNVGHLMTNPSILLRDGSEVPEGIMDAFITSAACIHDLKLKNNSRKGSIYIVKPKMHGPDEASFADAIFTKVEKILNLKKNTIKCGIMDEERRTSVNLKETIRALKNRV

SEQ ID NO: 116629 - protein, 255 aa, Unknown
  Bacterial polypetide isolated from the Sargasso Sea
QILKNFGKKYKRVLNSDRRYTSHNGKTFKLHGRALLLNRNVGHLMTNPSILLSDKSEVPEGIMDAFIISAACLHDFIKKGNSRKNSIYIVKPKMHGPDEVAFADEIFTHVENVLKMKKNTIKIGIMDEERRTSANLKECIRNVKRRVVFINTGFLDRTGDEIHTSMEAGPVIKKGDIKNSDWIKAYENNNVVVGLECGFSGKAQIGKGMWAAPDRMADMLNEKIGHPSSGANCAWTPSPTAATLHATHYHKVNVF

SEQ ID NO: 116630 - protein, 277 aa, Unknown
  Bacterial polypetide isolated from the Sargasso Sea
MTNPAITLNDGSEVPEGIMDAFITSAACIHDLKRKGNSREGSIYIVKPKMHGPEETEFTDLIFTKVEEVLKLEKNTIKCGIMDEERRTSANLKECIRTLKDRVFFINTGFLDRTGDEMHTSMEAGPMIKKGDMKESKWIKTYEDNNVDIGLKCGFSGVAQIGKGMWAMPDKMNEMMEQKIGHVNAGANCAWVPSPTAAALHVMHYHEVNVFEKQKAILKREPSKLSDLLTIPIADRPNWSVNEINTEISNSAQTILGYVVRWIDQGIGCSKVPDIND

SEQ ID NO: 116631 - protein, 313 aa, Unknown
  Bacterial polypetide isolated from the Sargasso Sea
EIFNEVETVLKLKPNTINVGIMDEERRTSLNLKECIRKVKKRIVFINTGFLDRTGDEIHTSMCAGPMIKKGDMKSSKWIAAYENNNVDIGLKCGFSGIAQIGKGMWPAPDKMADMMDQKINHPKAGANCAWTPSPTAATLHSLHYHDVDVFKVQKELKNRNNDNLENLLKIPIADRPNWSVEEIVKELENNSQGILGYVVRWIDQGVGCSKVPDINNVGLMEDRATLRISSQHIANWLKYNICTKIQVMDIMKKMARIVDDQNKNDKNYIRMSENFENSLAFKTACDLVFKGTDQPSGYTEPLLHQNRIDKKQ

SEQ ID NO: 116632 - protein, 232 aa, Unknown
  Bacterial polypetide isolated from the Sargasso Sea
DEIHTSMEAAPVVRKEAVKTQKWIAAYENRNVAIGLACGLQGKAQIGKGMWPKPDSMKDMLATKTAHPNAGATCAWVPSPTGAVLHALHYHQINVKARQDELAAEDMLTLDDLLTPPFAPETNWTAEELNNELENNCQGILGYVVRWVDLGVGCSKVPDINNVGLMEDRATLRISSQHVANWLRHGIVTREQVEEVLKRMAVIVDQQNANDPLYTPMAPNFDGIAFPSSIRI

SEQ ID NO: 116633 - protein, 265 aa, Unknown
  Bacterial polypetide isolated from the Sargasso Sea
IQDCEDSVATVDAEDKVLAYKNWLGLMKGDLEDTFEKNGKKIVRKLNKMKVFKTKNGELHLSGLSLMLIRNVGHLMTNPAIIYSENKEVPEGIMDTVITTMISMFDLKNGKNNSKTGSVYIVKPKMHGPEEVAFTIELFAAVENMLGLPNNTIKIGIMDEERRTTINLKECIRHAKERLVFINTGFLDRTGDEIHTAMEGGPIIPKAEIKGAEWINAYEKNNVLVGLNCGLSGKAQIGKGMWAMPDLMKDMYEQKIQHPNSGANT

SEQ ID NO: 116634 - protein, 287 aa, Unknown
  Bacterial polypetide isolated from the Sargasso Sea
MHGPEEVSFADKVFSKVEEVLSLSPNTIKMGIMDEERRTTVNLKECIRNAKKRIVFINTGFLDRTGDEMHTSFEAGPMIFKGEMKKSSWLTAYEDWNVDIGLECGFSGKAQIGKGMWAMPDRMQDMLKQKIAHPNAGANCAWVPSPTAAILHATHYHNVNVFDKHKELSLRERANLDNILTIPTADRTNWSANDIEKEIENNCQGILGYVVRWIDQGVGCSKVPDINNIGLMEDRATLRISSQHIANWLYHQICSREQVMKSMKKMAKVVDDQNSKDKNYVAMNNNF

SEQ ID NO: 116635 - protein, 312 aa, Unknown
  Bacterial polypetide isolated from the Sargasso Sea
GFSEVEKVLGLKKYTIKCGIMDEERRTSINLKECIRNLKNRVFFINTGFLDRTGDEIHTSMEAGIMIKKADMKTSKWINAYENNNVEIGLRCGFSGIAQIGKGMWAMPDKMSDMMIQKINHLKAGANCAWVPSPTAASLHVLHYHKINIFNKHKEIKKRKKTKLRDILTLPIINKPNWPLEDINKEISNSAQTILGYVVRWIDQGIGCSKVPDINNIGLMEDRATLRISSQHITNWLHHGICSRKQVLEIMKKMAKIVDKQNKNDKNYKDMSPNFDQSIAFKTSCELIFQGKNQPSGYTEPLLHLNRLIKKN

SEQ ID NO: 116636 - protein, 191 aa, Unknown
  Bacterial polypetide isolated from the Sargasso Sea
MGSSPTAATLHALHYHQVDVFAKQKELKNRTAAKISDILTIPTADRPNWSLEEINRELENNAQGILGYVVRWIDQGVGCSKVPDINNVGLMEDRATLRISSQHIANWLHHGICSKEQVLESMKKMAEIVDKQNIKDPSLKGYTSYKRMSDDYDRSIAFKAACDLVFKGREQPSGYTEPILHHKRLEKKANQ

SEQ ID NO: 116637 - protein, 254 aa, Unknown
  Bacterial polypetide isolated from the Sargasso Sea
FLAGPMIKKGDMKKSAWISAYENWNVDIGLSCGFSGVAQIGKGMWAIPDKMADMMEQKINHPKAGANCAWVPSPTAATLHAMHYHKINIFEEQKNISSRTKAKLSDILKIPIADRPNWSVEDINKELENNAQGILGYVVRWIDQGVGCSKVPDINNVGLMEDRATLRISSQHIANWLHHKICNTDQVMKVMKKMALVVDKQNSNDPNYEPMSKNFEKSIAFKAACDLVFKGKDQPSGYTEPILHLRRLQKKTNL

SEQ ID NO: 116638 - protein, 106 aa, Unknown
  Bacterial polypetide isolated from the Sargasso Sea
EIIINPRAFSAARDAAGISDIIIESAVSTICDHEDSVAAVDAEDKVTCYRNWLGLMKGNLKSIFEKNGKELERKLNPDRSYTSLNGEKLKLHGRSLLLVRNVGHLM

SEQ ID NO: 116639 - protein, 289 aa, Unknown
  Bacterial polypetide isolated from the Sargasso Sea
KVHGYRNWLGLMKSDLIYEGKKNTGNKPFTFTRKLNPDREYISPDGNKIKLHGRALMLNRNVGHLMTSSSILLSDSSEIPEGIMDAFITTTAAIHDFKNKKNSRSQSFYIVKPKMHGPDEVAFTNLIFEKVEEVLNLKKYTIKVGIMDEERRTTLNLKECIRNVKNRVVFINTGFLDRTGDEIHTSMEAGPMIKKGDMKSSKWISAYENNNVNIGLACGFSGIAQIGKGMWAAPNKMRDMMSQKISHPKSGANCAWVPSPTAATLHALHYHQVDVFSKQKELKNRAPAK

SEQ ID NO: 116640 - protein, 300 aa, Unknown
  Bacterial polypetide isolated from the Sargasso Sea
NLKKFQILCGIMDEERRTTINLKECIRALKNRVFFINTGFLDRTGDEIHTSMEVGPMIRKGEMKLSKWIQAYENNNVDVGLACGFSGKCQIGKGMYPAPDLMGEMMKQKIVHPLSGANCAWVPSPTAAALHVLHYHEVDVFSKQKELLKRKSARLSDLLTIPVAKKPNWSMEDITKELKNNAQGILGYVVRWVDQSVGCSKVPDINGIGLMEDRATCRISSQHIANWLHHGICSKKHVLEIMKKMAKVVDNQNLKDPSMKGYSPYKKMSDNFDSSTAFKAACELVFHGKTQPSGYTEPIL

SEQ ID NO: 116641 - protein, 314 aa, Unknown
  Bacterial polypetide isolated from the Sargasso Sea
MLLGFNIINGELVIFVDKKSTALENHSQFAGYREAENRLDAILLVKNNLHIEILIKPDGKIGQTDKAGIDDIIVESAISTIMDCEDSVAAVDSEDKVLAYRNWLGLMRGDLSVEMEKGGRTFIRKLNQDKIFTAPNGSMLTLHGRSLMLVRNVGHLMTNPAILLGDKSEIPEGILDSFMTVLGAMHDFKMKGNSRTKSIYIVKPKMHGPEEVAFTCEIFDMVESILKLPANTVKIGIMDEERRTTVNLKECIRAAKSRVAFINTGFLDRTGDEIHTSMNAGAMIRKTDMKQAAWITAYENWNVDIGLSCGFSGK

SEQ ID NO: 116642 - protein, 247 aa, Unknown
  Bacterial polypetide isolated from the Sargasso Sea
LHIEIIINPSAFSAKGDPAGISDIIVEAAISTICDHEDSVAAVDSDDKIIGYRNWLGLMKKDLLAEFEKDGKKLIRKLNPNRSYVSKNGTKESLHGRALLLNRNVGHLMTNSAVLLQDGSEIPEGILDGFITSLCALHDLKNKNNSRTGSIYIVKPKQHGPDETAFTNLLFTKIEEILGIKKYTIKCGIMDEERRTTVNLKECIRTLENRVFFINTGFLDRTGDEMHTSMEAGPMIKKGDMKSSAWI

SEQ ID NO: 116643 - protein, 261 aa, Unknown
  Bacterial polypetide isolated from the Sargasso Sea
DPAGIKDVFLESAVTTIQDLEDSVAAVNGEDKTDVYKNWLGLMKGTLAETFEKGGSTLTRSLNEDLSFLSPDGKPITIAARSLMLVRNVGHLMTNPAVLLDGKEIPEGIIDAMFTIAIGKHDLDQTGSVQNSKTGSIYIVKPKMHGPEEVQFTCDLFSDVESALGLEKNTVKIGIMDEERRTTVNLKECIRVAKERVIFINTGFLDRTGDEIHTSMEAGPMIRKAEMKQQPWILSYEDWNVDNSLSSGFKGKAQIGKGMWP

SEQ ID NO: 116644 - protein, 304 aa, Unknown
  Bacterial polypetide isolated from the Sargasso Sea
LNPKTIALIESLHDNFENQRRKLLEDREILQKELDDGKFPNFLTQTKDIRESNYVVSPIPEDLQDRRVEITGPPDRKMVINALNSPVKTFMCDFEDSCSPTWKNIIQGHVNVRDAVEESIEFTRESDSKVYRLNDEIATLIIRPRGWHLNEKHLTINDQPISASLFDFAVYLSNNYEALSKKGTGPYFYLPKLENHLEARLWNDVFVHAQNFLNIDRGTIKATVLIETITAAFEMDEIIFELKEHSAGLNCGRWDYIFSFIKKFRNHQNFLLPNRTEVTMERHFLKSYVDLLIRTCHKRNVHAM

SEQ ID NO: 116645 - protein, 286 aa, Unknown
  Bacterial polypetide isolated from the Sargasso Sea
ITRRLNQDIKYTNNEGKESILKGRSLMLNRNVGHLMTNPSVLDSSGNEVGEGLIDAMCTTLIAMHDLSKSEGMRNSIKGSVYIVKPKMHGPEEVAFTEEIFSHVENILGLPLNTVKIGIMDEERRTSANLKECIRSAKSRVAFINTGFLDRTGDEIHTSMEAGPFMRKGDMKSTDWIKSYEERNVDIGLDCGLQGKAQIGKGMWAMPDLMQDMLEQKIAHPKAGANCAWVPSPTAATLHAMHYHIVNVFDVQNDIIKVGSRGTLNDLLKIPVADGHNWSNEDIKQE

SEQ ID NO: 116646 - protein, 278 aa, Unknown
  Bacterial polypetide isolated from the Sargasso Sea
DGADKVNCYRNWLGLMKGDLKTEVVKNGKKFIRKLNPDRNYTSPDGSKIVLHGRSLLLNRNVGHLMNNPAIILNDGSEIPEGIMDAFVSTLCAIHDFKNKKNSRTNSVYIVKPKMHGPDEVGFTNDIFKKVEEVLGLKEFTIKVGIMDEERRTTVNLKECIRKVKERVVFINTGFLDRTGDEMHTSFEAGPMIFKGDMKKSNWLNTYENWNVDIGLSCGFSGKAQIGKGMWAMPDKMSEMIEQKIGHPKSGANCAWVPSPTAATLHATHYHKLDVFKK

SEQ ID NO: 116647 - protein, 293 aa, Unknown
  Bacterial polypetide isolated from the Sargasso Sea
SGEEIPEGFLDAMITSLAALHDIQGKTKYSNSRTKSMYIVKPKMHGPEEVAFTVKLFERIEEALGLQKNTLKIGIMDEERRTTVNLKQCIYEARERVIFINTGFLDRTGDEIHTSMEAGPVLPKGEIRNQPWIKAYEDQNVDIGIESGLVGTAQIGKGMWAMPDEMKAMMSAKISHPESGANTAWVPSPTAAALHAIHYHMVNVNQIQKDISTRDSINLNDILTPPLMDKKLSEQEILQELENNAQGILGYVSRWVGQGIGCSKIPDINNIGLMEDRATLRISSQHHFELVIS

SEQ ID NO: 116648 - protein, 298 aa, Unknown
  Bacterial polypetide isolated from the Sargasso Sea
DGTSWKNIAGLKVVNKDLIISKDDYEYKLKDKDKFVGHRGDANQPSAIILKNNNLHFEIIINPKAFSAAHDIAGISDVIAESAVSTICDNEDSVAAVDAEDKIVCYKNWLGLMKGDLKIQFEKNGKKLERKLNPDRSYISRDGKGLKLHGRSLLLIRNVGHLMTNSAIILKDGSEIPEGIMDAFFTTAAAIQDLKKKKNSRKGSIYIVKPKMHGPEETAFTDTIFSKVEELFGLEKYTCKIGIMDEERRTSSNLKECIRTLKNRVFFINTGFLDRTGDEMHTSMEAGPMIKKGDMKSS

SEQ ID NO: 116649 - protein, 321 aa, Unknown
  Bacterial polypetide isolated from the Sargasso Sea
PQLVVPIMNARYTLNAANARWVSLYDSLYGTNIIESEEGGSERYDPNRGQEVIKYVREFFDKYIPINGTSWKNISALKVKNKSLIILKEDKEYKLKDENKFVGHRGDINKPTAIIIKNNNLHFEIIINPKAFSAAHDIAGISDVIAESAVSTICDNEDSVAAVDAEDKVACYRNWLGLMRGDLKVQFEKNGKKLERKLNPDRSYISKEGKGLKLHGRSLLLIRNVGHLMTNSSIILNDGSEVPEGIMDAFITTTAALHDFKKKKNSRTGSIYIVKPKMHGPDETAFTDLIFSKVEELLGLQKYTCKIGIMDEERRTSSNLK

SEQ ID NO: 116650 - protein, 295 aa, Unknown
  Bacterial polypetide isolated from the Sargasso Sea
KNGKKFIRKLNPDRTFTKFDGTNITLRGRALMLNRNVGHLMTNSSITLSDGSEIPEGIMDAFISTLCALHDFKSKQNSIKGSMYIVKPKMHGPEEVEFTNNLFEEVETALGLKKYTIKVGIMDEERRTTVNLKECIRKVQDRIVFINTGFLDRTGDEMHTSFEAGPMIFKGEMKKSNWLKAYEDLNVDIGLACGFSGIAQIGKGMWAMPDKMADMMTQKRSHPESGANCAWVPSPTAATLHSTHYHHVNVFEKHKSLSGQKRSDLDSLLDIPVADRPNWQIEKINSELEIMLKAF

SEQ ID NO: 116651 - protein, 269 aa, Unknown
  Bacterial polypetide isolated from the Sargasso Sea
MGFLDRTGDEIHTSMQAGSFLKKTDMKNANWISAYENRNVYIGLQCGLKGRAQIGKGMWAMPDLMNEMIKQKIAHPKSGANCAWVPSPTAATLHALHYHQVNVREIQEVINDSGLTGSIDDLLTLPLLKGKNLSDEEIAREVENNTQGILGYVVRWIDQGIGCSKVPDINNVGLMEDRATCRISSQALVNWIEHGIISKDQVLKSLVKMAKVVDKQNAYDKNYIPMTNNNKSIAFEAAKELIFDGVNQPSGYTEPILHRKRLEFKLKNN

SEQ ID NO: 116652 - protein, 275 aa, Unknown
  Bacterial polypetide isolated from the Sargasso Sea
TISTKNVDKEISSICAPQLVCPISNARFILNAANARWVSLYDSLYGSNIIESEESGSERYDPERGLEVIKYTKEFLDKYFSIEPDSWKNVNKIEINGKDLNLYTYKNKSKLKNKEKFVGFRGNPEKPGAIILKNNNLHIEIIINPNAFSAKSDSAGISDIIVESAVTTICDHEDSVAAVDAEDKVLGYRNWLGLMKGNLQTSFVKSGKIYVRKLNPDRKYISPNREEFRLNGRSLLLCRNVGHLMTNSAILLKDGSEIPEGIMDSFITVACALHD

SEQ ID NO: 116653 - protein, 286 aa, Unknown
  Bacterial polypetide isolated from the Sargasso Sea
PETEGAERGISYNPLRGEKVFKFVHGILDASAPLAEGSFSRITGFSVDQGRLRMTLEGGHDTGLQNPEQFAGFNGSPENPNSILLKKNGLHLDIQLDRNHSVGKDHPAGICDILLESAVTTIQDCEDSVAAVDASDKVHVYRNWLGLMKGDLSAKLDKGGKMITRTLNPDRKYKTPEGSEMVLPGRSLMLVRNVGHLMTTDAVLDEQGNEIFEGMLDGMMTALISLYEIRGLGTFQNSRSGSMYIVKPKMHGPEEVALTVELFGRIEKTLGMEDGTLKIGIRMKND

SEQ ID NO: 116654 - protein, 261 aa, Unknown
  Bacterial polypetide isolated from the Sargasso Sea
RTGDEMHTSMEAGPMIKKGDMKESKWIKTYENNNVDIGLKCGFSGIAQIGKGMWAMPDKMNEMMEQKIGHVNAGANCAWVPSPTAAALHVMHYHEVNVFEKQKVILKREPSKLSDLLTIPIADRPNWSVDEINTEISNSAQTILGYVVRWINQGIGCSKVPDINDIGLMEDRATLRISSQHIANWLHHGLCSNRQVLEILKKMAKVVDKQNKDDSSYESMSPEYDKSIAFKAACELIFHGKSQPSGYTEPLLHLNRLIKKS

SEQ ID NO: 116655 - protein, 274 aa, Unknown
  Bacterial polypetide isolated from the Sargasso Sea
ILYSNEDKEIPEGIMDAMFTICIAMHDLKQKGKYKNSREGSVYIVKPKMHGPEEVRFTCDLFSRIEEKLNLKQNTAKIGIMDEERRTTINLKECIREAKERIIFINTGFLDRTRDEIHTSMEAGPMVPKGDMKSQPWINSYEDSNVYIGLETGFNGKAQIGKGMWAMPDEMLEMIKNKQVHPESGANCAWVPSPTAATLHAIHYHEISVNEEQKKLETRKRASLDDILTIPLLGDVNSLTEDQIKSEIENNAQGILGYVVRWIDQGVGCSRYQT

SEQ ID NO: 116656 - protein, 275 aa, Unknown
  Bacterial polypetide isolated from the Sargasso Sea
NNFEALSKKGTGPYFYLPKLENHLEARLWNDVFLHAQDFLNINRGTIKATVLIETITAAFEMDEIIFELKDHSAGLNCGRWDYIFSFIKKFRNHEEFLLPNRTEVTMERHFLKSYVDLLIQTCHKRNVHAMGGMAAQIPIRGNEEQNQIAMDKVASDKSREANAGHDGTWIAHPGLSDVAMNAFNQAMGTSANQISNKRNDVSVCAQDLIKVPNGSITEEGLRQNISIGIQYIEAWLSRNGCVPIHNLMEDAATAEISRSQIWQWIHHAAKTTDT

SEQ ID NO: 116657 - protein, 301 aa, Unknown
  Bacterial polypetide isolated from the Sargasso Sea
MHGRALMLNRNVGHLMTNSSVLLQDKSEIPEGIMDAFITVAASIHDFKRKGNSRTESVYIVKPKMHGPDEVAFTNKIFEKVEDVFSLKRNTIKIGIMDEERRTTVNLKECIRVAKNRVVFINTGFLDRTGDEIHTSFLAGPMIKKGDMKKSAWISAYENWNVDIGLSCGFSGVAQIGKGMWAMPDKMADMMVQKINHPKAGANCAWVPSPTAATLHAMHYHKINIFEEQKKISSRAKAKLSDILKIPIADRPNWSVEDINRELENNAQSILGYVVRWIDQGVGCSKVPDINNIGLMEDRAT

SEQ ID NO: 116658 - protein, 241 aa, Unknown
  Bacterial polypetide isolated from the Sargasso Sea
MKESKWIKTYEDNNVDIGLKCGFSGVAQIGKGMWAMPDKMNEMMEQKIGHVNAGANCAWVPSPTAAALHVMHYHEVNVFEKQKAILKREPSKLSDLLTIPIADRPNWSLDEINAEISNSAQTILGYVVRWIDQGIGCSKVPDINNIGLMEDRATLRISSQHIANWLHHGLCSNRQVLEILKKMAKVVDKQNKDDSNYESMSPEYDKSIAFKAACELIFHGKSQPSGYTEPLLHLNRLIKKS

SEQ ID NO: 116659 - protein, 225 aa, Unknown
  Bacterial polypetide isolated from the Sargasso Sea
SVYIVKPKMHGPEEVSFTNSLFDRVEQVLGIKKFSIKVGIMDEERRTTVNLKECIRQVKNRIVFINTGFLDRTGDEMHTSFEAGPMIFKGEMKKSTWLNAYENWNVDVGLKCGFSGKAQIGKGMWAMPDQMNSMMEQKINHPRSGANCAWVPSPTAATLHSIHYHQINVFDEQSKIVSRSSAKVNDILDIPIADRPNWPIEDINRELENNAQGILGYVVRWVDQG

SEQ ID NO: 116660 - protein, 296 aa, Unknown
  Bacterial polypetide isolated from the Sargasso Sea
IGSKIYPKEIILSHNNFCIRLKLDKTHPVGKSDSFHLCDVIVESAPSVIMDCEDSIVSVDTNDKISTFRNWLGLLDGSIKVEIYKDKVSSVRKLSKNISYKKPDGKTHFMKGLSLLLIRNVGHLMSSSSIIDENKNGIGEGIIDTLLTALCFLKTINISNNSEYKSLYIVKPKMHGPEEVKFSIDTFTKIEELLTIPKNTIKIGIMDEERRTTLNLKECIRAAKDRVFFINTGFLDRTGDEIHTSMEAGIMIKKTEMKNVGWIKAYENWNVEIGLDCGFSGLAQIGKGMWAMPDMM

SEQ ID NO: 116661 - protein, 298 aa, Unknown
  Bacterial polypetide isolated from the Sargasso Sea
MGEYKKFFKQIGYLKDEGPNFKIETKNVDDEIAKIAGPQLVVPIMNARYTLNAANARWVSLYDSLYGTDIIESEEGGSERYDPNRGQEVIKYVREFFDKYIPINGTSWKNIASLKIKKNKLIITKDNNEYKLVDENKFMGHRGDVNKPEAIILKNNNLHFEIIINPRAFSAAHDIAGISDVIAESAISTICDNEDSVAAVDAEDKVVCYRNWLGLMKGDLKIQFEKNGKILERKLNPDRSFISKDGKGLKLHGRSLLLIRNVGHLMTNPSILLNDGSEVPEGIMDAFITTAAALHDLK

SEQ ID NO: 116662 - protein, 306 aa, Unknown
  Bacterial polypetide isolated from the Sargasso Sea
SEVLLVNNNLHLEIQIDPNHPVGKTDKANIKDIVLESAVSTIQDCEDSVAAVDAEDKVIVYRNWLGLMKGDLSETFEKNGKQLTRVLNEDREYLDTNGNSFSLPGRSLLLVRNVGHLMQNPSVILDNGEEIFEGILDAMFTICIALFDLNQLNTLSNSRNKSMYIVKPKMHGSDEVAFTCDLFDAVERLFNLEKNTVKVGIMDEERRTTINLKACIEKAKERIIFINTGFLDRTGDEIHTSMEAGAMVPKSDMKAQSWINAYEDWNVDIGISCGLSGKAQIGKGMWAMPDEMKDMVETKIAHPLSG

SEQ ID NO: 116663 - protein, 288 aa, Unknown
  Bacterial polypetide isolated from the Sargasso Sea
ENEDLIILKDKNEYKLKDKNKFIGHRGDVNKPSAVIIKNNNLHFEIIINPKAFSAAHDIAGISDVIIESAISTICDNEDSVAAVDSEDKIICYRNWLGLMKGDLKIQFEKNGKTLERKLNPNRSYISKKGKGLKLHGRSLLLIRNVGHLMTNSSILLKDNSEVPEGIMDAFITTAAALHDLKRKGNSKAGSIYIVKPKMHGPDETAFTDLIFTEVEKVLNIKNNTCKIGIMDEERRTSVNLKECIRSLKNRVFFINTGFLDRTGDEMHTSMEAGPMIKKGDMKSSKWD

SEQ ID NO: 116664 - protein, 255 aa, Unknown
  Bacterial polypetide isolated from the Sargasso Sea
MHLDVLFDQKGNLEVNNPDGNQDPLKIHDIFLESAITTICDHEDSVAAVDAEDKVLGYRNWLSLMKGNLISKFRKNNKTIIRKLKLDREYLSPKGKKFKLHGRSLLLNRNVGHLMTNPAILLKDGSECPEGILDAFVTSAACLHDFKRKGNSRTNSIYIVKPKMHGPDECAFTNKIFEKVEKVLKLKKNQILCGIMDEERRTTINLKECVRVLKKRVFFINTGFLDRTGDEIHTSMEAGPMIKKGDMKSSKWIRA

SEQ ID NO: 116665 - protein, 255 aa, Unknown
  Bacterial polypetide isolated from the Sargasso Sea
LRTGSIYIVKPKMHGPEEVQFTCDLFAAVEQALDLDPLTVKVGIMDEERRTTVNLKECIRAAKDRVIFINTGFLDRTGDEIHTSMEAGPMIPKAQMKQQPWITAYEDWNVDVGLESGFKGKAQIGKGMWAMPDEMLGMYENKSMHPEAGANCAWVPSPTAATLHAIHYHQVLVSERQETIKSREKADLNDILTIPLLEDADSLSEKDIQEELDNNCQGILGYVVRWVDLGVGCSKVPDINNVGLMEDRATCRISS

SEQ ID NO: 116666 - protein, 254 aa, Unknown
  Bacterial polypetide isolated from the Sargasso Sea
KKYTIKIGIMDEERRTTVNLKECIRAVKNRVVFINTGFLDRTGDEMHTSMEAGPMIKKGDMKSSKWISAYENNNVGVGLACGFSGIAQIGKGMWAAPDKMADMMSQKINHPKSGANCAWVPSPTAATLHALHYHQVDVFSKQKELKNKTHVKISDDILTIPTAGRPNWSIDEINKELENNAQGILGYVVRWIDQGVGCSKVPDINNIGLMEDRATLRISSQHIANWLHHKICSKEQVLNTMKKKAKIVDKQNIR

SEQ ID NO: 116667 - protein, 265 aa, Unknown
  Bacterial polypetide isolated from the Sargasso Sea
LDRTGDEIHTSFYAGPMIKKGDMKKSNWILAYENWNVDIGLSCGFSGVAQIGKGMWAMPDKMYDMIEQKINHPKAGANCAWVPSPTAATLHSIHYHQINIFDQQKKISSRSPAKLSEILILPTIQRPNWPEQDVIKELENNAQGILGYVVRWIDQGVGCSKVPDINNVGLMEDRATLRISSQHIANWLHHKICSEETVMQVMKKMASVVDKQNINDPDYKPMSKNFDSSIAFQAACDLVFKGGSQPSGYTEPILHKRRVEKKTSH

SEQ ID NO: 116668 - protein, 270 aa, Unknown
  Bacterial polypetide isolated from the Sargasso Sea
HLMTNPSIILDDGNEVPEGILDAFITTAAALHDLKKKNNSRTGSVYIVKPKMHGPDETAFTNLIFSKVEEVLGLKKYTCKIGIMDEERRTSSNLKECIRSLKNRVFFINTGFLDRTGDEMHTSMMAGPMIKKGEMKSSKWITAYENRNVDIGLKCGFSGKAQIGKGMWAMPDKMKDMMEQKTGHLKAGANCAWVPSPTAAALHALHYHEINIFDEQKKILNRNQAKIDDLLTIPVADRTNWSVEEINNEISNSAQTLLGYVVRWVDQGIG

SEQ ID NO: 116669 - protein, 269 aa, Unknown
  Bacterial polypetide isolated from the Sargasso Sea
NLKECVRTLKKRVCFINTGFLDRTGDEIHTSMEMGPMVLKNDMKSTKWLLAYEDNNVDVGLSCGFSGKAQIGKGMWAMPDLLKNMMHQKILHPKSGANCAWVPSPTAAGLHVLHYHEIDVFSKHKEIKKRKHAKLDDLLEIPIKFKHNWSKDQISKELRNNAQGILGYVVRWIDQSVGCSKVPDINGIGLMEDRATCRISSQHIANWLHHGICSKKQVLEIMKKMAKVVDNQNLKDKSMQGQAPYQQMASNYYQSIAFKTSCDLISTGK

SEQ ID NO: 116670 - protein, 279 aa, Unknown
  Bacterial polypetide isolated from the Sargasso Sea
RVFFINTGFLDRTGDEIHTSMEIGPMIKKGDMKSSKWIGAYENNNVDVGLACGFSGKAQIGKGMWAMPDLLKEMMEQKISHPISGANCAWVPSPTAAAIHVLHYHEVNVFSIHKKIKNRKPAKLKDLLTIPIDTKKNWSKEEIEKELKNNAQGILGYVVRWVDQSVGCSKVPDINGIGLMEDRATCRISSQHIANWLHHGICSKKQVLEIMKKMAKVVDYQNLKDRGMKDQDPYQPMAGNFERSIAFKAACDLVFHGKFQPSGYTEPLLHFNRLIKKSI

SEQ ID NO: 116671 - protein, 247 aa, Unknown
  Bacterial polypetide isolated from the Sargasso Sea
LWLQKEDMKKEKWISAYEDWNVDIGLETGFKWNAQIGKGMWAMPDEMLDMYKSKTIHPKSGANCAWVPSPTAATLHAIHYHQIFVQDEQDRISKREKASLDDILSIPLITSKNMPSRQEIQKELDNNAQGILGYVVRWIDQGVGCSKVPDINDIGLMEDRATCRISSQHISNWLYHGLCSKEQVIDTMKKMARIVDMQNKDDTNYRPMAPSFDGIAFKAACDLAIKGKDQPSGYTEPILHEMRLKRK

SEQ ID NO: 116672 - protein, 283 aa, Unknown
  Bacterial polypetide isolated from the Sargasso Sea
MPRTKLLGYRNWLGLMKGNLKVEFTKQRKKILRKLNSDKNYISPVGKKFKLHGRSLLLNRNVGHLMTNPAILLKDGSECPEGILDAFITSTACLHDFKNNGNSRTNSIYIVKPKMHGPDECTFTNLIFEKVEKVLNLKRYTIKCGIMDEERRTTLNLKECIRSLKNRVFFINTGFLDRTGDEIHTSMEVGPMVKKGDMKSSKWIAAYENNNIDVGLACGFLGKCQIGKGMYPAPDLMAVMMKQKISHPLAGANCAWVPSPTAAALHVLHYHDVNVFSIQKQLL

SEQ ID NO: 116673 - protein, 290 aa, Unknown
  Bacterial polypetide isolated from the Sargasso Sea
YYGCCHYYSNSNVRFKKQDNKNSEYKSIYIVKPKMHGPEEVQFTDQLFSAVEKLLALPNSSIKIGIMDEERRTSVNLKECIRAAKSRVAFINTGFLDRTGDEIHTSMRAGSFLKKADMKNAPWISSYENRNVQIGLQCGLKGKAQIGKGMWAMPDLMAEMMKQKIGHPQSGANCAWVPSPTAATLHALHYHEVNVKEIQNSILENKTTDSLDDLLTLPLLKGQNLSEDEINREVENNTQSILGYVVRWIDQGIGCSKVLDINNIGLMEDRDTCRISSQALANWIEHGIIS

SEQ ID NO: 116674 - protein, 131 aa, Unknown
  Bacterial polypetide isolated from the Sargasso Sea
EINLEISNSAQTILGYVVRWIDQGVGCSKVPDINDVGLMEDRATLRISSQHIANWLHHGLCSNKQVLEIMKKMAKVVDQQNKNDPNYMNMSPNYDKSIAFKTACELIFQGRSQPSGYTEPLLHLNRLIKKN

SEQ ID NO: 116675 - protein, 133 aa, Unknown
  Bacterial polypetide isolated from the Sargasso Sea
ELENNAQGILGYVVRWIDQGVGCSKVPDINNVGLMEDRATLRISSQHIANWLHHGICSKEQVLKTMKKMAKIVDSQNIKDPALKGYAAYRTMSDNYDRSIAFKAACELVFHGRSQPSGYTEPILHLNRLLKKI

SEQ ID NO: 116676 - protein, 326 aa, Unknown
  Bacterial polypetide isolated from the Sargasso Sea
KELLDIRKKLQMDIDRWHLDNNKKEFNPEDYKSYLKKIGYLKKEGPDFNIKTENIDNEISKIAGPQLVVPIMNARYALNAANARWMSLYDSLYGTDIITSEESSSERYDPERGAQVIEYTKNFLDENFKLKNSRWKKVNKISIKDHKLELYLDKGNAELESDEKYIGYRLENKKVSAVILKNNNLHIEILINPNAFSAKRDPAGISDIIVESAISTICDHEDSVAAVDAEDKIIGYRNWLGLMKKDLKSEFEKNGKKLIRKLNTNRNYISKLGKKENLHGRSLLLNRNVGHLMTNSAVLLQDGSEIPEGILDAFCTSLCSMHDLKN

SEQ ID NO: 116677 - protein, 329 aa, Unknown
  Bacterial polypetide isolated from the Sargasso Sea
PGTGIDLESFWKGFANAVEELAPINKTLIEKRELIQKKIDDWHKNNKGKDFNKKEYTNFLRSVSYIVDEKEDFKIETENVDKEISSIAGPQLVVPVDNARYALNAANARWGSLYDCLYGTDVIPGKKSAGYNIERANKVIEYVRNFLDESFPLLKSSWKEISKIQIEENKIVFLLGKEKDYLKNKNQFIGYNGEKDNPKSILFKNNNLHVDIFIDPKSEVGKNDKASISDVVLESAISTIVDNEDSVAAVDAEDKVKCYRNWLGLMKGDLTANIEKNGKAFVRKLNPNRTYTSADGKKISLHGRAFASNRNVGHLMTNSAILLKDGTEI

SEQ ID NO: 116678 - protein, 269 aa, Unknown
  Bacterial polypetide isolated from the Sargasso Sea
LNAANARWGSLYDALYGTDFLESNKGLDSHYNPFRGGKVIKYCREILDKFFPLNENTWKKLELIKISSNKPEFIVDGKKINLKNQSQYVGYRGSEKKLKGILLKNNNLHVELVINPYAFAARRDPTGISDLVIESAVTTIMDHEDSVSAVDSEDKILGYRNWLGLMKGSLKTTFEKTGKLFERKLNTDRKYTGTQGEKIILHGRSLLLNRNVGHLMTNSSIILEDGSEIPEGIMDAFFTSAACLHDLQKKNNSRTGSIYIVKPKMHGPE

SEQ ID NO: 116679 - protein, 291 aa, Unknown
  Bacterial polypetide isolated from the Sargasso Sea
LVGLMKKDLVTEFEKDGKKLIRKLNPNRSYISKTGKKENLHGRALLLNRNVGHLMTNSAVLLQDGSEIPEGILDAFITTLCAIHDIKNKNNSRTSSIYIVKPKQHGPEETAFTNLLFTKVEEALGLEKFTIKCGIMDEERRTTVNLKECIRSLEHRVFFINTGFLDRTGDEMHTSMEAGPMMKKGDMKTSVWINAYENNNVDIGLECGFSGVAQIGKGMWAMPDKMADMLKQKISHLEAGANCAWVPSPTAAALHSLHYHKINIFNNHKKLQIRDRAKTSDLLNIPVVKKP

SEQ ID NO: 116680 - protein, 233 aa, Unknown
  Bacterial polypetide isolated from the Sargasso Sea
EDWNVDVGLSCGFSGKVQIGKGMWAMPDRMADMMSQKISHPQSGANCAWVPSPTAATLHATHYHKVDVFQKQSKIKSRKKANLENILKIPKADRPNWSVDDINKELENNAQGILGYVVRWIDQGVGCSKVPDINNVGLMEDRATLRISSQHMANWLHHNICSKDQVMGVMKKMATIVDQQNKEDKNYLPMSPNFEKSVAFSAACDLVFKGREQPSGYTEPILHKKRLEKKANH

SEQ ID NO: 116681 - protein, 289 aa, Unknown
  Bacterial polypetide isolated from the Sargasso Sea
LKSGIRVLKKRVFFINTGFLDRTGDEIHTSMEIGPMIRKGDMKSSKWIRAYEKNNVNIGLACGFSGKAQIGKGMWAMPDLLKEMMEQKILHPMSGANCAWVPSPTAAAIHALHYHAVNVFSIHKKLKNRNPAKLDDLLTIPVKTKKDWTKDEIEKELKNNAQGILGYVVRWVDQSVGCSKVPDINGIGLMEDRATCRISSQHIANWLHHGICSKKQVLEIMKKMARIVDYQNLKDRGMKDQDPYQPMAGNFEKSIAFKAACDLIFHGKYQPSGYTEPLLHFNRLIKKSI

SEQ ID NO: 116682 - protein, 289 aa, Unknown
  Bacterial polypetide isolated from the Sargasso Sea
SVYIVKPKMHGPDEVAFTDLIFEKVENFLGLKKFTIKIGIMDEERRTSVNLRECIRAVKNRVVFINTGFLDRTGDEMHTSMEAGPMIKKGDMKSAKWISAYENNNVDVGLECGFSGIAQIGKGMWAAPDKMADMVNQKINHPKSGANCAWVPSPTAATLHVLHYHQINVFSLQNELKKREPAKTTDILTIPVADRPNWSIEEIKKELENNAQGILGYVVRWIDQGVGCSKVPDINNVGLMEDRATLRISSQHIANWLHHGVCSKEQVLQTMKKMAKIVDKQNINDSEYK

SEQ ID NO: 116683 - protein, 241 aa, Unknown
  Bacterial polypetide isolated from the Sargasso Sea
STWISAYENNNVDIGLKCGFSGKAQIGKGMWAMPDKMKEMMEEKINHLKAGANCAWVPSPTAASLHALHYHKINIFEEQQRILNRDQAKLDDLLKIPTADRPNWSMNEINSEISNSAQTLLGYVVRWIDQGIGCSKVPDINNIGLMEDRATLRISSQHIANWIHHGITTKIQVTEILKQMANIVDQQNEGDPNYVKMSNNFEKSLAFQTACDLVFKGKDQPSGYTEPLLHLNRLKMKTNQN

SEQ ID NO: 116684 - protein, 260 aa, Unknown
  Bacterial polypetide isolated from the Sargasso Sea
HTSMEIGPMIKKGDMKSSKWIKAYENNNVDIGLACGFSGKAQIGKGMWAMPDLLKEMMEQKISHPISGANCAWVPSPTAAAIHALHYHAVNVFSIHQKIKFRKSAKIDDLLTIPVDNKKKWSEEDIEKELKNNAQGILGYVVRWVDQSVGCSKVPDINGVGLMEDRATCRISSQHIANWLHHGICSKKQVLEIMKKMAKVVDYQNLKDRGMKDQDPYQPMAGNFEKSIAFKAACDLVFHGKFQPSGYTEPLLHFNRLIKK

SEQ ID NO: 116685 - protein, 315 aa, Unknown
  Bacterial polypetide isolated from the Sargasso Sea
MESAVTTIQDCEDSVAAVDAEDKIIVYRNWLGLMKGNLKRSFDKGGQFITRELNPDRKYLLKNGKMILLPGRSLMLVRNVGHLMTNPAIKDKKGNEVHEGIIDAFFTICIAIHDIIGNGVYKNSKTKSIYIVKPKMHGPEEVQFTCDLFSEIEKIFDLPENTVKLGIMDEERRTTVNLKECIEVAKHRVIFINTGFLDRTGDEIHTSMEAGPMVTKADMKMQKWINAYENWNVDIGLETGFKGNAQIGKGMWPMPDEMLDMYKTKTVHPKAGANCAWVPSPTAATIHSMHYHQISVSDEADKILKREKAKLDDLL

SEQ ID NO: 116686 - protein, 302 aa, Unknown
  Bacterial polypetide isolated from the Sargasso Sea
KIDKASISDIIMESAVSTIVDNEDSVAAVDSEDKVKCYRNWLGLMKGNLEAKVKKNGKEFLRKLNPDRHYTAVDGSKIILHGRALLLNRNVGHLMTNPAIKLKNGSEIPEGIMDAFVSTICALHDFKNKRNSRTNSVYIVKPKMHGPDEVAFTNKIFSKVEDVLNLKKYTIKVGIMDEERRTTVNLKECIRQVKDRIVFINTGFLDRTGDEMHTSFEAGPMIFKGEMKKSVWLNAYENWNVDIGLSCGFSGKAQIGKGMWAMPDKMSDMMKQKISHPESGANCAWVPSPTAATLHSMHYHSV

SEQ ID NO: 116687 - protein, 286 aa, Unknown
  Bacterial polypetide isolated from the Sargasso Sea
VPVMNARYALNAANARWGSLYDALYGTDFLESNKGLDSHYNPFRGGKVIKYCRGILDKFFPLNENTWKKLELIKINSNKPEFIVDGKKINLKNQSQYVGYRGSENKLKGILLKNNNLHVELVINPYAFAARRDPTGISDLVIESAVTTIMDHEDSVSAVDSEDKILGYRNWLGLMKGSLKTTFEKTGKLFERKLNTDRKYTGPQGEKIILHGRSLLLNRNVGHLMTNSSIILADGSEIPEGIMDAFFTSAACLHDLQKKNNSRTGSIYIVKPKMHGPEEVAFTNEI

SEQ ID NO: 116688 - protein, 189 aa, Unknown
  Bacterial polypetide isolated from the Sargasso Sea
AGANCAWVPSPTAASLHAMHYHKVDIFEQQKELKSNKVDYIDNLLTIPIADRPNWSKEEINNELCNSAQTILGYVVRWVDQGIGCSKVPDINNVGLMEDRATLRISSQHIANWLHHGICSNRQVLEILKKMAKIVDKQNEGDSEYQNMSPNYDKSISFKAACELIFHGKSQPSGYTEPLLHLNRLIKKS

SEQ ID NO: 116689 - protein, 240 aa, Unknown
  Bacterial polypetide isolated from the Sargasso Sea
MVIKYGRDFLDKYFPLAGLSWNKITSFAVKFGKLKVLKGADIFDLENENKFVGHRGESDNPSAIILKNNNLHIEILKDSRAFAAQQDHAGISDIILESAVSTICDNEDSVAAVDSEDKIICYRNWLGLMKGDLKSKFEKEGKLFERKLNPHRSYISKDGKGLKLHGRSLLLVRNVGHLMTNPSILLSDGSEIPEGIMDAFITTAAALHDIKNKNNSRTGSVYIVKPKMHGPDETAFTDLI

SEQ ID NO: 116690 - protein, 286 aa, Unknown
  Bacterial polypetide isolated from the Sargasso Sea
NGVKFKLHGRALLLNRNVGHLMTNPAIILKDGSEIPEGIMDAFFSTMCALHDFKNKKNSRTGSVYIVKPKMHGPDEASFTNDLFEKVEETLNLKKYTIKVGIMDEERRTTVNLKECIRKVKERIVFINTGFLDRTGDEMHTSFEAGPMIFKGDMKKSAWLNTYEDWNVDTGLSCGFSGVAQIGKGMWAMPDRMSDMMKQKIVHPNSGANCAWVPSPTAATLHSIHYHEVNVFKKQIEIKKRQKAKLDKILEIPTADRPNWSVEEINKEIENNAQGILGYVVRWMTR

SEQ ID NO: 116691 - protein, 266 aa, Unknown
  Bacterial polypetide isolated from the Sargasso Sea
ICDNEDSVAAVDSEDKIICYRNWLGLMRGDLKSKFEKDGKLYERKLNPNRSYISKDGKGLKLHGRSLLLVRNVGHLMTNPSIILDDGNEVPEGILDAFITTAAALHDLKKKNNSRTGSVYIVKPKMHGPDETAFTDLIFSKVEEVLGLKKYTCKIGIMDEERRTSSNLKECIRSLKNRVFFINTGFLDRTGDEMHTSMMAGPMIKKGEMKSSKWITAYENRNVDIGLKCGFSGKAQIGKGMWAMPDKMKDMMEQKTGHLKAGANCA

SEQ ID NO: 116692 - protein, 306 aa, Unknown
  Bacterial polypetide isolated from the Sargasso Sea
MNEDKKFIDVKGNEKFLNGRSLLLIRNVGHLMRSNTIILDNGEEIPEGILDAFTTVLCALHDLRIKKNSKKGSIYIVKPKMHGPKEVAFANTIFLKVEDVLKLKPNTIKIGIMDEERRTTVNLKECIRHVKKRIVFINTGFLDRTGDEMHTSFEMGAMIFKGDMKKSKWLLAYENWNVDIGLLCGFTGKAQIGKGMWAMPDKMQDMLDQKASHPLAGANCAWVPSPTAATLHSTHYHKINVFERQKELSKRKRANISDILTIPVSDRQNWSKEDINSEIANNAQGILGYVVRWIDQGVGCSKSTQI

SEQ ID NO: 116693 - protein, 313 aa, Unknown
  Bacterial polypetide isolated from the Sargasso Sea
SLYGTDIIESEEGGSERYDPNRGQEVIKYTREFFDNYIPIDGTSWKNIAGLKIVNKELIISKDDYEYKLKDNNKFIGHRGDATKPEAIILQNNKLHFEIIINPRAFSAAHDIAGISDVIAESAISTICDNEDSVAAVDAEDKVACYKNWLGLMKGDLKVQFEKKGKTLERKLNPDRSYISKDGKGLKLHGRSLLLIRNVGHLMKNSSIILKDGSEAPEGIMDAFITTAAAIHDLNKKRNSRTGSIYIVKPKMHGPEETAFTDLIFTKVEETLNLQKYTCKIGIMDEERRTSANLKECIRTLKNRVFFINTGFF

SEQ ID NO: 116694 - protein, 285 aa, Unknown
  Bacterial polypetide isolated from the Sargasso Sea
LGYRNWLGLMKGDLQYEGEKNGKKLVRKLNPDREYISPDGNKIKLHGRALMLNRNVGHLMTNSSILLEDKTEIPEGIMDAFITTAAAIHDFKNKGNSKTNSVYIVKPKMHGPEEVLFTNLIFEKVEKVLNLKKYTIKIGIMDEERRTTVNLKECIRAVKNRVVFINTGFLDRTGDEMHTSMEAGPMIKKGDMKSSKWISAYENNNVDVGLECGFSGIAQIGKGMWAAPDKMADMIEQKVNHPKSGANCAWVPSPTAATLHALHYHQVNVFSQQKELKNRPRAKVS

SEQ ID NO: 116695 - protein, 278 aa, Unknown
  Bacterial polypetide isolated from the Sargasso Sea
EEALNLPKNTLKMGIMDEERRTSVNLKACINEAKQRVVFINTGFLDRTGDEIHTSMQAGVALPKAEIKQQPWISAYEDRNVDIGLACGLSQKAQIGKGMWPMPDKMALMMEQKLAHPKSGANTAWVPSPTAATLHAMHYHDVNVFTEQYAIAERTIASLDDLLTPPLMQDTSTLSKEDIQSELENNAQGILGYVVRWIDQGVGCSKVPDINHVGLMEDRATLRISSQHMANWLLHGICTQEQITSTMAKMAKVVDGQNEHDKAYTPMASSPETLKNSI

SEQ ID NO: 116696 - protein, 274 aa, Unknown
  Bacterial polypetide isolated from the Sargasso Sea
FINTGFLDRTGDEIYTSMEAGVMVKKTQMKNENWINAYEQWNVGVGLQCGFSRLAQIGKGMWAMPDMMSKMMEDKINQCKAGASTAWVPSPTAATIHALHYHMINIFDIHKNLITKKTASIDDLLDIPKIHKPNWTKEEIQLELDNNIQGILGYVVKWINNGIGCSKVTDINNVGLMEDRATLRISSQHVANWLHHNICDKKEVLDTFNKMAFIVDEQNKHDKDYIPMSNNLDTSIAFGTAKSLVFNGREQPSGYTEPILHSQRLRFKSEFKIK

SEQ ID NO: 116697 - protein, 235 aa, Unknown
  Bacterial polypetide isolated from the Sargasso Sea
ILDCEDSVATVDADDKILSYRNWLGLMKGDLKSEFIKNNKLVNRTLNQDIDFFSLNREKQFLKSRSLMLIRNVGHLMTTPAILINDQEIGEGLMDAIITSLIALHDIKKQDGMINSLKKSIYIVKPKMHGPEEVEFTVSLFEKTEKLLNLKKNTIKIGIMDEERRTSINLKECIRAAKSRVAFINTGFLDRTGDEIHTSMFAGPFVTKGEMKNSTWIKAYENRNVTIGLKCGLQG

SEQ ID NO: 116698 - protein, 297 aa, Unknown
  Bacterial polypetide isolated from the Sargasso Sea
LLVRNVGHLMQNPSVILDNGEEVFEGILDAMFTICIALYDLNQLNTLSNSRNKSMYIVKPKMHGSEEVAFTCDLFDAVERLFNLEKNTVKVGIMDEERRTTINLKACIEKAKERIIFINTGFLDRTGDEIHTSMEAGAMVPKSEMKAQSWINAYEDWNVDIGISCGLSGKAQIGKGMWAMPDEMKEMVETKIAHPLSGATCAWVPSPTAATLHAMHYHQVDVLSKQDELSTREQADLDKILTIPLLKKDIDEQTIRSEIANSAQGILGYVVRWIDQGIGCSKVPDINNIGLMEDRAT

SEQ ID NO: 116699 - protein, 324 aa, Unknown
  Bacterial polypetide isolated from the Sargasso Sea
DDWHIKHKGKETKINDYKKFLKEINYLQDEGPDFQIETSNVDEEIAKIAGPQLVVPIMNARYALNAANARWVSLYDSLYGTNIIESEEGGSERYDPNRGQEVIKYVREFFDKYIPIDGTSWKNIASLKVIDKNLVILKDDYKYKLKDHNKFIGHRGDANKPEAIILQNNNLHFEIIINPRAFSAAHDIAGISDVIAESAISTICDNEDSVAAVDAEDKVLCYRNWLGLMKGDLKIQFEKNGKNLERKLNPDRSFISKDGKGLKLHGRSLLLIRNVGHLMTNPSILLKDGNEVPEGIMDAFITSAAAIHDLKRKKNQELALFILL

SEQ ID NO: 116700 - protein, 274 aa, Unknown
  Bacterial polypetide isolated from the Sargasso Sea
VFFINTGFLDRTGDEMHTSMMAGPMIKKGEMKSSKWITAYENRNVDIGLKCGFSGKAQIGKGMWAMPDKMKDMMEQKTGHLKAGANCAWVPSPTAAALHALHYHEINIFDEQRKILNRNQAKLDDLLTIPVADRTNWSVEEINNEISNSAQTLLGYVVRWVDQGIGCSKVPDINNVGLMEDRATLRISSQHIANWIHHGITTEIQVTEIMKEMAKIVDDQNKNDSKYIKMSDDFENSIAFKTACDLVFKGKQQPSGYTEPLLHINRLEKKSNLN

SEQ ID NO: 116701 - protein, 232 aa, Unknown
  Bacterial polypetide isolated from the Sargasso Sea
ECIRKVKNRIVFINTGFLDRTGDEMHTSFETGPMIFKGEMKKSLWLNAYENWNVDIGLSCGFSGKAQIGKGMWAMPDKMSQMMEQKIVHPKSGANCAWVPSPTAATLHAIHYHEIDVFKKQVELKSREKAKLNDILEIPKADRPNWSIEDINKELENNAQGILGYVVRWIDQGVGCSKVPDINNVGLMEDRATLRISSQHMANWLYHGICTKEQVMKVMKKMAAIVDKQNAN

SEQ ID NO: 116702 - protein, 159 aa, Unknown
  Bacterial polypetide isolated from the Sargasso Sea
KELEKREKAKLDDLLNIPVINRPNWTIEEINKEISNSAQTILGYVVRWIDQGIGCSKVPDINNVGLMEDRATLRISSQHIANWLHHGICSRKQVLEIMKKMSKVVDEQNKNDKLYQKMSPKYDKSIAFKTACELVFQGKDQPSGYTEPLLHLNRLIKKN

SEQ ID NO: 116703 - protein, 248 aa, Unknown
  Bacterial polypetide isolated from the Sargasso Sea
MKSSKWITAYENNNVDIGLNCGFSGKAQIGKGMWAMPDKMKDMMEQKTGHLKAGANCAWVPSPTAAALHSLHYHEINIFNEQKKLVDREPAKLDDLLTIPIADRPNWSVEDINKEISNSAQTLLGYVVRWVDQGVGCSKVPDINNIGLMEDRATLRISSQHIANWIHHGITTKIQVINIMKDMAKIVDEQNKNDPQYVKMSEDYENSLAFQTACDLVFKGKEQPSGYTEPLLHLNRLKKKSNLSSKSN

SEQ ID NO: 116704 - protein, 243 aa, Unknown
  Bacterial polypetide isolated from the Sargasso Sea
QTWIKAYEDSNVDVGLAARFRGRAQIGKGMWPKPDEMAEMLDVKRGHPEAGASTAWVPSPTAASLHALHYHEIAVSSIQEEVSQRRSASVDDILKIPLLAGQNLSSEEVQKELDNNVQGILGYVVRWIDQGIGCSKVPDINDVGLMEDRATLRISSQHIANWLHHGICSKDQVQETLQRMASVVDQQNEGDAEYRNMAPDFGDSVAFAAACDLIFGGTEQPSGYTEPVLHARRREAKAKYAEK

SEQ ID NO: 116705 - protein, 229 aa, Unknown
  Bacterial polypetide isolated from the Sargasso Sea
MDAFITSAACIHDLKRKGNSRKGSIYIVKPKMHGPEETAFADLIFTKVEEVLKLEKNTIKCGIMDEERRTSANLKECIRTLKERVFFINTGFLDRTGDEMHTSMEAGPMIKKGDMKESKWIKTYENNNVDIGLKCGFSGVAQIGKGMWAMPDKMNEMMEQKIGHVNAGANCAWVPSPTAAALHVLHYHEVNVFEKQKEILKREPSKLSDLLTIPIANRPNWSVDEINTE

SEQ ID NO: 116706 - protein, 326 aa, Unknown
  Bacterial polypetide isolated from the Sargasso Sea
DAFITTAAALHDIKNKNNSRTGSVYIVKPKMHGPDETAFTDLIFSKVEDVLNLPKYTCKIGIMDEERRTSANLKECIRSLKNRVFFVNTGFLDRTGDEMHTSMEAGPMIKKGDMKSSKWIIAYENNNVDIGLSCGFSGKAQIGKGMWAMPDKMKDMMEQKTGHLKAGANCAWVPSPTAAALHALHYHEINIFNEQKKLIDREPAKLDDLLTIPIADRPNWSVEDINKEISNSAQTLLGYVVRWVDQGVGCSKVPDINNIGLMEDRATLRISSQHIANWIHHGITTKIQVTEIMKDMAKIVDDQNKNDPLYVKMSGDYENSIAFQLR

SEQ ID NO: 116707 - protein, 302 aa, Unknown
  Bacterial polypetide isolated from the Sargasso Sea
IKIGYLKKPGSNFKIKTKNVDKEISSICGPQLVCPVSNARFLLNAANARWVSLYDSLYGTDVIPETGGAVKGKTYNPIRGKKVIEYARNLLDKFVPLRENSWKDLEKIPKVINNKLDLKLKNSNQFVGYNKKLNKISSLLFVNNNLHIDILFDQDGKMEINNPQGNQDKIKIHDIFLESAISTICDHEDSVAAVDAEDKVLGYRNWLGLMKGNLKVEFIKNGKKNLRKLNSDRNYISSKGKKIKLHGRSLLLNRNVGHLMTNPSILLKDGSECPEGMLDAFITSFASIHDFKRKGNSRVNSI

SEQ ID NO: 116708 - protein, 273 aa, Unknown
  Bacterial polypetide isolated from the Sargasso Sea
IMDAFISTLCAIHDFKLKNNSRKESVYIVKPKMHGPEEVEFTNNLFSKVEDALKIKKYSIKVGIMDEERRTTVNLKECIRKVKERVVFINTGFLDRTGDEMHTSFEAGPMIFKGDMKKSKWLNTYEDWNVDIGLACGFSGKAQIGKGMWAMPDKMSDMMKQKINHPKSGANCAWVPSPTAATLHATHYHYFDVFKKQDELKNKKRAKLENLLEIPKADRPNWSLDDINKELENNVQGILGYVVRWIDQGVGCSKVPDINNIGLMEDRATLRIS

SEQ ID NO: 116709 - protein, 196 aa, Unknown
  Bacterial polypetide isolated from the Sargasso Sea
SGANCAWVPSPTAATLHALHYHKVNVFEKQAELVGKKRSNLSDILSIPITKNTNWTKVEINNELENNIQGILGYVVRWVDQGIGCSKVPDINDVGLMEDRATLRISSQHIANWLNHGICTKDQVVKILKKMAHKVDEQNISDVNYERMSDNFEISYSFKAAYELIFNGLNEPSGYTEPILHKMRIQKKINLGNSNQ

SEQ ID NO: 116710 - protein, 286 aa, Unknown
  Bacterial polypetide isolated from the Sargasso Sea
NLKACIKAACERVVFINTGFLDRTGDEIHTSMEAGPMIPKTMMKASSWITAYEDSNVDIGLACGLQGRAQVGKGMWAMPDLMAAMVEQKINHPESGATTAWVPSPTAAVLHAMHYHRISVFDQQDKIMSRVPASIDEILNIPLLEDPTSLTAEEIQTELDNNAQGILGYVVRWIDQGIGCSKVPDINDIGLMEDRATLRISSQHIANWLHHGICKKEQVRATMERMAGVVDEQNKEDPLYNPMTRDLENSVAFQAACDLVYDGFNQPSGYTEPILHARRLEKKAEV

SEQ ID NO: 116711 - protein, 185 aa, Unknown
  Bacterial polypetide isolated from the Sargasso Sea
CAWVPSPTAATLHALHYHKVNVFEEQKKIKKRSKAKIENILEIPMADRPNWSTEDINRELENNAQGILGYVVRWVDQGIGCSKVPDINNTGLMEDRATLRISSQHIANWLHHKICSEEQVMKILKKMATIVDKQNEKDQNYLPMSKDFNKSIAFKAACDLIFKGRVQPSGYTEPLLHQRRLEKKR

SEQ ID NO: 116712 - protein, 283 aa, Unknown
  Bacterial polypetide isolated from the Sargasso Sea
VYTKADGNGELTLHGRSLLFIRNVGHLMTNDAILDKEGNEVPEGIMDGLFTSLIAVHNLNGNTSRKNTRTGSMYIVKPKMHGPEEVAFATELFGRVEDVLGLPRNTLKVGIMDEERRTTINLKACIKEARERVVFINTGFLDRTGDEIHTSMEAGPMVRKAAMKAEKWIGAYENNNVDVGLACGLQGKAQIGKGMWAMPDLMAAMLEQKVGHPMAGANTAWVPSPTAATLHAMHYHKIDVQARQVELAKREKASIDDILTIPLAQDTNWSEEEKQNELDNNSQ

SEQ ID NO: 116713 - protein, 219 aa, Unknown
  Bacterial polypetide isolated from the Sargasso Sea
DSVDKVKCYKNWLGLMKGDLKTEVNKNGKTFTRKLNSDRNYIGPDGSKFTLHGRALLLNRNVGHLMTNPAIILKDGSEIPEGIMDAFISTLCAMHDFKLKNNSRKESVYIVKPKMHGLEEVEFTNNLFSKVEEALKIKKYSIKVGIMDEERRTTVNLKECIRKVKERVVFINTGFLDRTGDEMHTSFEAGPMIFKGDMKKSKWLNTYEDWNVDIGLSCV

SEQ ID NO: 116714 - protein, 301 aa, Unknown
  Bacterial polypetide isolated from the Sargasso Sea
KKLSIYKENKEYNLSDLEKFIGHRGDAAKPNAIILKNNNLHLEIIINPRAFSAARDAAGISDIIIESALSTICDHEDSVAAVDAEDKVTCYRNWLGLMKGNLKSIFEKNGKELERKLNPDRSYTALNGEKLKLHGRSLLLVRNVGHLMTNPAITLKDGSEVPEGIMDAFITSAACIHDLKRKGNSREGSIYIVKPKMHGPEETEFTNLIFTKVEEVLKLEKNTIKCGIMDEERRTSANLKECIRTLKDRVFFINTGFLDRTGDEMHTSMEAGPMIKKGDMKESKWIKTYEDNNVDIGLKCG

SEQ ID NO: 116715 - protein, 226 aa, Unknown
  Bacterial polypetide isolated from the Sargasso Sea
GFSGKAQIGKGMWAMPDLMNEMMKQKIVHPLSGANCAWVPSPTAASLHAIHYHIVDVFAKQKELSKRKPAKLSSLLTIPIEKKPRWTMEEITKELKNNAQSILGYVVRWVDQSVGCSKVPDINGIGLMEDRATCRISSQHIANWLHHGICSKKHVLEIMKKMAKIVDNQNLKDPSMKGHSPYIPMSDNFSKSVSFKAACELVFHGKTQPSGYTEPILHLNRLLKKN

SEQ ID NO: 116716 - protein, 299 aa, Unknown
  Bacterial polypetide isolated from the Sargasso Sea
MKGADIFDLEDENKFIGHRGESDNPSAIILKNNNLHIEILKDSRAFAAQQDHAGISDIILESAVSTICDNEDSVAAVDSEDKIICYRNWLGLMKGDLKSKFEKEGKLFERKLNPHRSYISKDGTGLKLHGRSLLLVRNVGHLMTNSSILLNDGSEIPEGIMDAFITTAAALHDIKNKNNSRTGSVYIVKPKMHGPDETAFTDLIFSKVEEVLNLPKYTCKIGIMDEERRTSANLKECIRSLKNRVFFINTGFLDRTGDEMHTSMEAGPMIKKGDMKLSKWITAYENNNVDIGLSCGFSG

SEQ ID NO: 116717 - protein, 173 aa, Unknown
  Bacterial polypetide isolated from the Sargasso Sea
FKEQDKIKSRSKAKLDDILEIPKADRPNWSVDDINRELENNAQGILGYVVRWIDQGVGCSKVPDINNVGLMEDRATLRISSQHIANWLHHGICTKEQVMKVMKKMATIVDKQNEKDPAYFRSGRSGYNKMSDDFESSIAFSAACDLIFKGREQPSGYTEPLLHEKRLEKKSSI

SEQ ID NO: 116718 - protein, 274 aa, Unknown
  Bacterial polypetide isolated from the Sargasso Sea
PLTDHAGISDIILESAISTICDNEDSVAAVDSEDKIICYRNWLGLMRGDLKSKFEKEGKLFERKLNPHRSYISKDGKGLKLHGRSLLLVRNVGHLMTNPSILLGDGSEIPEGIMDAFITTAAALHDIKNKNNSRTGSVYIVKPKMHGPEETAFTDLIFSKVEEVLNLPKYTCKIGIMDEERRTSANLKECIRTLKNRVFFINTGFLDRTGDEMHTSMEAGPMIKKGDMKSSKWITAYENNNVDIGLNCGFSGKAQIGKGMWAMPDKMKDMMEQK

SEQ ID NO: 116719 - protein, 266 aa, Unknown
  Bacterial polypetide isolated from the Sargasso Sea
IALHDIKKEDGMINSTKKSIYIVKPKMHGPEEVEFSVSLFEKTEKLLNLQKDTIKIGIMDEERRTSVNLKECIRAAKSRLAFINTGFLDRTGDEIHTSMFAGPFVTKGEMKNSTWIKAYENLNVTIGLSCGLQGKAQIGKGMWAMPDKMKEMIDQKINHLKAGANCAWVPSPTAATLHALHYHYVNVNEIQNDIISKEEKNLIEDLITLPLLNRQNLSDEEINAEIENNAQGILGYVVRWIDQGIGCSKVPDINNIGLMEDRATCR

SEQ ID NO: 116720 - protein, 277 aa, Unknown
  Bacterial polypetide isolated from the Sargasso Sea
LSPINKNLIEKRQIIQKKIDEWHKKNKGKDFDKKEYTDFLKSASYIAEEKEDFKIETSNVDQEIASIAGPQLVVPVDNARYALNAANARWGSLYDALYGTDVIPGNKSKDFNEERAKKVITYVRNFLDAAAPITDTSWNEISGIKVKEKDLVFLSANKESNLKDKNQFIGFNGEKNKPTSILIKNNNLHIDILIDPNHMIGKSDKASISNIILESALSTIIDNEDSVAAVDGEDKVKCYRNWLGLMKGDLIANMEKNGKKFVRKLNPNRNYISRNGK

SEQ ID NO: 116721 - protein, 316 aa, Unknown
  Bacterial polypetide isolated from the Sargasso Sea
VGFNGEKNNPKSILLKNNNLHIDIIINPNNLVGKNDPANISDVIIESAISTIIDNEDSVAAVDSQDKIKCYRNWLGIMKGNLESEIEKNGKKFTRKLNSDRSYNDVDGSKFKLHGRALLLNRNVGHLMTNPSIILKDGSEIPEGIMDAFFSTLCALHDLKNKNNSRTGSIYIVKPKMHGPEEVEFTVKLFAKVEEVLEIKTNTLKIGIMDEERRTTLNLKECIRRAKKRVVFINTGFLDRTGDEMHTSFEIGPMIFKGDMKKSLWLNTYENWNVDIGLKCGFSGKAQIGKGMWAMPDKMANMMQQKIDHLKSGANA

SEQ ID NO: 116722 - protein, 285 aa, Unknown
  Bacterial polypetide isolated from the Sargasso Sea
NLKECIRQVKERIVFINTGFLDRTGDEMHTSFEIGPMIFKGEMKKSIWLNSYENWNVDVGLSCGFSGKAQIGKGMWAMPDKMGEMMDQKIGHPRSGANCAWVPSPTAATLHAIHYHKVNVFDEQKKIESREKAKLQDILEIPKADRANWSVEDINRELENNAQGILGYVVRWIDQGVGCSKVPDINNIGLMEDRATLRISSQHIANWLHHNVCTKDQVMTVMKKMASIVDEQNKNDPNYKKMSDDFDGSVAFSAACDLVFKGRLQPSGYTEPLLHQKRLEKKTSI

SEQ ID NO: 116723 - protein, 297 aa, Unknown
  Bacterial polypetide isolated from the Sargasso Sea
FELILDKFVPKNKELLEIRNKMKKLIDEFYLSNAGKTINQDEYVSFLKKINYIVPVGDDFNIETKNIDPELATKAGPQLVVPVTNARYALNAANARWGSLYDALYGTDVISDEGNANKTTSYNPKRGEKVVSYAKDFLNKSFPLKNGSHKEVVSYKINNNNLIFTLNDNSLTEFVNHDQYIGYQGNIDSPTSILLKNNNLHVEIQINRSGSIGSDDPAGINDILIESALTTIQDCEDSVATVDAEDKVLAYRNWLGLMKADLEDTFEKNGKNLTRRLNADKVYITSNGEFKLPGRSV

SEQ ID NO: 116724 - protein, 243 aa, Unknown
  Bacterial polypetide isolated from the Sargasso Sea
GIEKYSIKVGIMDEERRTTVNLKECIRQVKNRIVFINTGFLDRTGDEMHTSFEAGPMIFKGEMKKSTWLNTYEDWNVDIGLRCGFSGKAQIGKGMWAMPDQMGNMMEQKISHPKSGANCAWVPSPTAATLHSLHYHKVNVFNEQLKIRQRNKAEVEKILEIPIADRPNWSLEDINRELENNAQGILGYVVRWINQGVGCSKVPDINNVGLMEDRATLRISSQHIANWLHHGICKKERVIEVMK

SEQ ID NO: 116725 - protein, 278 aa, Unknown
  Bacterial polypetide isolated from the Sargasso Sea
PDRSYTSLNGEKLKLHGRSLLLVRNVGHLMTNPAITLNDGSEVPEGIMDAFITSAACIHDLKRKGNSRTGSIYIVKPKMHGPEETEFTNLIFTKVEEVLKLEKNTIKCGIMDEERRTSANLKECIRTLKDRVFFINTGFLDRTGDEMHTSMEAGPMIKKGDMKESKWIKTYEDNNVDIGLKCGFSGVAQIGKGMWAMPDKMNEMMEQKIGHVNAGANCAWVPSPTAAALHVMHYHEVNVFEKQKAILKREPSKLSDLLTIPIANRPNWSIDEINTEIS

SEQ ID NO: 116726 - protein, 281 aa, Unknown
  Bacterial polypetide isolated from the Sargasso Sea
VDGERLVLPGRALMLVRNVGHLMTNPAILDAEGNEVFEGIMDAVITGLIALHDLKDPAQRNSRTGAMYVVKPKMHGPEETAFSVELFERTEQLLGMTPKTMKIGIMDEERRTTVNLKECIRAASDRVIFINTGFLDRTGDEIHTSMEAGPMIRKADMKAEPWIKAYEDWNVDVGLKCGLPGHAQIGKGMWPMPDEMAAMMKAKGDHPRSGANTAWVPSPTAATLHAMHYHETDVIARQDGLKNRAQASLDDILKIPLSDSPNWSTEEIGEEIDNNCQGILG

SEQ ID NO: 116727 - protein, 292 aa, Unknown
  Bacterial polypetide isolated from the Sargasso Sea
YVKLENLSISEDLFNFINNEALPGLDITQKKFWHGLSKVAHDLAPKNKELLKVRKRLQMDIDRWHLENYEKEFNIDHYKSYLEKIGYLKKEGPDFKIKTKNIDKEISKIAGPQLVVPIMNSRYALNAANARWMSLYDSLYGTDVISSDESISERYDPERGLKVIQYTKKFLDQNFKLKKSSWKNVNKILIKKNNLEIHTEKGITEIEDKSKYVGYRLDKDKISAIILKNNFLHIEIIINPSAFSAKGDPAGISDIIVEAAISTICDHEDSVAAVDAEDKIIGYRNWLGLRKK

SEQ ID NO: 116728 - protein, 264 aa, Unknown
  Bacterial polypetide isolated from the Sargasso Sea
SASGVSDVLLESAITVIQDCEDSVAAVDGPDKAQVYANWLGLMRGTLSTIVSKGGETFERTLNPDREYLGVDGERLVLPGRALMLVRNVGHLMTNPAILDAEGNEVFEGIMDAVITGLIALHDLKDPAQRNSRTGAMYVVKPKMHGPEETAFSVELFERTEQLLGMAPKTMKIGIMDEERRTTVNLKECIRAASDRVIFINTGFLDRTGDEIHTSMEAGPMIRKADMKAEPWIKAYEDWNVDVGLQCGLPGHAQIGKGMWPMPD

SEQ ID NO: 116729 - protein, 259 aa, Unknown
  Bacterial polypetide isolated from the Sargasso Sea
NTCKIGIMDEERRTSANLKECIRSLKNRVFFINTGFLDRTGDEMHTSMESGPMIKKGEMKSSKWILAYENNNVDIGLECGFSGKAQIGKGMWAAPDMMKQMMKEKIGHLKAGANCAWVPSPTAASLHALHYHQIDIFNEQKKILDRNKAKLDDLLTLPIADRPNWSVDEINAEISNSAQTILGYVVRWIDQGVGCSKVPDINNIGLMEDRATLRISSQHIANWIHHGITTKIQVTEIMKDMAKIVDKQNEGDKNYIKMS

SEQ ID NO: 116730 - protein, 234 aa, Unknown
  Bacterial polypetide isolated from the Sargasso Sea
NLEAEVKKNGKPFVRKLSSDRIYTGPDGSKVVLHGRALLLNRNVGHLMTNPSITLKDGSEIPEGIMDAFISTLCAIHDFKNKKNSRTGSMYIVKPKMHGPDEVSFTNDIFETVEKVLGLKKYSIKVGIMDEERRTTVNLKECIRKVKNRVVFINTGFLDRTGDEMHTSFEAGPMIFKGEMKKSTWLNTYENWNVDTGLACGFSGKAQIGKGMWAMPDKMGDMMKQKNRTSKVWC

SEQ ID NO: 116731 - protein, 300 aa, Unknown
  Bacterial polypetide isolated from the Sargasso Sea
DEERRTTVNLKECIRQVKNRIVFINTGFLDRTGDEMHTSFEAGPMIFKGDMKKSTWLNSYENWNVDIGLSCGFSGKAQIGKGMWAMPDQMANMMEQKIGHPKSGANCAWVPSPTAATLHSMHYHKVDVFEQQDKIRSRNKTDIANLLEIPRADRPNWSVEDINRELENNAQGILGYVVRWIDHGVGCSKVPDINNVGLMEDRATLRISSQHIANWLHHGICTKDQVIKVMKKMATIVDNQNEKDPAYSRSGRSNYKKMSDNFDNSIAFSAACDLVFKGRVQPSGYTEPLLHQKRLEKKKS

SEQ ID NO: 116732 - protein, 286 aa, Unknown
  Bacterial polypetide isolated from the Sargasso Sea
MVLKKLCGYNPIRGDKVIDFAKNFLDETIPLANGSYKDVLGFDFVDRELQAVLPDAEKTQLKNPSQYVGYSDNGNDAYALLFKNNNLHFEIQIDATHPIGQTDKAGIKDILMESAITTIQDCEDSVAAVDGEDKTLVYRNWLGLMKGDLKESFDKNGSLLTRELSPDRTYVTKDGKDLILPGRSLMLVRNVGHLMTNPGVLDSQGNEVPEGIIDAMFTICIAIHDLNKNGLYQNSKTGSIYIVKPKMHGPEEVQFTCDLFAAVEEALGLPHLTAKVGIMDEERRTT

SEQ ID NO: 116733 - protein, 299 aa, Unknown
  Bacterial polypetide isolated from the Sargasso Sea
MCRQRGPYFYLPKLQSMEEAALWETALSHIEGMLGLPHGQIKVTVLIETLPAVFEMDEILHALRDRIVGLNCGRWDYIFSYIKTFRRHRDKVLPERGQVTMTQPFLKAYSELLIQTCHRRGAHAMGGMAAQIPINHDPAANEQAMARVRADKLREVSAGHDGTWVAHPALIPVAQAIFDAHMPGPNQHQVLRRDVQVDRDALIATPTGTITRAGFEGNVDVCVRYLAAWLDGNGCVPIHHLMEDAATAEISRSQLWQWLHTGGQHLDDGTAIDLALLDAALAQLPARLGDRSALPGASR

SEQ ID NO: 116734 - protein, 312 aa, Unknown
  Bacterial polypetide isolated from the Sargasso Sea
KDENKFIGHRGEADNPSAIILKNNNLHIEILKNPRAFSAQQDHAGISDIILESAISTICDNEDSVAAVDAQDKVICYRNWLGLMKGDLVTRFEKEGKTLERKLNPNRSYISKEGKGLKLHGRSLLLIRNVGHLMTNPSIILRDGSEIPEGLMDAFITTAAALHDIKKKGNSRTGSIYIVKPKMHGPDETAFTNEIFTKVEEVLKLKKYACKIGIMDEERRTSSNLKECIRTLKHRVFFINTGFLDRTGDEMHTSMEAGPMIKKGDMKTSKWIEAYENNNVDIGLACGFSGKAQIGKGMWAMPDKMKDMLDQK

SEQ ID NO: 116735 - protein, 299 aa, Unknown
  Bacterial polypetide isolated from the Sargasso Sea
KSFYIVKPKMHGPDEVAFTNLIFEKVEELLNLEKFTIKIGIMDEERRTTLNLKECIRAVKNRVVFINTGFLDRTGDEMHTSMEAGPMIKKGDMKSSKWISAYENNNVDIGLACGFSGIAQIGKGMWAAPDKMADMMSQKIIHPKSGANCAWVPSPTAATLHAMHYHQVDVFSKQKELKGKKRSKISDLLTIPTAYRPNWSAEEITKEIENNAQSILGYVVRWIDQGVGCSKVPDINNVGLMEDRATLRISSQHIANWLHHGICKKELVLEIMKKMAKIVDKQNIRDPDLKGYALYKRMS

SEQ ID NO: 116736 - protein, 212 aa, Unknown
  Bacterial polypetide isolated from the Sargasso Sea
WAMPDKMAAMLEQKVSHLNAGANTAWVPSPTAATLHATHYHRINVAERQNALKSRERASLDAILMIPLSERANWNPEEVQMELDNNAQGILGYVVRWIDQGVGCSKVPDITDVGLMEDRATLRISAQHIANWLHHGVCSEEQVMETMQRMAAVVDQQNAEDPVYRNMAPNFDASIAFQAACDLVFKGRIQPNGYTEPILHARRQEAKAKFAA

SEQ ID NO: 116737 - protein, 290 aa, Unknown
  Bacterial polypetide isolated from the Sargasso Sea
RHARWGSLYDALYGTDAIPETDGAEKGKGYNPVRGAKVIAFARQVLDDTAPLASGSHKDSTGYRVEGGQLVVSLANGSTTGLKDASQFKGYQGNAAAPSSVLLQHNGLHLDIQIDRSTPIGQSDAAGVSDLVLEAALSTILDLEDSVAAVDAEDKVLGYSNWLGIIQATLTEQVAKGGKTFTRGLNPDRIYTGPQGGEVRLHGRSLMFLRNVGHLMTNPAILWKDAQGQVREIPEGIMDAVVTTAIALHDLQGHGANGIRNSRKGSVYIVKPKMHGPAEVGFAAELFGRV

SEQ ID NO: 116738 - protein, 260 aa, Unknown
  Bacterial polypetide isolated from the Sargasso Sea
TNSREGSVYIVKPKMHGPEEVAFSNVLFERIEDIIDVPRNTLKMGIMDEERRTSVNLQACIAEAQSRVVFINTGFLDRTGDEIHTSMLAGPFAEKASLKTMSWIKAYETANVAVGLRCGLSGKAQIGKGMWPTPDEMQNMMDAKIGHLKAGANTAWVPSPTAATLHALHYHDVNVFNVQKQLDENFDGLNDILTIPLLADTSSLTRDGIKREIDNNVQGILGYVVRWVHQGVGCSKVPDINDVGLMEDRATLRISSLAHC

SEQ ID NO: 116739 - protein, 261 aa, Unknown
  Bacterial polypetide isolated from the Sargasso Sea
LGEIGKDYNEERGNKVIKFTREFLDNSFPISNASWKKITKIKINEKNLVFQVNESNYNLKDNSQFVGYTGNEENISSLLLKNNNLHTDIIINPNSIIGKKDKAGISDLIVESAVSTIVDNEDSVAAVDANDKVKCYRNWLGLMKGDLETEIKKGQKKFIRKLNPDRIYKSPNGSEIVLHGRALLLNRNVGHLMTNPSILLKDGSEIPEGIMDAFISTLCALHDFKNKKNSRTGSVYIVKPKMHGPEEVGFTNEIFENVEKC

SEQ ID NO: 116740 - protein, 261 aa, Unknown
  Bacterial polypetide isolated from the Sargasso Sea
HTSMEAGPMIKKGDMKSSKWINAYENNNVDVGLECGFSGVAQIGKGMWAAPDKMADMMLQKINHPKSGANCAWVPSPTAATLHAMHYHQVDVFSKHKKLKNRTKAKISEMLTIPIADRPNWSLEEITKELENNAQGILGYVVRWIDQGVGCSKVPDINNIGLMEDRATLRISSQHIANWLHHGVCSKKQILETMKKMAQIVDKQNIRDPDLKGYASYKRMSDDFEKSIAFKTACELVFFGRNQPSGYTEPLLHLNRLIKKN

SEQ ID NO: 116741 - protein, 202 aa, Unknown
  Bacterial polypetide isolated from the Sargasso Sea
SAVQDAAGISDIIIESAISTICDNEDSVAAVDSEDKILCYRNWLGLMKGTLKSVFEKDGKTLERKLNPDRSYISKDNKKEKLHGRSLLLIRNVGHLMTNSAIILEDGSEVPEGIMDAFITTAAAIHDLKRKGNSRTGSIYIVKPKMHGPEETAFTDKIFTRVEEVLNLEKNTIKCGIMDEERRTSVNLKECIRTLKMQGFFH

SEQ ID NO: 116742 - protein, 282 aa, Unknown
  Bacterial polypetide isolated from the Sargasso Sea
EISTSDQSSTELKDESQFIGFTGDSDNPSSILFKNNNLHIEIEIDPEDSVGKDDPANIKDVCVESAVTAIQDLEDSVAAVDAEDKSLGYRNWLGLMKGDLKESFFKGGEEMTRTLNEDRNYSDKNGQEITLPGRSVLLVRNVGHLMTNPAILDGSNNEVPEGIMDAMFTICIGKHDLLKEGKQSNSRTGSIYIVKPKMHGPEEVKFTCDLFSKVEQELGLDPLTVKVGIMDEERRTTVNLKECIRAASDRVIFINTGFLDRTGDEIHTSMEAGPVVPKAEMK

SEQ ID NO: 116743 - protein, 316 aa, Unknown
  Bacterial polypetide isolated from the Sargasso Sea
WLGLMRGTLSTIVSKGEETFERTLNPDQEYMGVDGERLVLPGRALMLVRNVGHLMTNPAILDAEGNEVFEGIMDAVITGLIALHDLKDPAQRNSRTSAMYVVKPKMHGPEETAFSVELFERTEQLLGMTPKTMKIGIMDEERRTTVNLKECIRAASDRVIFINTGFLDRTGDEIHTSMEAGPMIRKADMKAEPWIKAYEDWNVDVGLQCGLPGHAQIGKGMWPMPDEMAAMMKAKGDHPRSGANTAWVPSPTAATLHAMHYHETDVIARQDELKNRAQASLDDILKIPLSDSPNWSTEEIGEEIDNNCQGILGYVV

SEQ ID NO: 116744 - protein, 282 aa, Unknown
  Bacterial polypetide isolated from the Sargasso Sea
YSLNENTATLIVRPRGWHLNEKHILINGEEVSGSLFDFALYLSNNYQSLNSKGSGPYFYLPKLESHLEARLWNDVFVEAQDFLKIEQGTIKATVLIETILAAFEMNEILYELKDHSAGLNCGRWDYIFSFIKRFRNDPSCILPNRDEVTMTRHFLNSYVDELIKTCHKRNVHAMGGMAAQIPIKNDAEKNKLAMDKVQSDKLREAKAGHDGTWIAHPGLSTIAMDAFDSVMANNPNQISNKRNDVNTTAGDLLKIPTGSITQHGIRENIRVGVQYIEAWLSG

SEQ ID NO: 116745 - protein, 197 aa, Unknown
  Bacterial polypetide isolated from the Sargasso Sea
KQKISHLEAGANCAWVPSPTAAGLHALHYHKISIFDKQLELKKRKKTNQLDILKIPVADRLNWSIEEINEEISNSAQTILGYVVRWIDQGIGCSKVPDINNIGLMEDRATLRISSQHIANWLYHGICSRKQVLEIMKKMAKIVDNQNKNDSKYLNMSPNYDKSIAFKTACELIFQARHQPSGYTEPLLHLNRLIKKN

SEQ ID NO: 116746 - protein, 298 aa, Unknown
  Bacterial polypetide isolated from the Sargasso Sea
CNYLRNNNLHIEILKDSRAFAAQQDHAGISDIIVESAVSTICDNEDSVAAVDSEDKIICYRNWLGLMRGDLKSKFEKDGKLYERKLNPNRSYISKEGKGLKLHGRSLLLVRNVGHLMTNPSIILDDGNEVPEGILDAFITTAAALHDLKKKNNSRTGSVYIVKPKMHGPDETAFTDLIFSKVEEVLGLKKYTCKIGIMDEERRTSSNLKECIRSLKNRVFFINTGFLDRTGDEMHTSMMAGPMIKKGEMKSSKWITAYENRNVDIGLKCGFSGKAQIGKGMWAMPDKMKDMMEQKTGH

SEQ ID NO: 116747 - protein, 305 aa, Unknown
  Bacterial polypetide isolated from the Sargasso Sea
CDHEDSVAAVDAEDKVIGYRNGLRLMKGNLKVKFLKKGKKIIRKLNTDRNYISKEGKKFKLHGRSLLLNRNVGHLMTTPAILLNDGSECPEGILDAFVISLASIHDFKRKGNSKTNSIYIVKPKMHGPEECAFTNLIFGKVEKVLKLKKNQILCGIMDEERRTSVNLKECIRVLKNRVFFINTGFLDRTGDEIHTSMESGPMILKGNMKSSKWISAYENNNVDIGISCGFSGKAQIGKGMWAMPDLMKDMLKQKVAHPSSGANCAWVPSPTAASIHALHYHEINVFDKHKELSKRKPAKLSDLLT

SEQ ID NO: 116748 - protein, 275 aa, Unknown
  Bacterial polypetide isolated from the Sargasso Sea
GKDDPAGIKDVMVESAVTTIQDLEDSVAAVDAEDKTIAYRNWLGLMKGDLKETFVKGDQEMTRSLNADREYSRSDGESLTLPGRSVLLVRNVGHLMTNPAVLDKEGNEIPEGILDAMFTICIAKHDLMKTGSLSNSRTGSIYIVKPKMHGPEEVQFTCDLFSAVEKALDIKPLTVKVGIMDEERRTTVNLKECIRAAKDRVIFINTGFLDRTGDEIHTSMEAGPMIPKALMKQQPWINAYEDWNVDVGLEAGFSGKAQKGKGMWAMPDEMLGMYE

SEQ ID NO: 116749 - protein, 235 aa, Unknown
  Bacterial polypetide isolated from the Sargasso Sea
SLYDALYGTDVVPGEKFEEYNQKRALAVINYVRDFFDTNFPLSKMSWKEINKFQIEEDKLVVLKGTEKDKLKNNDQFIGFNGEKKNPSSFLLKNNNLHIDIFIDPQNEVGKNDKASISDVIVESALSTIIDNEDSVAAVDAEDKVKCYRNWLGLMKGDLTANIEKKGKKFVRKLNKDRTYTSKYGKKITLHGRALLLNRNVGHLMTNPSIILKDGSEIPEGIMDAFISTLCALHD

SEQ ID NO: 116750 - protein, 209 aa, Unknown
  Bacterial polypetide isolated from the Sargasso Sea
MWAMPDKMRDMIDQKISHLEAGANCAWVPSPTAASLHAMHYHKLNIFEKHKKLNNNKINYIDDLLSIPIADRPNWSKEEINNELCNSAQTILGYVVRWVDQGIGCSKVPDINNVGLMEDRATLRISSQHIANWLHHGICSNRQVLEILKKMAKIVDKQNEGDPEYQSMSPNYDKSISFKAACELIFHGKSQPSGYTEPLLHLNRLIKKN

SEQ ID NO: 116751 - protein, 296 aa, Unknown
  Bacterial polypetide isolated from the Sargasso Sea
TGRMRTHGPVPSISVKPKMHGPEEVAFASEIFACVEDALGLERNTVKMGIMDEERRTTVNLKECIRAAKERVVFINTGFLDRTGDEMHTSMEAGPMIRKGDMKASAWIKAYEDWNVDIGLECGLQGRAQIGKGMWAMPDLMADMMEQKLGHPMAGANTAWVPSPTAATLHALHYHKVNVFDRQNELKSRGRASLDDILSLPVADRPNWSPDDIRQELDNNAQGILGYVVRWVEQGIGCSKVPDINDVGLMEDRATLRISSQHIANWLQHGVCTEEQVRETMERMAGVVDKQNSGDA

SEQ ID NO: 116752 - protein, 260 aa, Unknown
  Bacterial polypetide isolated from the Sargasso Sea
KYVGYRVENKKVSAVILKNNNLHIEIIINPNAFSAKRDPAGISDIIVESAISTICDHEDSVAAVDAEDKIIGYRNWLGLMKKDLKSEFEKNGKKLIRKLNTNRSYITKLGKKESLHGRSLLLNRNVGHLMTNSAVLLQDGSEIPEGILDAFVTSLCSIHDLKNKNNSRTGSIYIVKPKQHGPEETSFTNLLFSKVEEVLGLKKFTIKCGIMDEERRTSVNLKECIRTLEYRVFFINTGFLDRTGDEMHTSMEAGPMIRKA

SEQ ID NO: 116753 - protein, 269 aa, Unknown
  Bacterial polypetide isolated from the Sargasso Sea
VPEGIMDAFITTAAAMHDLKRKKNSRTGSIYIVKPKMHGPEETAFTDLIFTKVEETLGLNKYTCKIGIMDEERRTSANLKECIRSLKNRVFFINTGFLDRTGDEMHTSMEAGPMIKKGDMKSSKWISAYENNNVDVGLACGFSGKAQIGKGMWAAPDMMKQMMSEKIGHLKAGANCAWVPSPTAASLHALHYHEIDIFNEQKKILGREKAKLDDLLTIPIADRPNWSVDEINSEISNSAQTILGYVVRWIDQGIGCSKVPDINNIGLME

SEQ ID NO: 116754 - protein, 195 aa, Unknown
  Bacterial polypetide isolated from the Sargasso Sea
KIGHVNAGANCAWVPSPTAAALHVMHYHEVNVFEKQKLILKREPSKLSDLLTIPIADRPNWSVDEINNEISNSAQTILGYVVRWIDQGIGCSKVPDINDIGLMEDRATLRISSQHIANWLHHGLCSNRQVLEILKKMAKVVDKQNEDDSNYESMSPEYDKSIAFKAACELIFHGKSQPSGYTEPLLHLNRLIKKS

SEQ ID NO: 116755 - protein, 298 aa, Unknown
  Bacterial polypetide isolated from the Sargasso Sea
FSKKGKKITRKLNSDRIYVSKKDGEEIRLHGRALLLNRNVGHLMTNPSIILSDRSEIPEGIMDAFVSTLCALHDFKNKKNSRTGSVYIVKPKMHGPEEVEFTNTLFEKVEEALGIKKFSIKVGIMDEERRTTVNLKECIRKVKDRIVFINTGFLDRTGDEMHTSFEAGPMIFKGDMKKSTWLNTYENWNVDIGLKCGFAGKAQIGKGMWAMPDQMSNMMQQKINHPKAGANCAWVPSPTAATLHSLHYHKVNVFAEQEKMKTREKAKVENILEIPKADRPNWSVDDINRELETTHKEF

SEQ ID NO: 116756 - protein, 267 aa, Unknown
  Bacterial polypetide isolated from the Sargasso Sea
MILTGKDITGLAVNNKKLLIYKENKEYNLSDAEKFIGHRGDVAKPNAIILKNNNLHLEIIINPRAFSAARDAAGISDIIIESAVSTICDHEDSVAAVDAEDKVTCYRNWLGLMKGNLKSIFEKNGKELERKLNPDRSYTSSNGEKLKLHGRSLLLVRNVGHLMTNPAITLNDGSEVPEGIMDAFITSAACIHDLKRKGNSREGSIYIVKPKMHGPEETEFANLIFTKVEEVLKLEKNTIKCGIMDEERRTSANLKECIRTLKDRVFF

SEQ ID NO: 116757 - protein, 321 aa, Unknown
  Bacterial polypetide isolated from the Sargasso Sea
SFKDGSECPEGILDAFITSLACLHDFNKKQNSRVNSIYIVKPKMHGPEECSFTNLIFEKVEKVLNLKKNQILCGIMDEERRTSINLKECIRVLKNRVFFINTGFLDRTGDEIHTSMEVGPMIKKSEMKASKWILAYENNNVDIGLACGFSGKCQIGKGMYAAPDLMSDMMKQKVAHPLSGANCAWVPSPTAASLHALHYHEINVFLKQKEISKRKPAMLSDLLTIPVSKNHDWSIDEVTKELKNNSQGILGYVVRWIDQSVGCSKVPDINGVGLMEDRATCRISSQHIANWLHHGVCSKKHVLEIMKKMAKVVDSQNLKDL

SEQ ID NO: 116758 - protein, 220 aa, Unknown
  Bacterial polypetide isolated from the Sargasso Sea
LDADGNEAPEGIVDAVCSVLIALHDLKGTGPVTNSRAGSVYIVKPKMHGPEEAAFANDLFCRVEDALGLARNTVKMGIMDEERRTTVNLMECIRAAKDRICFINTGFLDRTGDEIHTSMEAGPMVRKNAVKETAWIAAYEDWNVDVGLACGLQGKAQIGKGMWAMPDMMGAMLEQKVGHPKAGASTAWVPSPTAATLHATHYHRINVAVRQNELKNRERA

SEQ ID NO: 116759 - protein, 314 aa, Unknown
  Bacterial polypetide isolated from the Sargasso Sea
VAATLADFIEQRALPGTGIDADAFWAGTADILARFTPDNAALLRTRDDLQTQIDAWHQVRRGQAHNAAAYQAFLREIGYLVEEPAPFAIGSGNVDAEVARMAGPQLVVPILNARFLLNAANARWGSLYDALYGTDAIAGAASGKGYDAARGAQVIAWAKAFLDDAVPLATGRWADLAGGEIVLADPAQFVGTSAKGRLFRHNGLHIEVVFDSAHPIGATDPAGISDVILESALTTICDLEDSVAAVDAADKVTAYANWLGLMQGDLTETFEKGGKPMTRALNPDRAYSAPDGSSFTLPGRSLLFVRNVGHLMTT

SEQ ID NO: 116760 - protein, 300 aa, Unknown
  Bacterial polypetide isolated from the Sargasso Sea
FAINAVNARWGSLYDALYGTDALGEVPQGNSYDAERGNKVVGYAKSHLDKFAPLEKIKWSEINKIELQDNKIILGSIKENSVNFVNKNQLIGWRSSKDGQLLEIILLKNNLHCRILINENDAIGKNDPANISDILLESAISSILDCEDSVATVDADDKILAYQNWLGLTKGDLEAEFVKNNKAVKRVLNKDIIYTATNQKDQILRGRSLMLIRNVGHLMTTPAILRKNNDEIGEGIMDAIITTLIATHDFKKSENRNSNYNSIYIVKPKMHGPEEVEFTDQLFSQIEKLLDLPNSTIKIG

SEQ ID NO: 116761 - protein, 316 aa, Unknown
  Bacterial polypetide isolated from the Sargasso Sea
GRSLLLIRNVGHLMTNPSIILKDGSEVPEGIMDAFITTAAAIHDLKNKKNSKKGSIYIVKPKMHGPKETEFTDLIFSKVEELFGLKKYTCKIGIMDEERRTSANLKECIRSLKNRVFFINTGFLDRTGDEIHTSMEAGPMIKKGEMKSSRWITAYENNNVDIGLKCGFSGKAQIGKGMWAMPDKMKEMIKEKINHLKAGANCAWVPSPTAASLHALHYHQIDIFNEQKKIKLREKAKLDDLLNIPVSNRSNWSVDEINSEISNSAQTLLGYVVRWIDQGIGCSKVPDINNIGLMEDRATLRISSQHIANWIHHGIT

SEQ ID NO: 116762 - protein, 263 aa, Unknown
  Bacterial polypetide isolated from the Sargasso Sea
IQFDPNSPIGQTDAAGVKDLLVESAVSTILDCEDSVAAVDADDKVLAYRNWLGIVQVTLSEEVAKGSSSFVRRLNPDREYSAPNGGELKLHGRSLLFIRNVGHLMTNPAILLEDGREIPEGIMDGVFTSLIAKHDLKRKGNSRTGSVYIVKPKMHGPKEVAFADELFGRVEDLIGVPRYTLKMGIMDEERRTSANLKACIAAAKHRVAFINTGFLDRTGDEMHTCMEAGPVLRKGDMKSTPWIQSYERNNVLVGLACGLRGKA

SEQ ID NO: 116763 - protein, 153 aa, Unknown
  Bacterial polypetide isolated from the Sargasso Sea
MHYHEVNVFEKQKEILKREPSKLSDLLTIPIANRPNWSVDEINTEISNSAQTILGYVVRWIDQGIGCSKVPDINDIGLMEDRATLRISSQHIANWLHHGLCSNRQVLEILKKMAKVVDKQNEDDSNYESMSPEYDKSIAFKAACELIFHESHN

SEQ ID NO: 116764 - protein, 237 aa, Unknown
  Bacterial polypetide isolated from the Sargasso Sea
EGNQDPLKIHDIFLESAISTICDHEDSVAAVDAEDKVLGYRNWLSLMKGNLTSKFRKNNKTILRKLNLDREYLSLKSKKFKLHGRSLLLNRNVGHLMTNPAILLKDGSECPEGILDAFVTSAACLHDFKRKGNSRTKSIYIVKPKMHGPDECAFTNKIFEKVEKVLKLKKNQILCGIMDEERRTTVNLKECIRVLKKRVFFINTGFLDRTGDEIHTSMEIGPMIKKGDMKSSKWIKA

SEQ ID NO: 116765 - protein, 284 aa, Unknown
  Bacterial polypetide isolated from the Sargasso Sea
MLIRNVGHLMTNPFIILKDGSEIPEGIMDAFITTAAALHDLKKKRNSKKGSIYIVKPKMHGPEETAFTDLIFLKVEQLLKLEKYTCKIGIMDEERRTSANLKECIRTLKDRVFFINTGFLDRTGDEMHTSMEAGPMIKKGDMKLSKWISAYENNNVDIGLKCGFSGKAQIGKGMWAMPDKMKEMMEDKINHLKAGANCAWVPSPTAASLHVLHYHQINIFDEQKKIQNRKISKLDDLLNIPIADRPNWSVDEINSEISNSSQTLLGYVVRWIDQGVGCSKVPDI

SEQ ID NO: 116766 - protein, 264 aa, Unknown
  Bacterial polypetide isolated from the Sargasso Sea
LLGLEANIIKIGIMDEERRTTVNLKECIRAAKSRVVFINTGFLDRTGDEIHTSMEAGPMIRKADMKGATWIGAYEDWNVDVGLSCGLAGKAQIGKGMWAMPDRMADMLEQKIGHPMAGANCAWVPSPTAATLHALHYHKVDVAARQAEIAGRAKASRDDILSVPVAVRPNWSEDDIRAELRNNAQGILGYVVRWVDQGVGCSKVPDIHDVGLMEDRATLRISSQHIANWLRHGVCSGPLVREVMEEMAAVVDRQNEGDAGYSPM

SEQ ID NO: 116767 - protein, 272 aa, Unknown
  Bacterial polypetide isolated from the Sargasso Sea
REYLSIKGKKFKLHGRSLLLNRNVGHLMTNPAILLKDGSECPEGILDAFVTSAACLHDLKRKGNSRTKSIYIVKPKMHGPDECVFTNKIFEKVEKVLKLKKNQILCGIMDEERRTSINLKECIRVLKKRVFFINTGFLDRTGDEIHTSMEIGPMIKKGDMKSTNWIRAYENNNVDVGLICGFSGKAQIGKGMWAMPDLLKEMMEQKISHPMSGANCAWVPSPTAAAIHALHYHAVNVFSIHQKLKIRKIAKLDDILTIPVKTKENWSKDEMR

SEQ ID NO: 116768 - protein, 283 aa, Unknown
  Bacterial polypetide isolated from the Sargasso Sea
QVAADLDRFINEQALPGTGVDESAFWAGVDALFHDLTPKNRQLLEERDTLQEKLDAWHRENPGPVSDMPAYRSFLKEVGYLVDAPNSVKATTANVDREVATQAGPQLVVPVSNARYALNAANARWGSLYDALYGTDAISEEDGAEKGTSFNPKRGEKVIAYARGVLDRAAPLATGSHRDAVKYTIRDGHLVVSLEGGRETGLKDSGKLIGFNGDASAPQSILLANNGLHLEIQIDASHPIGKTDPAHVKDVVVEAALTAIMDCEDSVAAVDSEDKVGVYSNWL

SEQ ID NO: 116769 - protein, 261 aa, Unknown
  Bacterial polypetide isolated from the Sargasso Sea
KLSIYNENKEYNLSDLEKFVGHRGDAAKPNAIILKNNNLHLEIIINPRAFSAARDAAGISDIIVESAVSTICDHEDSVAAVDAEDKVTCYRNWLGLMRGNLKSMFEKNGKELERKLNPDRSYTSLNGEKLKLHGRSLLLVRNVGHLMTNPAITLNDGSEVPEGIMDAFITSAACIHDLKRKGNSREGSIYIVKPKMHGPEETEFANLIFTKVEEVLKLEKNTIKCGIMDEERRTSANLKECIRTLKDRVFFINTGFLDRHW

SEQ ID NO: 116770 - protein, 321 aa, Unknown
  Bacterial polypetide isolated from the Sargasso Sea
IIESAVSTICDHEDSVAAVDSEDKVTCYRNWLGLMKGNLKSIFEKNGKELERKLNPDRSYISLNGEKLKLHGRSLLLVRNVGHLMTNPAITLNDGSEVPEGIMDAFITSAACIHDLKRKGNSREGSIYIVKPKMHGPEETEFTNLIFTKVEEVLKLEKNTIKCGIMDEERRTSANLKECIRTLKDRVFFINTGFLDRTGDEMHTSMEAGPMIKKGDMKESKWIKTYEDNNVDIGLKCGFSGVAQIGKGMWAMPDKMNEMMEQKIGHVNAGANCAWVPSPTAAALHVMHYHEVNVFEKQKEILKREPSKLSDLLTIPIANRP

SEQ ID NO: 116771 - protein, 272 aa, Unknown
  Bacterial polypetide isolated from the Sargasso Sea
RGAKVIDYAREILDKYIFLKNQSWKNLKKIPYVKNGILSINLKNPKQFLGFRKQKNKIFSLLFKNNNLHLDILFDQKGNLEVNNPDGNQDPLKIHDIILESAISTICDHEDSVAAVDAEDKVLGYRNWLSLMKGNLTSKFKKNNKTILRKLNLDRQYLSPKGKKIVLHGRSLLLNRNVGHLMTNPAILLKDGSECPEGILDAFVTSAACIHDFKRKGNSRTNSIYIVKPKMHGPDECSFTNKIFEKVEKVLKFKKNQILCGIMDEERRTSVN

SEQ ID NO: 116772 - protein, 288 aa, Unknown
  Bacterial polypetide isolated from the Sargasso Sea
MTNPSILLRDGSECPEGILDAFITSLACLHDFKKKGNSRVNSIYIVKPKMHGPEECDFTNLIFENVEKVLNLKKNQILCGIMDEERRTSVNLKECIRSLKHRVFFINTGFLDRTGDEIHTSMEAGAMMKKSDMKLSKWIGAYENNNVDIGLACGFSGKCQIGKGMYPAPDLMDEMMKQKIAHPLAGANCAWVPSPTAAALHAIHYHQVEVFAKQKEISKRKSANLSDLLTIPITKKTNWSIEEITNELKNNAQGILGYVVRWVDQSVGCSKVPDINGIGLMEDRATCR

SEQ ID NO: 116773 - protein, 211 aa, Unknown
  Bacterial polypetide isolated from the Sargasso Sea
MWAMPDRMSDMMDQKIGHPKSGANCAWVPSPTAATLHSIHYHKINVFEKQSEISKRKKADIKNILEIPKADRPNWSMEDINKELENNAQGILGYVVRWIDQGVGCSKVPDINNIGLMEDRATLRISSQHMANWLHHNICTKDQVMKVLKKMATIVDKQNANDKNYIPMSQNFEKSFAFAAACDLVFKGKDQPSGYTEPLLHKKRLEKKASH

SEQ ID NO: 116774 - protein, 293 aa, Unknown
  Bacterial polypetide isolated from the Sargasso Sea
VGHLMTNSSILLKDGSECPEGLIDAVITSLACLHDFKKKRNSKTKSIYIVKPKMHGPDECKFTNFIFEKVEKLLKLKKFTIKCGIMDEERRTSINLKECIRQLKNRVFFINTGFLDRTGDEIHTSMEAGPMVKKNEMKKELWIKAYENNNVDIGLATGFSGKCQIGKGMYAAPDLMKEMVIQKIAHPLSGANCAWVPSPTAAALHALHYHKVNVFDKQRKLIKRKPAKLSHLLTIPVTRKKGYSNEEVTKELKNNAQGILGYVVRWIDQSVGCSKVPDINGIGLMEDRATLRI

SEQ ID NO: 116775 - protein, 279 aa, Unknown
  Bacterial polypetide isolated from the Sargasso Sea
TSRVVFINTGFLDRTGDEIHTSMLAGPFAEKAALKSMAWIKAYETANVAVGLRCGLSGKAQIGKGMWPIPDEMQNMMTAKIGHPKAGANTAWVPSPTAATLHALHYHDVNVFDVQKSLDENFSGLADILTIPLLEDASTLTRESIKREIDNNVQGILGYVVRWVHQGVGCSKVPDINNVGLMEDRATLRISSQHIANWLEHGIVSVDQVKESLARMAVLVDEQNAGDPEYIPMAPDLDSSIGFLAASDLIFKGKEQPSGYTEPLLHARRREMKAKLAAS

SEQ ID NO: 116776 - protein, 241 aa, Unknown
  Bacterial polypetide isolated from the Sargasso Sea
ANKPTAIIIQNNNLHFEIIINPKAFSAAHDIAGISDVIAESAISTICDNEDSVAAVDANDKIVCYKNWLGLMKGNLKIQFEKNGKNLERKLNPDRSYISKEGKGLKLHGRSLLLIRNVGHLMTNPSIILKDGSEVPEGIMDAFFTTAASLHDLKLKKNSRKGSIYIVKPKMHGPDETKFTDTIFSKVEDLFKLKRYTCKVGIMDEERRTSANLKECIRSLKNRVFFINTGFLDRTGDEMHT

SEQ ID NO: 116777 - protein, 292 aa, Unknown
  Bacterial polypetide isolated from the Sargasso Sea
MDIANISDVIVESAISTIVDNEDSVTAVDAEDKVKCYRNWLGLMKGDLKANMEKNGKKFVRKLNPDRRYMSKDGKKITLHGRALLLNRNVGHLMTNSAIILKDGSEVPEGILDAFVSTLCALHDFKNKNNSRTGSVYIVKPKMHGPEEVAFTNNLFGKVEEILGIKKFSIKVGIMDEERRTTVNLKECIREVKNRIVFINTGFLDRTGDEMHTSFEAGPMIFKGDMKKSTWLGTYENWNVDIGLSCGFSGKAQIGKGMWAMPDKMNEMMKQKISHPKSGANCAWVPLQQPQL

SEQ ID NO: 116778 - protein, 266 aa, Unknown
  Bacterial polypetide isolated from the Sargasso Sea
QKDVDEEIAKIAGPQLVVPVMNARYALNAANARWMSLYDSLYGTDIIDQSEDSVSERYDPLRGEMVIKYGRDFLDKYFALKDLSWKKITSFAVKDGKLKILKGADLVSLIDEDKFIGHRGESDNPSAIILKNNNLHIEILKDSRAFAAQQDHAGISDIIVESAVSTICDNEDSVAAVDSEDKIICYRNWLGLMRGDLKSKFEKDGKLYERKLNPNRSYISKDGKGLKLHGRSLLLVRNVGHLMTNPSIILDDGNEVPEGILDAFIT

SEQ ID NO: 116779 - protein, 269 aa, Unknown
  Bacterial polypetide isolated from the Sargasso Sea
EINKNGKKFTRRLNPDREYIAPDGNKIKLNGTALMLNRNVGHLMTNSCILLKDGLEIPEGIMDAFITTTAAIHDFKNRGNSKTNSVYIVKPKMHGPDEVAFTDLIFEKVESFLGLKKFTIKIGIMDEERRTSVNLRECIRAVKNRVVFINTGFLDRTGDEMHTSMEAGPMIKKGEMKSAKWISAYENNNVDVGLECGFSGIAQIGKGMWAAPDKMADMVSQKINHPKSGANCAWVPSPVAATLHALHYQQINVFSVKNELKKREPARTI

SEQ ID NO: 116780 - protein, 306 aa, Unknown
  Bacterial polypetide isolated from the Sargasso Sea
IIEQSEDSVSERYDSLRGEMVIKYGRDFLDKYFPLKDLSWKKITSFAVKDGMLKILKGADLINLIDENKYIGHRGESDNPSAIILKNNNLHVEILKDSRAFAAQQDHAGISDIIVESAVSTICDNEDSVAAVDSEDKIICYRNWLGLMRGDLKSKFEKDGKLYERKLNPNRSYISKDGKGLKLHGRSLLLVRNVGHLMTNPSVILDDGNEVPEGILDAFITTAAALHDLKKKNNSRTGSVYIVKPKMHGPEETAFTDLIFSKVEEVLGLKKYTCKIGIMDEERRTSDNLKECIRSLKNRVFFINTG

SEQ ID NO: 116781 - protein, 128 aa, Unknown
  Bacterial polypetide isolated from the Sargasso Sea
AQGILGYVVRWIDQSVGCSKVPDINGIGLMEDRATLRISSQHIANWLHHGVCSKKQVLEIMKKMAKIVDNQNIKDPALKGHAPYQAMSGNFDKSIAFKAACELVFHGRAQPSGYTEPILHLNRLLKKN

SEQ ID NO: 116782 - protein, 274 aa, Unknown
  Bacterial polypetide isolated from the Sargasso Sea
IIESAISTICDNEDSVAAVDSEDKILCYRNWLGLMKGTLKSIFEKDGKTLERKLNPDRSYISKENKKEKLHGRSLLLIRNVGHLMTNSAIILEDGSEVPEGIMDAFITTAAAIHDLKRKGNSRTGSIYIVKPKMHGPEETAFTDKIFTRVEEILKLEKNTIKCGIMDEERRTSVNLKECIRTLKSRVFFINTGFLDRTGDEMHTSMEAGPMIKKGDMKKSKWIKAYEDNNVDIGLKCGFSGVAQIGKGMWAMPDKMKDMMEQKISHLEAGANCA

SEQ ID NO: 116783 - protein, 288 aa, Unknown
  Bacterial polypetide isolated from the Sargasso Sea
VNLKDKDQYVGYQDKGEGAYGLLFKNNNLHFEIQIDKSHPIGQEDLANIKDILMESAITTIQDCEDSVAAVDAEDKIIVYRNWLGLMKGNLKRSFDKAGKFITRELNSDRKYLLKNGKMILLPGRSLMLVRNVGHLMTNPAIKDNKDNEVPEGIMDAFFTICIAIHDIIGNGIYKNSKTKSIYIVKPKMHGPEEVRFTCDLFSEIEKIFNLPENTVKLGIMDEERRTTVNLKECIEVAKHRVIFINTGFLDRTGDEIHTSMEAAPMVTKSDMKKEKWINAYENWNVDI

SEQ ID NO: 116784 - protein, 314 aa, Unknown
  Bacterial polypetide isolated from the Sargasso Sea
LRKHVTINDQPVSASLFDFAVYLSNNYEALSKKGTGPYFYLPKLENHLEARLWNDVFVHAQNFLNIDRGTIKATVLIETITAAFEMDEIIFELKEHSAGLNCGRWDYIFSFIKKFRNHQNFLLPNRTEVTMERHFLKSYVDLLIRTCHKRNVHAMGGMAAQIPIRGDEEQNQIAMNKVSLDKLREANAGHDGTWIAHPGLSQVAMNAFNQAMGSSPNQIPNKRNDISVNAQDLIKVPDGNITEDGLRQNISIGIQYIEAWLSGNGCVPIHNLMEDAATAEISRSQIWQWIHHRAKTTDSNKTITERVFHQDARG

SEQ ID NO: 116785 - protein, 283 aa, Unknown
  Bacterial polypetide isolated from the Sargasso Sea
NIDEEISKIAGPQLVVPIMNARYALNAANARWISLYDSLYGTDVIPETKGAVRGKTYNPIRGARVIEYAREFLDKYVPLKEKSWKELANVPEINNNKLSLKLKNPEQFVGYSKRSNFLSSLLFVNNNLHIEILFDQEGLLEINNPDGNQDKIAIHDIILESAISTICDHEDSVAAVDAEDKVLGYKNWLGLMKFDLHTEFEKNGRKTIRKLNTDREYINKNGKKIKLHGRALLLNRNVGHLMTSPAILLDDGSEIPEGIMDAFITSLACLHDFKIKGNSRTQS

SEQ ID NO: 116786 - protein, 263 aa, Unknown
  Bacterial polypetide isolated from the Sargasso Sea
MKKEGPDFKIETKNVDDEITQIAGPQLVVPIMNARYTLNAANARWVSLYDSLYGTNIIESEEGGSERYDPNRGQEVIKYVREFFDKYIPIDGTSWKNISALKIKDKNLIILKEDKEYKLRDENKFVGHRGDVNKPTAIIIKNNNLHFEIIINPKAFSAAHDIAGISDVIAESAVSTICDNEDSVAAVDAEDKVACYRNWLGLMRGDLKVQFEKNGKKLERKLNPDRSYISKEGKGLKLHGRSLLLIRNVGHLMTNSSIILNDG

SEQ ID NO: 116787 - protein, 270 aa, Unknown
  Bacterial polypetide isolated from the Sargasso Sea
RKLNPDRKYISKDGKGLKLHGRSLLLIRNVGHLMTNPSIILNDGSEIPEGIMDAFFTTIAAIHDLKRKRNSRTGSIYIVKPKMHGPEETAFTNTIFSKVEELLGLEKFTCKIGIMDEERRTSANLKECIRTLKNRVFFINTGFLDRTGDEMHTSMEAGPMIKKGDMKSSRWITAYENNNVDVGLKCGFSGKAQIGKGMWAMPDQMKEMMKEKVNHLKSGANCAWVPSPTAASLHALHYHQINIFEEQQKIKKREKAKLDDLLNIPIINKP

SEQ ID NO: 116788 - protein, 288 aa, Unknown
  Bacterial polypetide isolated from the Sargasso Sea
GDFKSKFEKEGKLFERKLNPNRSYISKDGKGLKLHGRSLLLVRNVGHLMTNPSILLSDGSEIPEGIMDAFITTAAALHDIKNKNNSRTGSVYIVKPKMHGPDETAFTDLIFSKVEEVLNLPKYTCKIGIMDEERRTSANLKECIRSLKNRVFFINTGFLDRTGDEMHTSMEAGPMIKKGDMKSSKWINAYENNNVDIGLNCGFSGKAQIGKGMWAMPDKMKDMMEQKTGHLKAGANCAWVPSPTAAALHALHYHEINIFNEQKKLIDREPAKLDDLLTIPIADRPNCL

SEQ ID NO: 116789 - protein, 291 aa, Unknown
  Bacterial polypetide isolated from the Sargasso Sea
MDCEDSVAAVDADDKTVVYSNWLGLMKGDLAESVNKGGSTFTRTMNPDREYTKADGTTLTLHGRSLLFVRNVGHLMTNDAILDQDGNEVPEGIMDAAVTSLIAMHNLNGNTSRKNTRTGSVYIVKPKMHGPEEVAFTTELFGRVEDMLGLPRNTLKVGIMDEERRTTVNLKACIKAASERVVFINTGFLDRTGDEIHTSMEAGAFIRKGEIKGAVWIGAYENNNVDIGLATGLKGRAQIGKGMWAMPDLMAAMLEQKIGHPMAGANTAWVPSPTAATLHALHYHKVNVAER

SEQ ID NO: 116790 - protein, 173 aa, Unknown
  Bacterial polypetide isolated from the Sargasso Sea
NWLGLMKGTLKSVFEKDGKTFERKLNPDRSYISKDNKKEKLHGRSLLLIRNVGHLMTNSAIILEDGSEIPEGIMDAFITTAAAIHDLKRKGNSRTGSIYIVKPKMHGPEETAFTDKIFTRVEEVLKLEKNTIKCGIMDEERRTSVNLKECIRTLKSRVFFINTGFLDRTGDEM

SEQ ID NO: 116791 - protein, 259 aa, Unknown
  Bacterial polypetide isolated from the Sargasso Sea
KYVREFFDKYIPINGISWKNISALKIKDKELKVLKGNNEYNLKDKNKFIGYRGDISKPEAVILKNNNLHFEIIINPKAFSAAHDIAGISDVIAESAVSTICDNEDSVAAVDAEDKVICYRNWLGLMKGDLKIQFKKKGKSLERKLNPDRSYISKEGKGLKLHGRSLLLIRNVGHLMTNSSIILKDGTEVPEGIMDAFITTTAALHDLKKKKNSRAGSIYIVKPKMHGPDETAFTDLIFSKVEELLGLKKYTCKIGIMDE

SEQ ID NO: 116792 - protein, 238 aa, Unknown
  Bacterial polypetide isolated from the Sargasso Sea
ILKDTRAFAAQQDHAGISDIIVESAVSTICDNEDSVAAVDSEDKIICYRNWLGLMRGDLKSKFEKDGKLYERKLNPNRSYISRDGKGLKLHGRSLLLVRNVGHLMTNPSIILNDGNEVPEGILDAFITTAAALHDLKKKNNSRTGSVYIVKPKMHGPEETAFTDLIFSKVEEVLGLKKYTCKIGIMDEERRTSSNLKECIRSLKNRVFFINTGFLDRTGDEIHTSMMAGPMIKKGEMK

SEQ ID NO: 116793 - protein, 317 aa, Unknown
  Bacterial polypetide isolated from the Sargasso Sea
QDCEDSVATVDAEDKVLAYRNWLGLMKGNLEDTFEKNGKTITRKLNPDKTYITSSGEYKLPGRSVMLIRNVGHLMTNPAILLKNGEEIPEGIMDAMITSLIAIHDIKINKMNSRTGSVYIVKPKMHGPDEVKFACDIFGAVEDALELERNTLKIGIMDEERRTTVNLKECIRMASERTVFINTGFLDRTGDEIHTAMELGPIIPKGEIKNAKWISAYENNNVKIGLECGLSGKAQIGKGMWAMPDLMNEMLQQKINHPKSGANTAWVPSPTAATLHALHYHEINVFDIQKDKSNDNNNYLSNILSVPVSKGYNWSQE

SEQ ID NO: 116794 - protein, 298 aa, Unknown
  Bacterial polypetide isolated from the Sargasso Sea
IGIMDEERRTSINLKECIRAAESRVAFINTGFLDRTGDEIHTAMQAGSFLKKADMKNAPWISSYEKRNVSIGLQCGLKGKAQIGKGMWAMPDLMAEMMKQKIGHPKSGANCAWVPSPTAATLHALHYHEVNVKEVQEDIMSSRLTGTLDDLLTLPLLKGANLSEDEIFREVENNAQGILGYVVRWIDQGIGCSKVLDINNIGLMEDRATCRISSQALANWIEHGIVSKEKALKVLKKMAKVVDQQNADDKNYIPMSGNEDSIAFKAARDLVFEGINQPSGYTEPILHRRRLEFKLKNN

SEQ ID NO: 116795 - protein, 320 aa, Unknown
  Bacterial polypetide isolated from the Sargasso Sea
RFALNATNARWGSLYDALYGTDMISESDGAIREGGYNPIRGNRVIAFAKNFLDETFPLKNGTFNKVVNFEFIKSEIAFTLEDNSKTVLLNKDQYVGYMDKGQGSYGLLFKNNNLHIEIQVDRSHPIGQDDPAGIKDILVESAITTIQDCEDSVAAVDAEDKIVVYRNWLGLMKGDLKRSFNKNGKYLTRELNGDRRYLLKNGKMILLPGRSLLLVRNVGHLMTNPAVKDQNSNEIPEGIMDAFFTICASIHDIVGNSIFKNSKTKSIYIVKPKMHGPEEVQFTCDLFSEIEDIFNLPRNTVKLGIMDEERRTTVNLKECI

SEQ ID NO: 116796 - protein, 251 aa, Unknown
  Bacterial polypetide isolated from the Sargasso Sea
EIPEGILDGFISSLCALHDFKSKQNSRAGSVYIVKPKMHGPEEVSFTNTLFEKVETVLGMEKYSIKVGIMDEERRTTVNLKECIRQVKDRIVFINTGFLDRTGDEMHTSFEAGPMIFKGEMKKSIWLNSYEDWNVDIGLSCGFSGKAQIGKGMWAMPDQMSNMMDQKISHPNSGANCAWVPSPTAATLHSLHYHKVNVFDVQNKLKARTKTKVENILEIPKADRPNWSIEDINRELENNAQGILGYVVRWI

SEQ ID NO: 116797 - protein, 262 aa, Unknown
  Bacterial polypetide isolated from the Sargasso Sea
QEVIKYVREFFDKHIPINGTSWKNIANLKVVNKDLIISKDDYEYKLKDVDKFVGHRGEANKPSAIIIRNNKLHFEIIINPKAFSAAHDIAGISDVIAESAISTICDNEDSVAAVDAEDKIICYRNWLGLMKGDLKIQFEKNGKKLERKLNPDRSYISKDGKGLKLHGRSLLLIRNVGHLMTNPSIILKDGSEIPEGIMDAFFTTAAALYDLKRKKNSRKGSIYIVKPKMHGPEETAFTDLIFSKVEDLFKLQKYTCKIGIMD

SEQ ID NO: 116798 - protein, 305 aa, Unknown
  Bacterial polypetide isolated from the Sargasso Sea
IDNEDSVAAVDGEDKVNCYRNWLGLMKGDLTANMEKNGKKFVRKLNPNRTYLSKDGKKISLHGRALLLNRNVGHLMTNPAIILKDGSEIPEGIMDAFVSTMCALHDFKNKNNSRTGSIYIVKPKMHGPEEVAFTDKLFGKVEETLGLKKYTMKVGIMDEERRTTVNLKECIRQVKDRIVFINTGFLDRTGDEMHTSFEAGPMIFKGDMKKSTWLNSYENWNVDIGLDCGFSGKAQIGKGMWAMPDQMANMMDQKIGHPKSGANCAWVPSPTAATLHSMHYHKVNVFKEQDKIKSRNKTNIQNILE

SEQ ID NO: 116799 - protein, 284 aa, Unknown
  Bacterial polypetide isolated from the Sargasso Sea
DITGLAVNNKKLSIYKENKEHNLSDLEKFIGHRGNAAKPNAIILKNNNLHLEIIINPRAFSAARDAAGISDIIVESAVSTICDHEDSVAAVDAEDKVTCYRNWLGLMKGNLKSIFEKNGKELERKLNPDRSYTSLNGEKLKLHGRSLLLVRNVGHLMTNPSITLNDGSEVPEGIMDAFITSAACIHDLKRKGNSREGSIYIVKPKMHGPEETEFANLIFTKVEEVLKLEKNTIKCGIMDEERRTSANLKECIRTLKDRVFFINTGFLDRTGDEMHTSMEAGPMI

SEQ ID NO: 116800 - protein, 258 aa, Unknown
  Bacterial polypetide isolated from the Sargasso Sea
IHTSMQAGPMLRKSDMKTTSWIQAYENRNVEVGLKCGLQGKAQIGKGMWAMPDQMSDMLNEKVQHPLAGANCAWVPSPTAATLHATHYHKINVQHRQDEIRSLAVQSSLDDLLQIPLQSGEKLTESEIQSEIENNCQGILGYVVRWVDQGIGCSKVPDIDNVQLMEDRATCRISSQSLSNWLCHNFVDHDLVVNTLKKMAAIVDSQNASDINYRPMSPTFDTEAFLAAYDLIFSGETQPSGYTEPILHRWRLELKRKM

SEQ ID NO: 116801 - protein, 267 aa, Unknown
  Bacterial polypetide isolated from the Sargasso Sea
VNLKECIRAAKDRVIFINTGFLDRTGDEIHTSMEAGPMIPKALMKQQPWINAYEDWNVDVGLETGFSGKAQIGKGMWAMPDEMLGMYESKSMHPEAGANCAWVPSPTAATLHAIHYHQVLVSERQETIKSRSKADLNDILTIPLLEDASSLSEKDIQDELDNNCQGILGYVVRWVDLGIGCSKVPDINNVGLMEDRATCRISSQHIANWLHHEICSEEQVIETMKKMAVIVDKQNEGDSEYTNMSPSYEGLAFSAACELALQGRIQP

SEQ ID NO: 116802 - protein, 272 aa, Unknown
  Bacterial polypetide isolated from the Sargasso Sea
ERRTSVNLKECIRTLKSRVFFINTGFLDRTGDEMHTSMEAGPMIKKGDMKKSKWIAAYEDNNVDVGLKCGFSGVAQIGKGMWAMPDKMKDMIDQKISHLEAGANCAWVPSPTAASLHAMHYHKLNIFEKHKKLNNNKINYIDDLLSIPIADRPNWSKEEINNELCNSAQTILGYVVRWVDQGIGCSKVPDINNVGLMEDRATLRISSQHIANWLHHGICSNRQVLEILKKMAKIVDKQNEGDPEYQKMSPNYDKSISFKAACELIFHGKSQP

SEQ ID NO: 116803 - protein, 294 aa, Unknown
  Bacterial polypetide isolated from the Sargasso Sea
QIIGFRKQKGKIFSLLFVNNNLHLDILFDQKGNLEVNNPDGNQDPLKIHDIFLESAISTICDHEDSVAAVDAEDKVLGYRNWLSLMKGNLTSKFRKNNKTIIRKLNSDREYLSLKGKKFKLHGRSLLLNRNVGHLMTNPAILLKDGSECPEGILDAFVTSAACLHDFKIKGNSRTNSIYIVKPKMHGPDECAFTNKIFEKVEKVLKLKKNQILCGIMDEERRTTINLKECIRVLKKRVFFINTGFLDRTGDEIHTSMEIGPMIKKGDMKSSKWINAYENNNVDVGLACGFSGKA

SEQ ID NO: 116804 - protein, 212 aa, Unknown
  Bacterial polypetide isolated from the Sargasso Sea
EKEMWAMPDQMANMMEQKIGHPKSGANCAWVPSPTAATLHSMHYHKIDVFKEQDKIKSRGKAKLVDILEIPKADRPNWSMEDINRELENNAQGILGYVVRWIDQGVGCSKVPDINNVGLMEDRATLRISSQHMANWLHHGICNKEQVLKIMKKMAAIVDKQNAQDKNYEPMSKNFEKSIAFMAACDLVFKGKDQPSGYTEPLLHKRRLEKKH

SEQ ID NO: 116805 - protein, 314 aa, Unknown
  Bacterial polypetide isolated from the Sargasso Sea
GCFCIPLCALHDFKNQNNSRTGSVYIVKPKMHGPEEVAFTNKLFGKVEEVLGIKKYSIKVGIMDEERRTTVNLKECIRQVKNRIVFINTGFLDRTGDEMHTSFESGPMIFKGEMKKSTWLNTYENWNVDIGLSCGFSGKAQIGKGMWAMPDQMANMMEQKIGHPKSGANCAWVPSPTAATLHSMHYHKIDVFKEQDKIKSRSKAKLEDILEIPKADRPNWSMDDINRELENNAQGILGYVVRWVDQGVGCSKVPDINNVGLMEDRATLRISSQHIANWLHHGVCKKDQVMDVMKKMAKIVDDQNKNDPSYQKCL

SEQ ID NO: 116806 - protein, 241 aa, Unknown
  Bacterial polypetide isolated from the Sargasso Sea
KSTWLGTYENWNVDIGLSCGFSGKAQIGKGMWAMPDQMANMMDQKIGHPKSGANCAWVPSPTAATLHSMHYHKVNVFDEQNIIKLRKKAKLDDILEIPRADRPNWSEEDITRELENNAQSILGYVVRWIDQGIGCSKVPDINNVGLMEDRATLRISSQHIANWLHHKICTKDQVLNVMKKMAKIVDGQNKNDLNYKSMSENFDNSTAFSAACDLVFKGRYQPSGYTEPLLHKKRLEKKSIH

SEQ ID NO: 116807 - protein, 292 aa, Unknown
  Bacterial polypetide isolated from the Sargasso Sea
RSLMLVRNVGHLMTNPAILDKDGNEVPEGIMDAMFTICIAMHDINGKGEIKNSRTGSIYIVKPKMHGPDEVQFTCDLFSAVEKALNLDQLTVKVGIMDEERRTTVNLKECIRVAKERIIFINTGFLDRTGDEIHTSMEAGPMIPKADMKQQPWILAYEDWNVDSGLETGFKGNAQIGKGMWPMPDEMLNMYATKIMHPESGANCAWVPSPTGATLHAMHYHQILVSNRQQSILERPKASIDDILTIPLMENPEELSAEDIQKELDNNAQGILGYVVRWIDQGVGCSKVPDIN

SEQ ID NO: 116808 - protein, 291 aa, Unknown
  Bacterial polypetide isolated from the Sargasso Sea
VGHLMTNPAITLNDGSEVPEGILDAFITSAACIHDLKRKGNSREGSIYIVKPKMHGPEETEFTNLIFTKVEEVLKLEKNTIKCGIMDEERRTSANLKECIRTLKDRVFFINTGFLDRTGDEMHTSMEAGPMIKKGDMKESKWIKTYEDNNVDIGLKCGFSGVAQIGKGMWAMPDKMNEMMKQKIGHVNAGANCAWVPSPTAAALHVMHYHEVNVFEKQKAILKREPSKLSDLLTIPIADRPNWSIDEINTEISNSAQTILGYVVRWIDQGIGCSKVPDINDIGLMEDRAPL

SEQ ID NO: 116809 - protein, 185 aa, Unknown
  Bacterial polypetide isolated from the Sargasso Sea
RKLNPHRSYISKDGKGLKLHGRSLLLVRNVGHLMTNPSILLSDGSEIPEGIMDAFITTAAALHDIKNNNNSRTGSVYIVKPKMHGPDETAFTDLIFSKVEEVLNLPKYTCKIGIMDEERRTSVNLKECIRSLKNRVFFINTGFLDRTGDEMHTSMEAGPMIKKGDMKSSKWINAYENNNVDIGLS

SEQ ID NO: 116810 - protein, 308 aa, Unknown
  Bacterial polypetide isolated from the Sargasso Sea
KDENGDEVPEGIMDGFFTICASIHDLIGNGLYKNSKTKSIYIVKPKMHGPEEVQFTCDLFSAIEDIFDLPRNTVKLGIMDEERRTTVNLKECIEVAKHRVIFINTGFLDRTGDEIHTSMEAGPMVTKGLMKEQKWINAYENWNVDIGLETGFKGNAQIGKGMWAMPDEMLEMYKSKTIHPKSGANCAWVPSPTAATIHAIHYHQISVQDEQDKIIKREKAKLEDILSIPLISSDSVPSPQEIQKELDNNAQGILGYVVRWVDQGVGCSKVPDINDVGLMEDRATCRISSQHISNWLYHDLCSEEQVID

SEQ ID NO: 116811 - protein, 130 aa, Unknown
  Bacterial polypetide isolated from the Sargasso Sea
VTQAQTILGYVVRWVDQGIGCSKVPDINNVGLMEDRATLRISSQHIANWLHHGICSNRQVLEILKKMAKIVDKQNHGDPEYQNMSPNYDKSISFKTACELIFHGKSQPSGYTEPLLHLNRLIKKVNYRNL

SEQ ID NO: 116812 - protein, 216 aa, Unknown
  Bacterial polypetide isolated from the Sargasso Sea
GTFQNSRSGSMYIVKPKMHGPEEVALTVELFGRIEKALGMEEGTLKIGIMDEERRTTVNLKECIRVARDRVIFINTGFLDRTGDEIHTSMKAGPMVRKTDMKGQKWIQSYEDWNVDVGLACGFSGKAQIGKGMWAMPDEMADMVKNKIGHPMAGANCAWVPSPTAATLHAIHYHRVNVLERQKELMEREPANLDDILKIPLEEQPNWSEEEIRKEL

SEQ ID NO: 116813 - protein, 270 aa, Unknown
  Bacterial polypetide isolated from the Sargasso Sea
GNSRTNSIYIVIPKMHGPDECAFTDKIFKNVEEVLKLKKNQILCGIMDEERRTTINLKECIRVLKKRVFFINTGFLDRTGDEIHTSMEIGPMIKKGDMKSSKWIKAYENNNVDIGLACGFSGKAQIGKGMWAMPDLLKEMMEQKISHPISGANCAWVPSPTAAAIHAIHYHAVNVFSIHQKIKFRESAKLDDLLTIPVDNKKKWSKEEIEKELKNNAQGILGYVVRWVDQSVGCSKVPDINGIGLMEDRATCRISSQHIANWLHHGICSK

SEQ ID NO: 116814 - protein, 284 aa, Unknown
  Bacterial polypetide isolated from the Sargasso Sea
MGQINLYDLWRGQIDFLDPNNGKEYKLNPDPAVLIVRPRGWHLEEAHIEIDGVRISGGIFDFAVYLFHNHEKLKENGTGPYFYLPKMETYLEARLWNEVFVYAQEKLGIENGTCKATILIETLPAAFQMDEILYELKDHIVGLNCGRWDYIFSYIKRLALNPNYILPDRSQVIMGDAFLNSYSLLLIKTCHKRGAFAMGGMAAQIPVKNNDEENDKAFEKVRNDKEREVNNGHDGTWVAHPGLVPVAMEIFDKQLSGDNQLDVSLDNITITQDDLLEVHKGQRT

SEQ ID NO: 116815 - protein, 308 aa, Unknown
  Bacterial polypetide isolated from the Sargasso Sea
MNGEKSKLHGRSLLLVRNVGHLMTNPAITLNDGSEVPEGIMDAFITSAACIHDFKRKGNSRTGSIYIVKPKMHGPEETEFTNLIFTKVEEVLKLEKNTIKCGIMDEERRTSANLKECIRTLKDRVFFINTGFLDRTGDEMHTSMEAGPMIKKGDMKESKWIKTYEDNNVDVGLKCGFSGVAQIGKGMWAMPDKMNEMMEQKIGHVNAGANCAWVPSPTAAALHVMHYHEVNIFEKQKALLKREPSKLSDLLTIPIADRPNWSVDEINTEISNSAQTILGYVVRWIDQGIGCSKVPDINDIGLMEDRAT

SEQ ID NO: 116816 - protein, 312 aa, Unknown
  Bacterial polypetide isolated from the Sargasso Sea
TNQFCGYQGSPDQPSGVLLKNHNLHAEIQIDASHSVGATDPAGIKDVLLESAITTIQDCEDSVAAVDGEDKVTVYRNWLGLMKGDLQETFLKGGAEMTRSLNPDRSYIAPDGSNHSLSGRSLMLVRNVGHLMTNPAILDQNDNEVPEGILDAMFTICIAMHDLNGNSIVKNSQAGSIYIVKPKMHGPDEVQFTCDLFSAVEKSLNLNQLTAKVGIMDEERRTTVNLKECIRVAKDRVIFINTGFLDRTGDEIHTSMEAGPMIPKAQMKQQPWILAYEDWNVDCGLETGFKGNAQIGKGMWPMPDEMLNMYET

SEQ ID NO: 116817 - protein, 297 aa, Unknown
  Bacterial polypetide isolated from the Sargasso Sea
LKSQQQNVDKEIARQAGPQLVVPVKNARFALNAVNARWGSFYDALYGTDVISEDDGAERAGGYNERRGARVIDFAKSFLDQTCPLAEGSHKEATGYFVEEGVLKINLGSVVTELNDGTKFQGYEVEGEQLKRVLLLNHDLHIEIQFDRNTPVGSADQAGIADVILEAAVTTIQDCEDSVAAVDAEDKVEIYRNWLGLINGDLSDTFIKEGNPKTRVLRRDKEFISPSGENFSLPGRSMLLVRNVGHLMRNSAIKHDGAEIYEGILDAVVTSAVAVLDVENRNLLSNSRTGSVYIVKL

SEQ ID NO: 116818 - protein, 311 aa, Unknown
  Bacterial polypetide isolated from the Sargasso Sea
AGFILNAANARWISLYDSLYGADIISETQGALKGKTYNPIRGKKVIEYSRNILDKYIPLKSLSWKDLEKIPEVKNNKLNLKLKHPNQFVGYNKKSSYLSSLLFVNNNLHIDILFDQGGNMEINNPDGNQDKIKIHDIILESAITTICDHEDSVAAVDAEDKILGYRNWLGLMKGDLKEEFIKNGKNNLRKLNPDRNYTSPLGKKFKLHGRSLLLNRNVGHLMTNPAILLKDGSECPEGILDAFITSVACLHDFKKKMNSKTNSIYIVKPKMHGPEECKFTDIIFNKVEKVLNLKKNQILIGIMDEERRTSV

SEQ ID NO: 116819 - protein, 128 aa, Unknown
  Bacterial polypetide isolated from the Sargasso Sea
SNSAQTLLGYVVRWIDQGIGCSKVPDINNVGLMEDRATLRISSQHIANWLHHGVTTKMQVIEIMKEMAKIVDKQNQNDPQYIKMSNDFENSIAFKTACDLIFNGTNQPSGYTEPLLHLNRLKKKTLKN

SEQ ID NO: 116820 - protein, 293 aa, Unknown
  Bacterial polypetide isolated from the Sargasso Sea
KDKVSSIRKLSKNISYKKPDGKTHFMKGLSLLLIRNVGHLMSSSSIIDENKNEIGEGIIDTLLSALCFLKTINISNNSEYKSLYIVKPKMHGPEEVEFSIDTFTKIEELLTIPKNTIKIGIMDEERRTTLNLKECIRAAKDRVFFINTGFLDRTGDEIHTSMEAGTMIKKNEMKNVGWIKAYENWNVEIGLNCGFSGLAQIGKGMWAMPDMMSKMMEEKIVHCQSGANTAWVPSPTAATLHALHYHKVDVMELHKKNIKKRIATIDDLIDLPIVNNPNWTEKEVKTELENNIQ

SEQ ID NO: 116821 - protein, 248 aa, Unknown
  Bacterial polypetide isolated from the Sargasso Sea
KKGDMKSSKWISAYENINVEIGLKCGFSGKAQIGKGMWAMPDKMKDMMDQKTSHLKAGANCAWVPSPTAAALHALHYHDINIFDEQKKILDRDKAKLDDLLTIPTANRPNWSVEEINKEICNSAQTLLGYVVRWVDQGVGCSKVPDINNVGLMEDRATLRISSQHIANWIHHGITTKLQVTEIMKDMAKIVDDQNKNDPNYIRMSENYDKSIAFKTACDLVFMGKEQPSGYTEPLLHLNRIAKKSSLN

SEQ ID NO: 116822 - protein, 111 aa, Unknown
  Bacterial polypetide isolated from the Sargasso Sea
VGCSKVPDITDVGLMEDRATLRISAQHIANWLHHGICSEEQVMETMQRMAVVVDQQNAGDPAYCNLAPDFDASIAFQAACDLVFKGRAQPNGYTELVLHARRQEAKAKFAA

SEQ ID NO: 116823 - protein, 298 aa, Unknown
  Bacterial polypetide isolated from the Sargasso Sea
LKDGTEVPEGIMDAFITTAAAIHDLKKKRNSRKGSIYIVKPKMHGPDETAFTDLIFTKVEEVLNLKKYTCKIGIMDEERRTSANLKECIRTLKNRVFFINTGFLDRTGDEMHTSMEAGPMIKKGDMKLSKWIKAYENNNVDIGLKCGFSNKAQIGKGMWAMPDKMKEMMEDKISHLKSGANCAWVPSPTAASLHALHYHQINIFDEQKKILNREQSKLDDLLSIPIADRPNWSVEEINKEISNSAQTLLGYVVRWIDQGIGCSKVPDINNIGLMEDRATLRISSQQYCKLDTSWDHNK

SEQ ID NO: 116824 - protein, 269 aa, Unknown
  Bacterial polypetide isolated from the Sargasso Sea
MKKYSLKVGIMDEERRTTVNLKECIRQVKNRIVFINTGFLDRTGDEMHTSFEAGPMIFKGEMKKSTWLNSYENWNVDIGLKCGFSGKAQIGKGMWAMPDQMANMMEQKISHPKSGANCAWVPSPTAATLHSIHYHKVNVFDEQDKIKNRKKAQVKDILEIPIADRPNWSTEDINRELENNVQGILGYVVRWVDQGIGCSKVPDINNVGLMEDRATLRISSQHIANWLHHGICSKEKVTEVMKKMAKIVDNQNINDPEYIKMSDNFENSI

SEQ ID NO: 116825 - protein, 302 aa, Unknown
  Bacterial polypetide isolated from the Sargasso Sea
KFTCDLFAAVEKAVGLDPLTVKVGIMDEERRTTVNLKECIKVAKDRVIFINTGFLDRTGDEIHTSMEAGPFIKKSEMKQQPWIAAYEDWNVDTGLETGFKGKAQIGKGMWPMPDEMLNMYETKTMHPEAGADCAWVPSPTAATLHALHYHQLNVPSVQEDLIKRAKASLEDILEIPLLKNPEELSAEEIQAELDNNAQGILGYVVRWVDQGVGCSKVPDINNVGLMEDRATCRISSQHIANWLHHGLTNEDQVIETMKKMAKVVDDQNKGDPKYENMSPDYSGYAFKAACALVLEGRNQPSG

SEQ ID NO: 116826 - protein, 271 aa, Unknown
  Bacterial polypetide isolated from the Sargasso Sea
MLKKNGLHLDIQLDRNHPVGKDHPAGICDILLESAVTTIQDCEDSVAAVDASDKVHVYRNWLGLMKGDLSAKLDKGGKMITRTLNPDRKYKTPEGSEIVLPGRSLMLVRNVGHLMTTDAVLDEQGNEIFEGMLDGMMTSLISLYDIRGLGTFQNSRSGSMYIVKPKMHGPEEVALTVELFGRIEKVLGMEEGTLKIGIMDEERRTTVNLKECIRMARDRVIFINTGFLDRTGDEIHTSMKAGPMVRKTDMKGQKWIQSYEDWNVDVGLACG

SEQ ID NO: 116827 - protein, 302 aa, Unknown
  Bacterial polypetide isolated from the Sargasso Sea
VATVDAEDKVLAYKNWLGLMKGDLEDTFEKKGKILTRKLNQDKVYTTTRGEYTLPGRSVMLIRNVGHLMTNPAILMKNGEEIPEGIMDAMITSLIAIHDIKNSKMNSRTGSVYIVKPKMHGPEEVKFACDVFSAVEEALNLDKYTLKIGIMDEERRTTVNLKECIRAAKERTVFINTGFLDRTGDEIHTAMEAGPIIPKGDIKNAKWISAYENNNVKIGLDCGLSGKAQIGKGMWAMPDLMDEMLKQKINHPKSGANTAWVPSPTAATLHALHYHEVDVFNIQKQKSNDGNNYLYDILDVPI

SEQ ID NO: 116828 - protein, 244 aa, Unknown
  Bacterial polypetide isolated from the Sargasso Sea
WIKAYENNNVKIGLECGFSGKAQIGKGMWAAPDKMQDMLDQKIGHPKSGANCAWTPSPTAATLHAMHYHKVNVFDVHKKIEKKIKFDLDRLLSIPIISKPIWNMDEIKNELENNCQGILGYVVRWINSGIGCSKVPDINNIGLMEDRATLRISSQHIANWLHHNICTTFQVLETLKKMAKIVDDQNKNDPKYEKMSANFDKSIAFKTACDLIFKGKDQPSGYTEPLLHANRHLKKLNLYPVFKS

SEQ ID NO: 116829 - protein, 304 aa, Unknown
  Bacterial polypetide isolated from the Sargasso Sea
LKKFFIKVGIMDEERRTTVNLKECIRKVKNRVVFINTGFLDRTGDEMHTSFEAGPMIFKGEMKKSTWLNTYEDWNVDIGLLCGFSGKAQIGKGMWAMPDRMADMMKQKIGHPKSGANCAWVPSPTAATLHAIHYHELNVFKKQKELHSRKKAKLQNILKIPKADRPNWSVDSINKELENNAQGILGYVVRWVDQGIGCSKVPDINNIGLMEDRATLRISSQHIANWLHHNICTKEQVMNVMKKMASVVDKQNINDKNYLAMSQNFEKSVAFSAACDLVFKGREQPSGYTEPLLHAKRIEKKSNH

SEQ ID NO: 116830 - protein, 265 aa, Unknown
  Bacterial polypetide isolated from the Sargasso Sea
MNARYTLNAANARWVSLYDSLYGTNIIESDEGGSERYDPLRGQEVIKYVREFFDKYIPIKGTSWKNIASLKVVNKNLIISKDDYEYELVDENKFVGHRGDSKKPSAIIIKNNNLHFEIIINPKAFSAAHDIAGISDVIAESAITTICDNEDSVAAVDAEDKVVCYKNWLGLMKGDLKIQFEKNGKNLERKLNPDRSYISKNGKELKLHGRSLLLIRNVGHLMTNPSIILKDGGEIPEGIMDAFITTAAALHDLKRKKNSKNGSIY

SEQ ID NO: 116831 - protein, 315 aa, Unknown
  Bacterial polypetide isolated from the Sargasso Sea
NGSYNPEGNQDKIKIHDIFLESAISTICDHEDSVAAVDAEDKVLGYRNWLGLMKGNLKVEFIKNGKKNLRKLNLDRTYVSTKGKKLKLHGRSLLLNRNVGHLMTNPAILLKDGSECPEGILDAFVTSLACLHDFKKRGNSRVNSIYIVKPKMHGPEECLFTQLIFESVEKVLNLKKNQILCGIMDEERRTSINLKECIRALKNRVFFINTGFLDRTGDEIHTSMEVGPMIKKGDMKLSKWILAYENNNVDIGLDCGFSGKCQIGKGMFAAPDLMREMMKQKIAHPLAGANCAWVPSPTAAALHAIHYHEVDVFVK

SEQ ID NO: 116832 - protein, 263 aa, Unknown
  Bacterial polypetide isolated from the Sargasso Sea
GWKISPNGELKELILSKNNLRCRIVINKNDIIGKNDTANISEILIESAISTILDCEDSVATVDADDKILAYQNWLGLVKGNLESNFLKNNKNIKRVINKDFKFTGTDQKEKILKGRSLMLIRNVGHLMTTPAILNKDNKEIGEGIMDAIITTLIATYDFIKKENKNSNYNSIYIVKPKMHGPEEVKFTDELFSQIEQLLDLPNSTIKIGIMDEERRTSVNLKECIRAAQSRVAFINTGFLDRTGDEIHTGMQAGSFMKKNDMK

SEQ ID NO: 116833 - protein, 157 aa, Unknown
  Bacterial polypetide isolated from the Sargasso Sea
AKLNDVLTIPIADRPNWSVEEITKELENNAQGILGYVVRWIDQGVGCSKVPDINNVGLMEDRATLRISSQHIANWLHHGVCSKEQVLKTMKKMAEIVDKQNIRDPDLKGYASYKAMSDNYDKSTAFKAACDLVFMGRNQPSGYTEPILHLNRLLKKI

SEQ ID NO: 116834 - protein, 303 aa, Unknown
  Bacterial polypetide isolated from the Sargasso Sea
CDFEDSCSPTWNNIIQGHLNVRDAVEESIEFTRESDGKVYRLNDDIATLIIRPRGWHLDEKHITINDQPISASLFDFGVYLSNNFEALSKKGTGPYFYLPKLENHIEARLWNDVFLHAQDFLNIDRGTIKATVLIETITAAFEMDEIIFELKDHSAGLNCGRWDYIFSFIKKFRNHEKFLLPNRTEVTMGRHFLKSYVELLIQTCHKRNVHAMGGMAAQIPIRGDEEQNRIAMDKVASDKSREANAGHDGTWIAHPGLSEVAMNAFNQVMGKSANQISNKRDDVSVCAEDLIKVPIGSITEEG

SEQ ID NO: 116835 - protein, 308 aa, Unknown
  Bacterial polypetide isolated from the Sargasso Sea
LGLMKGDLSESFKKNGKQITRILKDDREYKDIEGNTFSLPGRSLLLVRNVGHLMQNPSVILENGDEVYEGILDAMFTICISLYDLKNLNTLSNSKNKSMYIVKPKMHGSEEVAFTCDLFEAIEQIFNLEKNTVKVGIMDEERRTTINLKSCIEKAKERIIFINTGFLDRTGDEIHTSMEAGAMVPKSEMKSQAWINAYEDWNVDIGISCGLNGKAQIGKGMWAMPDEMKEMLMNKIVHPLSGATCAWVPSPTAATLHAMHYHEVDVLTRQDELSSRQLADIDKILTIPLLKEELDKDLIRNEIANSAQ

SEQ ID NO: 116836 - protein, 300 aa, Unknown
  Bacterial polypetide isolated from the Sargasso Sea
RRLHGSPENPNSILLKKNGLHLDIQLDRNHPVGKDHPAGICDILLESAVTTIQDCEDSVAAVDASDKVHVYRNWLGLMKGDLSAKLDKGGKMITRTLNPDRKYKTPEGSEMVLPGRSLMLVRNVGHLMTTDTVLDEQGNEIFEGMLDGMMTALISLYDIRGLGAFQNSRSGSMYIVKPKMHGPEEVALTVELFGRIEKALGMEEGTLKIGIMDEERRTTVNLKECIRAARDRVIFINTGFLDRTGDEIHTSMKAGPMVRKTDMKGQKWIQSYEDWNVDVGLACGFSGKPKSARACGRCRM

SEQ ID NO: 116837 - protein, 264 aa, Unknown
  Bacterial polypetide isolated from the Sargasso Sea
VEEGDDFSLETSKVDPEIAGIAGPQLVVPITNARYALNAANARFGSLYDAFYGTDAIPAEETQVSGYDPVRGGKVIARVRAFLDEAFPLDNVSWTEVTGLSVSNGALVAQLGDVSRTLTNTTGFVGHIGNADAPQALVLKNNGLHVLIRVDREGVIGRNDAAGINDVIAESAMSSIMDCEDSVACVDAEDKVLAYRNWRGLMDGTLEENFEKGGRTVTRKLADDISYTAADGSAASLKARALMLVRNVGHLMTNPAIRLSDGSE

SEQ ID NO: 116838 - protein, 307 aa, Unknown
  Bacterial polypetide isolated from the Sargasso Sea
IKTLNGEDKILKGRSLMLVRNVGHLMTTPVILNKDNIEISEGIMDGVITALIAIHDLKKTSNQNSIYNSIYIVKPKMHGPEEVEFTVNLFKRIEEILNLPNNTIKVGIMDEERRTSINLKECIRVAKSRLAFINTGFLDRTGDEIHTSTQAGSFITKADMKNAAWIKSYEDRNVDIGLQCGLKGKAQIGKGMWAMPDLMLEMVEQKISHPKAGANCSWVPSPTAATLHAMHYHYVNVFDIQDEIKAKGKRGTLNDLLTLPLLNKKNLSEEEINKEIENNAQGILGYVVRWIDQGIGCSKVPDINNMD

SEQ ID NO: 116839 - protein, 275 aa, Unknown
  Bacterial polypetide isolated from the Sargasso Sea
VPLKNTKWKNLSQTIKINKNKINLKLKNPKQFIGYRKKSNKLSSLLFINNNLHIDILFDLTGKMEINNPDGNQDKIKIHDIILESAISTICDHEDSVAAVDAEDKILGYRNWLGLMKGNLKAEFSKKGKKIIRRLNNDREYVSNKGKKFKLHGRSLLLNRNVGHLMTNPAILLKDGSECPEGILDAFITSLACLHDFKRKGNSRTNSIYIVKPKMHGPEECSFTNQIFEKVEKVLSLKKYQILCGIMDEERRTSINLKECIRSLKNRVFFINTGF

SEQ ID NO: 116840 - protein, 298 aa, Unknown
  Bacterial polypetide isolated from the Sargasso Sea
MTERMTVGDLQVATCLYDFVNEEALPGTEIDEAEFWHAVNDILRDLAPKNRELLARRDDLQSRIDAWHRNRRGQEFNVGSYKSFLQEIGYLVDEGADFTVETDRVDPEISAIAGPQLVVPVMNARYALNAANARWGSLYDALYGTDVIPEDDGADMGKSYNPVRGTKVIAYARTFLDQAAPLDGASHADAAGYSVENGKLSVALTGGSSVGLADEENFAGYTGDPGSPEKLAFVNNGIHFEICIDWDHPIGMDDAAGVADVVLESAITTIMDCEDSIAAVDAEDKVVVYRNWLGLMRG

SEQ ID NO: 116841 - protein, 302 aa, Unknown
  Bacterial polypetide isolated from the Sargasso Sea
DGKLVVKKGSVKDYLKNNSQFIGFNGDKNNPKSILLKNNNLHIDIVIDPNSVVGKNDQASISDVVVESALSTIIDNEDSVAAVDAEDKVKCYRNWLGLMKGDLVANFEKNGKKFTRRLNPDKTYISKEGKKIILHGRALLLNRNVGHLMTNPSIILRDGSEIPEGILDGFVSNLCALHDFKNKKNSRTGSTYIVKPKMHGPKEVAFTDKLFEKIEEVLGMKKYSIKVGIMDEERRTTVNLKECIRQVKNRIVFINTGFLDRTGDEMHTSFEAGPMIFKGDMKKSKWLNAYENWNVDVGLECG

SEQ ID NO: 116842 - protein, 316 aa, Unknown
  Bacterial polypetide isolated from the Sargasso Sea
SLACLHDFKNKGNSRVNSIYIVKPKMHGPEECDFTNLIFEDVEKVLNLKKYQILCGIMDEERRTSVNLKECIRALKNRVFFINTGFLDRTGDEIHTSMEVGPMIKKGDMKSSKWILAYENNNVDVGLECGFSGKCQIGKGMYPAPDLMHQMMKQKIIHPLSGANCAWVPSPTAAALHALHYHEIDVFMKQKELSKRKPAKLSDLLTIPIAKKPNWSMEEINKELKNNAQGILGYVVRWVDQSVGCSKVPDINGIGLMEDRATCRISSQHIANWLHHGICSKKHVLEIMKKMAKVVDNQNLKDPKYERAFSLHTKSK

SEQ ID NO: 116843 - protein, 302 aa, Unknown
  Bacterial polypetide isolated from the Sargasso Sea
MKKNTIKIGIMDEERRTSANLKECIRNVKRRVVFINTGFLDRTGDEIHTSMESGPVIKKGDIKNSDWIKAYENNNVVVGLECGFSGKAQIGKGMWAAPDRMADMLSEKIGHPSSGANCAWTPSPTAATLHATHYHKVNVFKVHKKLSNKRKFDLDNLLKLPIIRGPNWSMDEIKTELENNCQGILGYVVRWIDSGVGCSKVPDINNIGLMEDRATLRISSQHIANWLHHNICTPNQVLETLKKMAKIVDDQNKNDPEYKKMSDNFDNSIAFKTACDLVFKGKDQSSGYTEPLLHLNRSIKKN

SEQ ID NO: 116844 - protein, 194 aa, Unknown
  Bacterial polypetide isolated from the Sargasso Sea
MAGANCAWVPSPTAATLHALHYHKVDVPARQAELAGRAKASREDILSVPVAVRPNWSEDDIRSELRNNAQGILGYVVRWVDQGVGCSKVPDINHVGLMEDRATLRISSQHIANWLHHGVCSKTLVREVMEEMAAVVDRQNEGDAGYNPMAPMFESSVAFKAACDLVFRGREQPSGYTEPVLHARRLEKKAVDAV

SEQ ID NO: 116845 - protein, 321 aa, Unknown
  Bacterial polypetide isolated from the Sargasso Sea
SPEYFWSSFQEILNNFSQKNKELLDKRKDLQEKIDHWHIENKNKDFEIGQYKTFLTDIGYLHPRSNNFSIKTSNVDPEVRKIAGPQLVVPVMNARFALNATNARWGSLYDALYGTDMISESEGAIREGGYNPIRGDRVIAFAKNFLDETFPLENGTFNKATNFEFIDSEIVVTLVDGSKTHLLNKDQYIGYMDKGEGAYGLLFKNNNLHIEIQVDRSHPIGQDDLAGIKDILVESAITTIQDCEDSVAAVDDEDKIIVYRNWLGLMKGDLKRSFNKNGKYLTRELNGDRRYLLKNGKMILLPGRSLLLVRKCWSFDDKSCY

SEQ ID NO: 116846 - protein, 284 aa, Unknown
  Bacterial polypetide isolated from the Sargasso Sea
AGGYNERRGALVIDFAKGFLDESCPLKTGSHKEATGYSVEEGALKVHLGAKTTELSDGSKFKGYRGEKAQPGSVLLLNNDLHIEIQFDKESPIGSTDIAGIKDIMLEAAITTIQDCEDSVAAVDAEDKVEIYRNWLGLINGDLSDTFIKGGSPKTRVLQRDREFSSPIDEKLHLPGRSMLLVRNVGHLMRNGAIKEDNGAEVYEGIMDAVVTSAAAVLDVEDKNLLPNSRTGSVYIVKPKMHGPKEVKFTSDLFEAVEELLGLRRNTLKVGIMDEERRTTLNLK

SEQ ID NO: 116847 - protein, 222 aa, Unknown
  Bacterial polypetide isolated from the Sargasso Sea
ETGFKGRAQIGKGMWAMPDEMLGMYENKSMHPEAGANCAWVPSPTAATLHAIHYHQISVSDRQEELSSRNKASLEDILSIPILENPEDLTDEEIQSELDNNCQGILGYVVRWVDLGVGCSKVPDINNVGLMEDRATCRISSQHIANWLHHGICSKDQVIDTMKKMAAIVDEQNSGDPEYTNMSPHFDGLAFSAAVDLAVEGRNQPSGYTEPILHAKRLEYKS

SEQ ID NO: 116848 - protein, 304 aa, Unknown
  Bacterial polypetide isolated from the Sargasso Sea
IKKRKTLQTKIDDWHIKNKSKEFKLEEYKNFLREIGYIQEEGPDFKIKTSNIDDEISSIAGPQLVVPIMNARYTLNAANARWVSLYDSLYGTNIIESEEGGSERYDPNRGQEVIKYVRELFDKIIPINKTSWKNISSLKVSNKNLVISKGEKEYKLKDLNKFVGHRGDANKPSAIILKNNNLHFEIIINPKAFSAAHDIAGISDVIAESAISTICDNEDSVAAVDAEDKIVCYKNWLGLMKGDLKIQFEKNGKKLERKLNPDRSYISRDGKGLKLHGRSLLLIRNVGHLMTSPSIILKDGKEIP

SEQ ID NO: 116849 - protein, 280 aa, Unknown
  Bacterial polypetide isolated from the Sargasso Sea
EVGKNDKANISDIIMESALSTIVDNEDSVAAVDAEDKVKCYRNWLGLMKGDLVANFEKNGKKILRKLNPDRTYNSKEGKKITLHGRALLLNRNVGHLMTNPSIILKDGSEIPEGILDAFISNLCALHDFKNKKNSRTGSTYIVKPKMHGPEEVAFTNKLFENVEKTLGIKKYSIKVGIMDEERRTTVNLKECIREVKNRIVFINTGFLDRTGDEMHTSFEAGPMIFKGEMKKSIWLNTYENWNVDVGLSCGFSGKAQIGKGMWAMPDQMSNMMEQKIGHP

SEQ ID NO: 116850 - protein, 284 aa, Unknown
  Bacterial polypetide isolated from the Sargasso Sea
MRLFLGTNISKDEFWKGLSSVTHELNPKNIELLRERKKLQMDIDRWHLENYQNEFDIKKYKSYLEDIGYIKKQGPNFRIKTENIDQEVSSIAGPQLVVPIMNARYALNAANARWMSLYDSLYGTDVISSEESISERYDPERGLQVIRYTKKFLDEHFKLKNSSWNKVDKISIKDHKLELHTDKGNTELLHSDKYVGYRLDKQKISAIILKNNKLHIEIIINPSAFSAKGDPAGISDIIVEAAISTICDHEDSVAAVDAEDKITGYRNWLGLMKKDLVAVFEKDG

SEQ ID NO: 116851 - protein, 247 aa, Unknown
  Bacterial polypetide isolated from the Sargasso Sea
VFKWIKAYENNNVEVGLSCGFSGKAQIGKGMWAMPDLLHDMMNQKISHPESGANCAWVPSPTAAAIHSLHYHQVDVFSKQNEIMKRKKAKLDDLLEIPINSPKNKWSKSQISNELKNNAQGILGYVVRWIDQSVGCSKVPDINGIGLMEDRATCRISSQHIANWLHHGVCSKKQVLEIMKKMAKIVDNQNLKDKSMKGQAPYQSMGKNYHQSIAFKTACDLVFHGKSQPSGYTEPLLHFNRIMKKSI

SEQ ID NO: 116852 - protein, 314 aa, Unknown
  Bacterial polypetide isolated from the Sargasso Sea
IICYRNWLGLMKGDLKSKFEKEGKLFERKLNPNRSYISKDGKGLKLHGRSLLLVRNVGHLMTNPSIILKDGSEVPEGIMDAFITTAAALHDIKKKTNSRTGSIYIVKPKMHGPDETAFTDLLFSKVEEVLGLPKYTCKIGIMDEERRTSANLKECIRSLKNRVFFINTGFLDRTGDEMHTSMEAGPMIKKGDMKTSKWITAYENNNVDIGIKCGFSGKAQIGKGMWAMPDKMKDMMEQKTGHLKAGANCAWVPSPTAAALHALHYHEINIFDEQQKIKNREHARLDDLLTIPTADRPNWSVDEINKEISNSAQT

SEQ ID NO: 116853 - protein, 225 aa, Unknown
  Bacterial polypetide isolated from the Sargasso Sea
LSGKAQIGKGMWAMPDLMDEMMKQKISHPLSGANCAWVPSPTAASLHALHYHEVDVFAKQKELLKRKPVKLSDILTIPLEKKPNWSKEEITNELKNNAQGILGYVVRWVDQSVGCSKVPDINGIGLMEDRATCRISSQHIANWLHHGICSKKQVLEIMKKMAKIVDNQNLKDPSMKGYAPYKQMSENFDKSTAFKAACELIFHGKTQPSGYTEPILHLNRLLKKN

SEQ ID NO: 116854 - protein, 349 aa, Unknown
  Bacterial polypetide isolated from the Sargasso Sea
TAAAIHDLKRKGNSRTGSIYIVKPKMHGPEETAFTDKIFTRVEEVLKLEKNTIKCGIMDEERRTSVNLKECIRTLKSRVFFINTGFLDRTGDEMHTSMEAGPMIKKGDMKKSKWIAAYEDNNVDVGLKCGFSGVAQIGKGMWAMPDKMKDMIDQKISHLEAGANCAWVPSPTAASLHAMHYHKLNIFEKHKKLTDNNIKYIDSLLTIPIADRPNWSKEEINKELCNSAQTILGYVVRWVDQGIGCSKVPDINNVGLMEDRATLRISSQHIANWLHHGICSNRQVLEILKKMAKIVDKQNQGDPEYQNMSPDYDKSISFKAACELIFHGKSQPSGYTEPLLHLNRLIKKS

SEQ ID NO: 116855 - protein, 196 aa, Unknown
  Bacterial polypetide isolated from the Sargasso Sea
MTERVQVGGLQVAKALYDFVNNEAIPGTGIAADQFWAGAAAVIKDLAPKNRALLAKRDELQAQIDAWHQARKGQAHDAAAYKAFLQEIGYLLPELEDFQATTANVDEEIARLAGPQLVVPVMNARFALNASNARWGSLYDALYGTDVISEEGGAEKGKGYNKVRGDKVIAFARAFLDEAAPLAAGSHVDSTGYAIV

SEQ ID NO: 116856 - protein, 470 aa, Unknown
  Bacterial polypetide isolated from the Sargasso Sea
FLTNIGYIKKKGKKFKIKTKKIDEEISKICGPQLVCPVSNSRFLLNAANARWVSLYDSLYGTDIIPETGGAVKGKTYNPIRGKRVIEYSRDLLDKYIPLKKGSWKNLNKIPEVNNNKLLIDLKFPKQYIGYKKKLNKTASLLFKNNNLHIDILFDQDGALEINNPEGNQDKIKIHDIYLESAISTICDHEDSVAAVDAEDKILGYRNWLGLMKGNLKTDFLKKGKKIQRKLNKDRHYISSNGSKIKLHGRSLLLNRNVGHLMTNPAILLKDGSECPEGILDAFITSLACIHDFKNKTNSRVNNIYIVKPKMHGPEECNFTSQIFENVEKVLGLKKNQILCGIMDEERRTTINLQECIRALKDRVFFINTGFLDRTGDEIHTSMEVGPVVRKAEMKKTKWINAYENNNVDVGLTCGFSGKCQIGKGMFAAPDMMADMLKQKIIHPKSGANCAWVPSPTAAALHSLHYHEIN

SEQ ID NO: 116857 - protein, 728 aa, Unknown
  Bacterial polypetide isolated from the Sargasso Sea
MEQSMTQMNPRGGLQVAANLDQFVETEALPGTGLDSAAFWSGFDALVHELAPRNRALLAERDRLQTELDTWHRANPGPVRDLRAYRAFLEGIGYIVPSPTSVKATTDHVDTEIAEQAGPQLVVPLSNQRYALNAANARWGSLYDALYGTDAIPESNGAEKQKAFNPVRGAAVIAYARKFLDQAAPLANGSHADATSYSVEDGKLVVTLKSDKTELKTPAQFIGYQGDASAPSAVLLKHNGLHFEIQIDANDSIGKTDSAHVKDVLLEAAVSTIIDCEDSVAAVDADDKVQLYRNWLGLMTGDLTEEVTKGGKTFTRRLNADRVYTAANGTAPVVLHGRSLLFIRNVGHLMTNPAVLTKDGQEIPEGILDAVITTLCALHDRKHQLNSRTGSIYIVKPKMHGPAEVAFASELFARVEDLLKLPRNTIKMGIMDEERRTSVNLLACIGEASERVAFINTGFLDRTGDEMHSAMEAGPMMRKGDMKSSAWIAAYERSNVLVGLSAGLRGRSQIGKGMWAMPDLMHAMLEQKIAHPKAGANTAWVPSPTAATLHALHYHQVDVQAVQQELERTDYASVRDELLDGLLTIPVVAEAKWNADEIRSELDNNVQGILGYVVRWIDQGVGCSKVPDIHNVGLMEDRATLRISSQHIANWLYHGVVTRELVEETFRRMAKVVDEQNAGDPHYKPMAPGFDTLAFKAAQALVFEGRQQPSGYTEPLLHKFRLEVKKAQ

SEQ ID NO: 116858 - protein, 246 aa, Unknown
  Bacterial polypetide isolated from the Sargasso Sea
MKSSAWIAAYERYNVLAGLSSGLRGRAQIGKGMWAMPDLMHAMLEQKIAHPKAGANTAWVPSPTAATLHALHYHQVDVQAVQQELETTGYDSVRDELLDGLLTIPVVEKAQWSEEEIREEIENNAQGILGYVVRWIDQGVGCSKVPDIHDIGLMEDRATLRISSQHIANWLHHGVVSEALVNETFKRMAKVVDAQNANDPQYQPMTGHLDTSLAFKAAKALVFEGRAQPAGYTEPLLHKFRLGAKA

SEQ ID NO: 116859 - protein, 359 aa, Unknown
  Bacterial polypetide isolated from the Sargasso Sea
SLYGTNIIESDEGGSERYDPLRGQEVIKYVREFFDNFIPINGTSWKDIASLKIINKDLVIKKDNNEYVLKDKSKFIGHRGDASKPTAIILKNNNLHFEIIINPRAFSAAHDIAGISDVIIESAVSTICDNEDSVAAVDAEDKVSCYKNWLGLMKGNLKVEFVKNGKNLERKLNPDRSYVSKDGKGLKLHGRSLLLIRNVGHLMTNPSIILKDGSEVPEGIMDAFITTAAALHDLRKKKNSRKGSVYIVKPKMHGPEETAFTDLIFSKVEELFGLEKYTCKIGIMDEERRTSVNLKECIRTLKNRVFFINTGFLDRTGDEMHTSMEAGPMIKKGDMKSSKWISAYENNNIDIGLKCGFYG

SEQ ID NO: 116860 - protein, 530 aa, Unknown
  Bacterial polypetide isolated from the Sargasso Sea
MSTPITLPQGMAITGEIKPGYEAILTPEALALVAALHRTFEPRRQALLQARVERTKRLDAGERPDFLAETKAIREGDWKVAPLPADLQCRRVEITGPVERKMIINALNSGADSYMTDFEDSNAPSWTNQIDGQINLKDAVRRTISLEQNGKSYRLNDKVATLIVRPRGWHLDEKHVTVDGQRVSGGIFDFALFLFHNAKELLARGSGPYFYLPKMESHLEARLWNDIFVAAQEGVGVPRGTIRATVLIETILAAFEMDEILYELREHSSGLNAGRWDYIFSAIKKFKNDRDFCLAERSKITMTVPFMRAYALLLLKTCHKRNAPAIGGMSALIPIKNDPEANDKAMGGVRSDKQRDATDGYDGGWVAHPGLVPIAMEEFVKVLGDKPNQIAKQRDDVQVEGKNLLDFQPEAPITEAGLRNNINVGIHYLGAWLDGNGCVPIHNLMEDAATAEISRSQVWQWIRSPKGVLDDGRKVTAELVREFAKAELDNVKRSVGGNTQPYERAAAIFEQMSTSEGFTEFLTLPLYEEI

SEQ ID NO: 116861 - protein, 375 aa, Unknown
  Bacterial polypetide isolated from the Sargasso Sea
LKDGSEIPEGIMDAFVSTMCALHDFKNKNNSRTGSIYIVKPKMHGPEEVAFTDKLFSKVEEVLDLNKYTMKVGIMDEERRTTVNLKECIRQVKSRIVFINTGFLDRTGDEMHTSFEAGPMIFKGEMKKSTWLNSYENWNVDIGLSCGFSGKAQIGKGMWAMPDQMANMMEQKIGHPKSGANCAWVPSPTAATLHSMHYHKVDVFKEQNKIKSRNKTNLEKLLEIPRADRPNWSVEDINRELENNAQGILGYVVRWIDHGVGCSKVPDINNIGLMEDRATLRISSQHIANWLHHGICTKDQVLKVMKKMATIVDNQNEKDPAYTRGGRSSYKKMSDDFENSIAFSAACDLIFKGRVQPSGYTEPLLHQKRLEKKSA

SEQ ID NO: 116862 - protein, 229 aa, Unknown
  Bacterial polypetide isolated from the Sargasso Sea
NNVNVGIDCGFTGVAQIGKGMWAMPDKMAEMMKQKISHLEAGANCAWVPSPTAAGLHALHYHKINVFDKQLEIKNRKPTNQLDILRIPIADRPNWSIEEINSEISNSAQTILGYVVRWIDQGIGCSKVPDINNIGLMEDRATLRISSQHIANWLHHGVCSKKQVLEIMKKMAKIVDKQNKDDNKYQNMSPNYDRSIAFKTACELIFQAKHQPSGYTEPLLHLNRLIRKN

SEQ ID NO: 116863 - protein, 492 aa, Unknown
  Bacterial polypetide isolated from the Sargasso Sea
QKREIIQKKIDDWHKSKKGKDFNKKEYVNFLKSIDYLIDEKNDFKIETTDIDEEISSIAGPQLVVPVDNARYALNAANARWGSLYDALYGTDIIPGSIGKSWDQERAKKVINFVRDFLDERIPLAQISWKNVSKFKIEENKLVIFSDSKKYFLKNNEQFIGYKGDKENPSSILIKNNNLHIDIFINSETMVGKIDNAAISDIVVESALSTIVDNEDSVAAVDAEDKVKCYRNWLGLMKGDLSSTFEKKGKKIVRKLNQDREYVSKNGEKINLHGRALLLNRNVGHLMTNPAILLKDGAEIPEGILDAFVSTLCALHDFKNKKNSRTGSVYIVKPKMHGPEEVAFTNTLFEKVEETLGIKKYSIKVGIMDEERRTTVNLKECIRQVKNRIVFINTGFLDRTGDEMHTSFEAGPMIFKGEMKKSTWLNTYENWNVDIGLKCGFSGKAQIGKGMWAMPDQMANMMEQKIGHPKSGANCAWVPSPTAATLHSLHYH

SEQ ID NO: 116864 - protein, 281 aa, Unknown
  Bacterial polypetide isolated from the Sargasso Sea
RIVFINTGFLDRTGDEMHTSFEAGPMIFKGEMKKSTWLNSYENWNVDIGLSCGFSGKAQIGKGMWAMPDQMANMMDQKIGHPNSGANCAWVPSPTAATLHSMHYHKVDVFKKQDKIKSRNKTNLENLLEIPRADRPNWSIEDINRELENNAQGILGYVVRWIDHGVGCSKVPDINNVGLMEDRATLRISSQHIANWLHHGICTKDQVMKVMKKMATIVDNQNEKDPAYTRSGRSSYKKMSDDFENSIAFSAACDLVFKGRVQPSGYTEPLLHQKRLERKKL

SEQ ID NO: 116865 - protein, 424 aa, Unknown
  Bacterial polypetide isolated from the Sargasso Sea
MKGDLLTRFEKEGKTLERKLNPNRSYISKEGKGLKLHGRSLLLIRNVGHLMTNPSIILKDGSEIPEGLMDAFITTAAALHDKKKRGNSRTGSIYIVKPKMHGPDETAFTNEIFTKVEEVLKLKKYTCKIGIMDEERRTSSNLKECIRTLKHRVFFINTGFLDRTGDEMHTSMEAGPMIKKGDMKSSKWIGAYENNNVDIGLACGFSGKAQIGKGMWAMPDKMKDMFDQKTDHLKAGANCAWVPSPTAAAIHALHYHEINIFDVQKKLAKRDKAKIDDLLTIPIADRPNWSVDEINKEISNSAQTLLGYVVRWIDQGVGCSKVPDINNVGLMEDRATLRISSQHIANWVHHGVTTKLQVIEIMKEMAKIVDRQNENDRNYEKMSTDYDRSIAFQTACELIFKGKDQPSGYTEPLLHLNRLKKKLT

SEQ ID NO: 116866 - protein, 272 aa, Unknown
  Bacterial polypetide isolated from the Sargasso Sea
RRVIFINTGFLDRTGDEIHTSMEAGPMVPKADMKNEEWIKAYENWNVDIGLETGFLGNAQIGKGMWPMPDEMLEMYKTKTVHPLAGANCAWVPSPTAATLHAIHYHQIFVKNEQEKLLKREKANLDDLLKIPCIKEDKFPSKEDIQDELENNAQGILGYVVRWVDQGIGCSKVPDINNVGLMEDRATCRISSQHIANWLHHNLCTEKDVINVMKKMAVVVDEQNKNDVDYKNMSPSFDGIAFKAACDLAIKGKYQPSGYTEPILHKMRLRRK

SEQ ID NO: 116867 - protein, 408 aa, Unknown
  Bacterial polypetide isolated from the Sargasso Sea
VRKLNPNRKYISKDGKEISLHGRALLLNRNVGHLMTNPGILLKDGSEIPEGIMDAFISTLCALHDFQNKKNSRTNSVYIVKPKMHGPEEVTFTNELFKKVEDALGIKEYSIKVGIMDEERRTTVNLKECIRQVKNRIVFINTGFLDRTGDEMHTSFEAGPMIFKGDMKKSKWLNTYENWNVDIGLKCGFSGVAQIGKGMWAMPDQMHNMMEQKINHPKSGANCAWVPSPTAATLHSLHYHNINVFSEQKKIKLREQSRVEDILEIPKADRPNWSMEDINRELENNAQGILGYVVRWIDQGIGCSKVPDINNVGLMEDRATLRISSQHIANWLHHGICKKDQVMHVMKKMAKTVDEQNKKDPNYEKMSDNFDNSIAFSTACDLVFKGRTQPSGYTEPLLHQKRLKRKKI

SEQ ID NO: 116868 - protein, 485 aa, Unknown
  Bacterial polypetide isolated from the Sargasso Sea
RSLLQDQISTWHKNNDFNLNEYKVFLQEIGYLEEVPADFKIKTRNTDPEISCIPGPQLVVPIMNARFALNATNARWGSLYDALYGTDVISEDGGASKQGSYNAIRGNKVIDFSKQFLDDCFPIKDLSYIDITNISIKDQRLLFHAEQDQITYLKNENQFKGFNGSPKNPSEILLVNNNLHLEIQVDPNHPVGKTDKANIKDIVLESAVSTIQDCEDSVAAVDAEDKVIAYRNWLGLMKGDLSETFEKNGKQLTRVLKEDREYLDINGNSFALPGRSLLLVRNVGHLMQNPAVILDNGEEVFEGILDAMFTICIALYDLNQLNTLPNSRNKSMYIVKPKMHGSEEVTFTCDLFEAVEQLFNLEKNTVKVGIMDEERRTTINLKACIEKAKERIIFINTGFLDRTGDEIHTSMEAGAMVPKSEMKAQSWINAYEDWNVDIGISCGLSGKAQIGKGMWAMPDEMKDMVKTKIAHPLSGATCAWGPITT

SEQ ID NO: 116869 - protein, 397 aa, Unknown
  Bacterial polypetide isolated from the Sargasso Sea
MKFFKNILTIFSSKKNEIKEISLKISPALEEFVRSEMLPGLSISENYFWSSFENLLNKFQQRNKDLLDIRKQLQAKINGWHLERKDKDINIGEYKDFLEDIGYLHPRSKDFSIRTWNVDPEIRKIAGPQLVVPVMNARFALNAANARWGSLYDALYGTDIINEDNGAVREGGYNPIRGDKVIAFSKNFLDETIPLKNGNYDKVTNFEFVDSELLITLQDNTKTSLVDKDKYIGYMDKGEGAYGLLFKNNNLHFEIQIDRSHPIGQNDLSGIKDILMESAVTTIQDCEDSVAAVDADDKIIVYRNWLGLMKGNLKRSFDKNGKFITRELAKDRKYLLKNGKMILLPGRSLMLIRNVGHLMTNPAIKDDRGNEVPEGIMDAFFTSCISIHDIIGNGTYK

SEQ ID NO: 116870 - protein, 360 aa, Unknown
  Bacterial polypetide isolated from the Sargasso Sea
ELKLETYKHSTDLKSKKKFVGYRGDKENPLAIILKNNNLHVEIIINPKAFSAKSDAAGISDIILESALTTICDNEDSVAAVDAEDKVACYRNWLGLMKKDLTAEFIKNGKIYKRKLNPDRSFFSPSGKKLKLHGRSLLLNRNVGHLMTNPCILLKDGSEVPEGILDAFITSAACIHDFKIKNNSRKGSIYIVKPKMHGPDEAAFTNLIFNKVEEALNLKKYTIKCGIMDEERRTSVNLKETIRALKDRVFFINTGFLDRTGDEIHTSIEAGPMIKKGDMKLSKWISAYETNNVDIGIECGFTGVAQIGKGMWAMPDKMADMMKQKISHLEAGANCAWVPSPTAAGLHALHYHKVDVFKNN

SEQ ID NO: 116871 - protein, 338 aa, Unknown
  Bacterial polypetide isolated from the Sargasso Sea
LIYIVKPKMHGPEECSFTNLIFEKVEKVLNLKRNQILCGIMDEERRTSVNLKECIRALKNRVFFINTGFLDRTGDEIHTSMEAGPMVFKGDMKSSKWISAYENRNVDIGLSCGFSGKAQIGKGMWAMPDLMKDMMKQKIVHPQSGANCAWVPSPTAAALHALHYHEIDVFAKQKKLSKRKIAKLSDLLTIPVDNRTNWSMDDITKELKNNSQGILGYVVRWVDQSVGCSKVPDINGIGLMEDRATCRISSQHIANWLYHGVCSKKQVLEIMKKMAKVVDSQNLKDPSMKGQAPYQTMSGNFDRSVAFKAACDLVFHGRLQPSGYTEPILHLNRLLKKN

SEQ ID NO: 116872 - protein, 445 aa, Unknown
  Bacterial polypetide isolated from the Sargasso Sea
MKKREKFIKISDLSVSKLLLDFVNKELLPGTGISKNRFWKGFNDAVHYLAPKNKRLIETREKIQKSIDTYHLDRKGKKFNFNEYKVFLKKIGYLKKSGKNFKIQTKNVDKEISSICGSQLVCPVSNERFLLNAANARWVSLYDSLYGANIIPETKGALKGKTYNPIRGNKVITYAKNLLDKYVPLKNKSWNNLDKIPNLTNGKLNIELKNQKQFIGYRKSKNKLSSLLFINNNLHIDILFDQSGNLEINNPEGNQDPLKIHDIYLESAISTICDHEDSVAAVDAEDKVLGYRNWLLLMKGSLNSKFKKNGKIILRKLNPDREYLSVKNKKIKLHGRSLLLNRNVGHLMTNPAILLKDGSECPEGILDAFITSAACLHDFKRKGNSRCNSIYIVKPKMHGPEECSFTNLIFEKVENVLKLKRNQILCGIMDEERRTSVNLKECIRI

SEQ ID NO: 116873 - protein, 218 aa, Unknown
  Bacterial polypetide isolated from the Sargasso Sea
SGKAQIGKGMWAMPDEMADMVKNKIGHPMAGANCAWVPSPTAATLHAIHYHRVNVLERQQELMEREPANIDDILKIPLEEQPNWSEEEIRKELENNCQGILGYVVRWIDQGVGCSKVPDIQDVGLMEDRATLRISSQMLANWLLHGIVSEEQVTHALERMATVVDRQNAGDPLYQPMAPSFEGIAFQAASDLVFKGTEIPNGYTEPTLHARRRELKSA

SEQ ID NO: 116874 - protein, 466 aa, Unknown
  Bacterial polypetide isolated from the Sargasso Sea
ERYDPERGEEVIKYSKKFLDKHFTLKKKNWSQVSEISIDKSNLVLNLISEKTTIKDKNKFIGYRGKTNKPSAIILKNNNLHVEIIINPEAFSAKSDPAGIADIIMESAVTTICDHEDSVAGVDAKDKVLGYRNWLGLMKGNLRAEFEKSGKKLIRKLNPDRKFVLKNGDLSHLHGRSLLLNRNVGHLMTNPSILLSDGSEIPEGIMDAFIISAACLHDLKIGKNSRKGSIYIVKPKMHGPKEAKFTDLIFSKVETTFGLKKNTIKCGIMDEERRTSVNLKECIRALKHRVFFINTGFLDRTGDEMHTSMEAGPMIKKGDMKTSSWINAYENNNVDVGLSCGFSGLAQIGKGMWAMPDKMSDMMKQKISHLEAGANCAWVPSPTAAALHSLHYHDIDVFKKQDELKKRKKTQVAELLNIPIIKNPNWSVDDINKEISNSAQTILGYVVRWIDQGIGCSKVPDINNIG

SEQ ID NO: 116875 - protein, 302 aa, Unknown
  Bacterial polypetide isolated from the Sargasso Sea
MIHLENKFGIQISTEFIDFIEQEVLPEITIASDTFWAGLAKVVKELTPTNKQLLERRTYFQRQINEWHRANKDREFNSADYKSFLYSIGYIVPEKEPFSIDTKQVDPEISKIAGPQLVVPIMNARFALNAANARWGSLYDALYGTDAIEPVAKTIDYDFERGQKVIQWCRRFLDDAFPLIDGSWSEITEVAVKDGRLDLSGKQLRLVNSFIGYVGHPHQPTCLVLSNNNLHVRIEFDRNSEVGQSDLAGISDIVIESAISTIMDCEDSISAVDASDKIIAYRNWLGMMKGNLTEEVSKGDKT

SEQ ID NO: 116876 - protein, 384 aa, Unknown
  Bacterial polypetide isolated from the Sargasso Sea
MNARYALNAANARWMTLYDSLYGTDIIEQSEDSVSERYDPLRGEMVIKYGRDFLDKYFPLKDLSWKKITSFAVKDGKLKILKGADLVSLIDVDKFIGHRGESDNPSAIILRNNNLHIEILKDSRAFAAQQDHAGISDIIVESAVSTICDNEDSVAAVDSEDKIICYRNWLGLMRGDLKSKFEKDGKLYERKLNPNRSYISKDGKGLKLHGRSLLLVRNVGHLMTNPSIILDDGNEVPEGILDAFITTAAALHDLKKKNNSRTGSVYIVKPKMHGPDETAFTDLIFSKVEEVLGLKKYTCKIGIMDEERRTSSNLKECIRSLKNRVFFINTGFLDRTGDEMHTSMMAGPMIKKGEMKSSKWITAYENRNVDIGLKCGFSGKAQIG

SEQ ID NO: 116877 - protein, 171 aa, Unknown
  Bacterial polypetide isolated from the Sargasso Sea
MLIRNVGHLMTTPAILNEDSDEIGEGIMDAIITTLIATHDFSKKDNKNSNYNSIYIVKPKMHGPEEVKFTDELFSEIEKLLDLPNSTIKIGIMDEERRTSINLKECIRAAQSRVAFINTGFLDRTGDEIHTGMQAGSFMKKADMKNAPWITSYEKRNVSIGLECGLKGKAQ

SEQ ID NO: 116878 - protein, 719 aa, Unknown
  Bacterial polypetide isolated from the Sargasso Sea
MKINYETVNNLKVSNKLLKFVNEEVLKDTNILPTKFWSGFDKYVHELAPKNKELLKIRENLQKKIDDWHIKNKENKINFDEYKKFLREIGYLKDQGSDFQIETNNVDEEISKIAGPQLVVPIMNARYALNAANARWVSIYDSLYGTNVIESDEGGSERYDPARGQEVIKYVREFFDKYIPINGTSWKNIAGLKVVNKDLIISKDSQEYNLKDKNKFIGHRGDANKPSAIIIKNNNLHFEIIINPKAFSAAHDIAGISDVIAESAISTICDNEDSVAAVDDEDKLVCYKNWLGLMKGNLKIQFEKNGKNLERKLNPDRSYISRDGKGLKLHGRSLLLIRNVGHLMTNPSILLKDGSEVPEGVMDAFITTACAVHDLKRKRNSRSGSVYIVKPKMHGPDECAFTDLIFTKVEEVLELRPNTIKIGLMDEERRTSANLKECIRALSKRIVFQNTGFLDRTGDEMHTSMQAGPMIKKGDMKSSKWIQAYENNNVDLGLKCGFSGKAQIGKGMWAAPDEMKKMMKEKIAHLEAGANCAWVPSPTAASLHALHYHEIDVFDVQKKLASRSPAKLDDLLTIPIADRPNWSVDEINSEISNSAQTLLGYVVRWIDQGIGCSKVPDINNIGLMEDRATLRISSQHIANWIHHGITTKMQVVEIMKQMAKIVDEQNKSDKNYVKMSDDFDNSIAFNTGCDLIFKGKEQPSGYTEPLLHLNRLTKKTIQN

SEQ ID NO: 116879 - protein, 730 aa, Unknown
  Bacterial polypetide isolated from the Sargasso Sea
MNLFSKFFKSSNHSANEINLKISSSLEDFTKNEVLPGLNISPHYFWSSFENLVEKFSSRNKNLLIKRSELQEKIDHWHIQNRNKEFNLDEYKNFLTDIGYLHPRAGNFKIKTWNVDPEIRKIAGPQLVVPLMNARFALNAANARWGSLYDSLYGTNIITDEDGATREGGYNPIRGNKVIEFAKKFLDETIPMQSGSYDQVIQFQFIDSELSMKLEDGKKVYLKDIDQYVGYKDEGMGAYGLLFKNNNLHFEIQIDRSHPIGQEDKAGIKDILMESAVTSIQDCEDSVAAVDAEDKIIVYRNWLGLMKGNLKRSFDKDGKFITRELNPDRKYLLKNGKMILLPGRSLMLVRNVGHLMTNPAIKDKKNNNVPEGIMDAFFTICIAIHDIIGNGIYKNSKTKSIYIVKPKMHGPEEVQFTCDLFSEIEKIFDLPENTVKLGIMDEERRTTVNLKECIEIAKHRVIFINTGFLDRTGDEIHTSMEAGPMVTKADMKMQKWINAYENWNVDIGLETGFKGNAQIGKGMWPMPDEMLDMYKTKAAHPKAGANCAWVPSPTAATIHAMHYHQISVQDEQDKIIKRERAKLDDLLLIPFMKKNELPTDKEITAELENNAQGILGYVVRWVDQGIGCSKVPDINDVGLMEDRATCRISSQHISNWLHHGLCSEVEILEIMKKMAKVVDSQNKDDVNYRKMSPSFDSIAFKAACELAIKGKYQPSGYTEPILHKMRLRRK

SEQ ID NO: 116880 - protein, 468 aa, Unknown
  Bacterial polypetide isolated from the Sargasso Sea
MREQYIKIHSLSVAKELADFVKNELLLDTNVGPDEFWKGFDKVVHELAPKNKKLLEIRETLQQEIDLWHKKNRDQEIDYNKYKNFLEEIGYLKKEGEDFKITTKNLDEEISNIAGPQLVVPIMNSRYSLNAANARWVSLYDSLYGSNIIESEESGSEKYDPLRGQEVIKYTRNFLNKYFPINDLDWKDITGLAVNNKKLSIYKENKEYNLSDLEKFIGHRGDAAKPNAIILKNNNLHLEIIINPRAFSAARDAAGISDIIVESAISTICDHEDSVAAVDAEDKVTCYRNWLGLMKGNLKSVFEKNGKELERKLNPDRSYTSLNGEKLKLHGRSLLLVRNVGHLMTNPAITLNDGSEVPEGIMDAFITSAACIHDLKRKGNSREGSIYIVKPKMHGPEETEFTNLIFTKVEEVLKLEKNTIKCGIMDEERRTSANLKECIRTLKDRVFFINTGFLDRTGDEMHTSMEAG

SEQ ID NO: 116881 - protein, 436 aa, Unknown
  Bacterial polypetide isolated from the Sargasso Sea
MIQKKNIKVNEKLYNFINNEVLKDISIEENKFWNGFSDIVDIYYPKNIYLLEKRKSLQNKINKWHKENKSKNIELEEYKKFLKDIDYIVEEGPNFKITTSNIDEEISTICGPQLVVPITNERFAINAVNARWGSLYDALYGTDAIGEAPKGGAYDKERGDKVVKFAKSHLDKFAPLKESKWIEVNNIQIKDNSVIFNTLTNDNVELVHAEQLLGWRISKDAELSELILSKNNLRCRIIINKNDIIGKNDIANISDILMESAVSTILDCEDSVATVDADDKILAYRNWLGLIKGNLESNFLKNNKNIKRVLNKDFHFTGFDQKEKTLKGRSLMLIRNVGHLMTTPAILNKDNKEIGEGIMDAIITTLIATYDFIKKENKNSNYNSIYIVKPKMHGPEEVKFTNELFSQIEQLLYLPKSTIKIGIMDEERRTSINLKE

SEQ ID NO: 116882 - protein, 383 aa, Unknown
  Bacterial polypetide isolated from the Sargasso Sea
MVRNVGHLMTNPAIKDENGNEVPEGIMDGFFTICASIHDLIGNGLYKNSKTKSIYIVKPKMHGPEEVQFTCDLFSAIEDIFDLPQNTVKLGIMDEERRTTVNLKECIEVAKHRVIFINTGFLDRTGDEIHTSMEAGPMVTKGSMKEQKWINAYENWNVDIGLETGFKENAQIGKGMWAMPDEMLEMYKSKTIHPKSGANCAWVPSPTAATIHAIHYHQISVQDEQDKIMKREKAKLEDILSIPLISSDNVPSPQEIQKELDNNAQGILGYVVRWVDQGVGCSKVPDINDVGLMEDRATCRISSQHISNWLYHDLCSEEQVIDTMKKMARIVDLQNKDDTNYRPMAPSFDGIAFKAACDLAIKGKDQPSGYTEPILHEMRLKRK

SEQ ID NO: 116883 - protein, 195 aa, Unknown
  Bacterial polypetide isolated from the Sargasso Sea
KISHLEAGANCAWVPSPTAAALHALHYHQINIFDKHKELENREKAKLDDLLKIPVINRPNWSIEEINKEISNSAQTILGYVVRWIDQGIGCSKVPDINDVGLMEDRATLRISSQHIANWLHHGVCSRKQVLEIMKKMSKVVDKQNRNDKLYQKMSPQYDKSIAFKTACELVFQGKNQPSGYTEPLLHLNRLIKKN

SEQ ID NO: 116884 - protein, 329 aa, Unknown
  Bacterial polypetide isolated from the Sargasso Sea
MSKRITHGSLKVSQELDNFLTDELLPGLDINPDAFWGSFERVLDEFGPRNKELLAKRTEIQKTIDNWHISKKGSPHNHDEYVNFLKEIGYLLEEGDDFEITTQNVDEEISLVAGAQLVVPIMNARFSLNATNARWGSLYDALYGTDMISEEEGAEKSGPYNPIRGNKVIEFSKNFLDESVPLSSGKYADVTGFKINKGSLEISTSDQSFTELKDESQFIGFTGDSDNPSSILFKNNNLHIEIEIDSEDSIGKDDPANIKDICVESAVTAIQDLEDSVAAVDAEDKSLGYRNWLGLMKGDLKETFFKGGEEMTRTLNEDRNYQTKMSRNT

SEQ ID NO: 116885 - protein, 544 aa, Unknown
  Bacterial polypetide isolated from the Sargasso Sea
MQEYIKFHDHNIDKSLHDFICKELKSEKIKLDKIFWKNLSNIISELENRRINLIEKRAFLQNKITNWHKKNKGKFFNKNDYKKFLFEIGYIVEEKKDFKINTSNIDPEISSIPSPQLVVPLSNTRYAINAANSRWGSLYDAIYGTDIIPNKNKFKITKNYNESRGREVIKLAKAHLNTFFPIDSCSYEEVTKIQIINNELIFSDKNSNLKKLLNPSQFYGYIGFELNPDEIILEKNSLRVRLQLDKKHPIGKIDSFHLKDIVIETALSVIMDCEDSIVSVDTNDKIATFRNWIRLLNGTIQTEVKKNNVSFIRKLSKDISYKKPNGEADNMKGLSLLLIRNVGHLMTSSSIIDQNKNEIGEGIIDTLLTALCFLKTIDNSENSKFKSLYIVKPKMHGPEEVKFSVDTFSIIEKLLKLPENTIKIGIMDEERRTTLNLKECIRAAKNRVFFINTGFLDRTGDEIHTSMDAGTMIKKTEMKNVNWIQAYERWNVEIGLKCGFSGLAQIGKGMWAMPDMMSKMMEEKISHCQSGANTAWVPSPTAAT

SEQ ID NO: 116886 - protein, 206 aa, Unknown
  Bacterial polypetide isolated from the Sargasso Sea
MADMMKQKIDHLKAGANCAWTPSPTAATLHALHYHDVNVFEVQDKLKNRENNNLENLLKIPVADRPNWSVEEIVKELENNSQGILGYVVRWIDQGVGCSKVPDINNVGLMEDRATLRISSQHIANWLKYNICTKIQVIDIMKKMAKIVDDQNKNDKSYIRMSDDFENSVAFNTACDLVFKGAEQQSGYTEPLLHINRIHKKSLNKN

SEQ ID NO: 116887 - protein, 222 aa, Unknown
  Bacterial polypetide isolated from the Sargasso Sea
CGLSGKAQIGKGMWAMPDQMSNMMSQKINHPKSGANCAWVPSPTAATLHSMHYHKVDVFKIQSKIKDRSQANIADILTIPLADRPNWSKDDINKELENNAQGILGYVVRWIDQGVGCSKVPDINNIGLMEDRATLRISSQHMANWLHHDICTKDQVMDVMKKMAKIVDQQNKADKNYKPMSPDFDNSIAFSAACSLVFDGKDQPSGYTEPLLHKKRLENKSI

SEQ ID NO: 116888 - protein, 191 aa, Unknown
  Bacterial polypetide isolated from the Sargasso Sea
AGANCAWVPSPTAATLHATHYHKIDVQHRQDEIRSLAMQSSLDDLLQIPLQTGEKLTESEIQSEIENNCQGILGYVVRWVDQGIGCSKVPDIHNVQLMEDRATCRISSQSLSNWLCHNFVDHDLVVNTLKKMAAIVDSQNADDMNYRPMSPTFDNEAFLAAYDLIFSGESQPSGYTEPILHRWRLELKRKL

SEQ ID NO: 116889 - protein, 523 aa, Unknown
  Bacterial polypetide isolated from the Sargasso Sea
MRIQGETHPDYAQILTPDAVALVSELVERFAPQRDELLKQRVARQARIDGGELPDFLPETAHIRAGDWTVRGIPADLQDRRVEITGPVERKMVINALNANVKVFMADFEDSLAPAWNKVIEGQINLRDAVNGTVSYTSPEGKAYTLNADPAVLICRVRGLHLPEKHVTFDGAPIPGGLFDFALYFLHNYQALLAKGSGPYFYVPKLQSHLEGRWWSEVFAWTEDKFGLPRGTIKATVLIETLPAVFEMDELLYQMKDHIVALNCGRWDYIFSYIKTLKNHPDRVLPDRQVVTMDKPFLSAYSRLLIKTCHKRGALAMGGMAAFIPAKDPAVNEQVFAKVKADKEREANNGHDGTWVAHPGLADTAMAVFNAAIPAGASNQIGVLREQDAPITAAELLAPCEGERTDAGMRTNIRVALQYLEAWINGNGCVPIYGLMEDAATAEISRTSIWQWIRHGKSLSNGKVVTKDLFRQMLAEEQEVVKAEVGAERWQAGRFAEASELMEQITCADTLIDFLTLPGYERL

SEQ ID NO: 116890 - protein, 386 aa, Unknown
  Bacterial polypetide isolated from the Sargasso Sea
ISPKGGKFYLPGRSLMLVRNVGHLMTNPAVIDKKGEEVPEGILDALFTICIAKHDLLNNGKFNNSPKGSIYIVKPKMHGPEEVKFSCDLFEAIEKALDIKPNTVKIGIMDEERRTTVNLKECIKVAKNRVIFINTGFLDRTGDEIHTSMEAGPMVRKDDMKKEPWIKAYENWNVDIGLESGFKGNAQIGKGMWPMPDEMLQMYETKTMHPKAGANCAWVPSPTAASIHAMHYHQIFVEKEQNKILSRDRAEIDDILNIPIIRDFNLSKDDINDEIENNCQGILGYVVRWIDQGIGCSKVPDINNIGLMEDRATCRISSQHIANWLHHGICNKKDVIKAMKKMALVVDEQNSNDPSYTPMSPSFDGIAFPAACDLAIKGRSPPSGYT

SEQ ID NO: 116891 - protein, 360 aa, Unknown
  Bacterial polypetide isolated from the Sargasso Sea
MSDRITHGSLKVSQELDNFLTDELLPGLDISPDAFWESFERVLDEFGPRNAELLAKRTEIQKTIDNWHISKKGSPHNHDEYVNFLKEIGYLLEEGDDFEITTQNVDEEIALVAGAQLVVPIMNARFSLNATNARWGSLYDALYGTDMISEEEGAEKSGPYNPVRGNKVIEFSKNFLDESVPLSSGKYADVTGFKINKGSLEISTSDQSSTELKDESQFIGFTGESDNPSSILLKNNNLHIEIEIDPEDSIGKDDPANIKDVCIESAVTAIQDLEDSVAAVDAEDKSLGYRNWLGLMKGDLKETFFKGGEEMTRTLNEDRNYSDKNGQEITLPGRSVLLVRNVGHLMTNPAILDGNNNEVP

SEQ ID NO: 116892 - protein, 224 aa, Unknown
  Bacterial polypetide isolated from the Sargasso Sea
CGFSAKAQIGKGMWAAPDEMKKMLEEKIGHLKAGANCAWVPSPTAASLHALHYHEINVFDVQKKLTSRSPSKLEDLLTIPVADRPNWSVDEINSEISNSAQTLLGYVVRWIDQGVGCSKVPDINNIGLMEDRATLRISSQHIANWLHHGITTKIQVKEIMKEMAKVVDKQNEGDKKYVKMSDNFENSIAFKAACDLIFKGKEQPSGYTEPLLHLNRLEKKISQN

SEQ ID NO: 116893 - protein, 710 aa, Unknown
  Bacterial polypetide isolated from the Sargasso Sea
MDSYINIGKYQVAQGYHSLMTDKVLSRIGVPSNQFWEDVSTLLDELIPVNEKLLEKREQLQSRIDAWHLKNPAPFAFEDYKQMLLDIGYLIPENEDFQISTSEVDPEISTIAGPQLVVPITNPRYALNAANARWGSLYDALYGTDIIPESPGLEKGSKYNPNRGLEVINRAKSIMDASVPLAKGKYMDVVKFIIKDEQFTCLLSDDSVVSLEDTESFAGWTGDLNSPKSIVLKRHGLHIELMFDRDSVVGKQDPTGLSDILLESAVTTIIDLEDSVATVDSEDKVAAYSNWLGLMDGSLSSSFKKDGVVVDRTLNPDKVITRPNGEEGQLRGRSLLLIRNVGHLMTTNLMKTREGKEVPEGIIDAITTVAIGMVDVTGDRMNSPAGSIYIVKPKMHGPEEVKFANDTLSKIEHMLGLPANTVKMGIMDEERRTTVNLKECIRAARTRVAFINTGFLDRTGDEIHTSMEAGPMVRKGDMRQAGWISSYEDWNVDIGIECGLVGKAQIGKGMWAMPDLMNAMLEQKKGHPRAGANTAWVPSPTAATIHALHYHEIDVAATQKKLSLRERSSVDSILNIPIELNPSWSEDEITAELENNAQGILGYVVRWVDQGIGCSKVPDINDVGLMEDRATLRISSQHIANWLHHGICTEEQVNNVFEHMAGVVDRQNSSDSEYKLMSGNTETNIAYQAAKALVFDGLTQPSGYTEPILH

SEQ ID NO: 116894 - protein, 151 aa, Unknown
  Bacterial polypetide isolated from the Sargasso Sea
LTIPLLEDASTLTRESIKREIDNNVQGILGYVVRWVHQGVGCSKVPDINNVGLMEDRATLRISSQHIANWLEHGIVSVDQVKESLARMAVLVDKQNAGDPEYIPMAPDLNSSIGFLAASDLIFKGKEQPSGYTEPLLHARRREMKAKLAAS

SEQ ID NO: 116895 - protein, 362 aa, Unknown
  Bacterial polypetide isolated from the Sargasso Sea
MKFISKNDLKINQTLFDFINKEVLPGTEVNQDSFWIKFSKVVHELSPINRKLIEKREKIQKQIDEWHLNNPKEKFNKDNYIQFLKSISYLVEEGDDFKINTSNVDDEIARIAGPQLVVPVDNARYALNAANARWGSLYDSLYGTDVIPGEKGSTFNKERANKVITYTRNFLDEIFTLNKGSWKSVEKIQIENKKLILNINGEKSNLKNENQFVGFNGDKSSPTSILLKNNNLHFDIIIDANSPIGKNDKANISDLILESAISTIIDNEDSVAAVDGEDKVNCYRNWLGLMKGDLTANMEKNGKKFVRKLNPNRTYFSKEGEKISLHGRALLLNRNVGHLMTNPAITLKDGSEIPEGIMDAFV

SEQ ID NO: 116896 - protein, 406 aa, Unknown
  Bacterial polypetide isolated from the Sargasso Sea
DSVSERYDPLRGEMVIKYGRDFLDKYFSLAGLSWNKITSFAVKFGKLKVLKGADIFDLEDENKFVGHRGESDNPSAIILKNNNLHIEILKDSRAFAAQQDHAGISDIILESAVSTICDNEDSVAAVDSEDKIICYRNWLGLMKGDLKSKFEKEGKLFERKLNPHRSYISKDGKGLKLHGRSLLLVRNVGHLMTNPSILLSDGSEVPEGIMDAFITTAAALHDIKNKNNSRTGSVYIVKPKMHGPDETAFTDLIFSKVEEVLNLPKYTCKIGIMDEERRTSANLKECIRSLKNRVFFINTGFLDRTGDEMHTSMEAGPMIKKGDMKSSKWINAYENNNVDIGLSCGFSGKAQIGKGMWAMPDKMKDMMEQKTVHLKAGANCAWVPSPTAAALHALHYHEINIFNEQK

SEQ ID NO: 116897 - protein, 142 aa, Unknown
  Bacterial polypetide isolated from the Sargasso Sea
ADRPNWSIEDINRELENNAQGILGYVVRWVDQGVGCSKVPDINNIGLMEDRATLRISSQHIANWLHHGICKKEQVMEIMKKMAKTVDEQNKNDPNYKKMTGNYENSIAFSAACDLVFKGRTQPSGYTEPLLHQKRLETKSSI

SEQ ID NO: 116898 - protein, 329 aa, Unknown
  Bacterial polypetide isolated from the Sargasso Sea
LSKKGTGPYFYLPKLENHLEARLWNDVFVHAQNFLNIDRGTIKATVLIETITAAFEMDEIIFELKEHSAGLNCGRWDYIFSFIKKFRNHRNFLLPNRTEVTMERHFLKSYVDLLIRTCHKRNVHAMGGMAAQIPIRGDEEQNQIAMNKVSLDKLREANAGHDGTWIAHPGLSQVAMNAFNQAMGSSPNQIPNKRNDVLVNAQDLIKVPDGNITEDGLRQNISIGIQYIEAWLSGNGCVPIHNLMEDAATAEISRSQIWQWIHHRAKTTDSNKTITEEYFIKTLEDEMDQLKTARGSEGDYLQPAINLFKEMSTDSEFDEFLTLPAYKHL

SEQ ID NO: 116899 - protein, 451 aa, Unknown
  Bacterial polypetide isolated from the Sargasso Sea
MKFLSKLFNSSKHSSKDISLKISSSLQDFVRDEILPGLDISPDYYWSSFENLLNKFSDRNKDLLNKRKELQDQISEWHIKNRNSEFNLEEYKKFLNDIGYLHQRSGDFTIKTFNVDPEIRKIAGPQLVVPVMNARFALNAANARWGSLYDALYGTNIINEEDGAKREGGYNPIRGEKVIAFAKKFLDETIPMEEGTYNDAIKFEFIDSELLITLKDGLCVSLKDKDQYVGYKDKGEGAYGLLFKNNNLHFEIQIDRSSPIGQEDLAGIKDILMESAITTIQDCEDSVAAVDAEDKIIVYRNWLGLMKSNLKRSFDKGGKFITRELNPDRKYLLKNGKMILLPGRSLMLVRNVGHLMTNPAIKDNKGNEVPEGIMDAFFTICISIHDIIGNGIYKNSKTKSIYIVKPKMHGPDEVQFTCDLFSEIEKIFNLPENTVKLGIMDEERRTTVNLK

SEQ ID NO: 116900 - protein, 339 aa, Unknown
  Bacterial polypetide isolated from the Sargasso Sea
LYKNSKTKSIYIVKPKMHGPEEVQFTCDLFSAIEDIFDLPQNTVKLGIMDEERRTTVNLKECIKVAKHRVIFINTGFLDRTGDEIHTSMEAGPMVTKGSMKEQKWINAYENWNVDIGLETGFKGNAQIGKGMWAMPDEMLEMYKLKTIHPKSGANCAWVPSPTAATIHAIHYHQISVQDEQDKIMKREKAKLDDILSIPLISSDNVPSPQEIQKELDNNAQGILGYVVRWVDQGVGCSKVPDINDVGLMEDRATCRISSQHISNWLYHDLCSEEQVIETMKKMARIVDIQNKDDTNYKPMAPSFDGIAFKAACDLAIKGKDQPSGYTEPILHEMRLKRK

SEQ ID NO: 116901 - protein, 302 aa, Unknown
  Bacterial polypetide isolated from the Sargasso Sea
MREQFIKIHNLSVAKELADFIKNELLLDTNVSPDEFWKGFDKVVHELAPKNKKLLEIRETLQQEIDLWHKKNRDHEIDYNKYKNFLEEIGYLKKEGEDFKIATKNLDEEISNIAGPQLVVPIMNSRYSLNAANARWVSLYDSLYGSNIIESEESGSEKYDPLRGQEVIKYTRNFLNEYFPINGLDWKDITGLVVNNKKLSIYKENKEYNLSDLEKFIGHRGDTAKPNAIILKNNNLHLEIIINPRAFSAARDAAGISDIIIESAVSTICDHEDSVAAVDAEDKVTCYRNWLGLMKGNLKSIF

SEQ ID NO: 116902 - protein, 509 aa, Unknown
  Bacterial polypetide isolated from the Sargasso Sea
PATCIHEAYKNYLKEIGYLVDEGESFLIETENVDPEISSIAGPQLVVPSTNARYALNAANARWGSLYDSLYGTDAMGAFDQAEGYDRGRGARVVARARVFLDNAFPIIGASHADVKRYYVRDKQLLVDDLPLVSPEKFIGYSGNPKAPNSVLLKNNGLFVVLVFDRAHVVGSRDQAGLADVRIESALSAIIDLEDSVACVDGEDKVNAYSTWLGLMKGDLTSEFEKNGEKVVRCLNSDLSFISPSGDDFSIRARALLWIRNVGHLMTTPAVLDSNGDEIFEGLLDAMVTTMLGMHDLKKADGNSRHGSIYIVKPKMHGPAEVDFADKIFSKVESFLGIEQYSVKLGIMDEERRTSVNLKECIRAAKRRVAFINTGFLDRTGDEIHTSMEAGPFSRKDFIKRKSWIVGYENQNVDIGLECGLSGRAQIGKGMWAMPDLMSAMLEQKIEHPKSGANCAWVPSPTAATLHALHYHQVDVFAVQEILRKNGRRAYVDTLLDIPLAAYRKWSHE

SEQ ID NO: 116903 - protein, 503 aa, Unknown
  Bacterial polypetide isolated from the Sargasso Sea
MQEKYIKINNLQVSEKLSNFVNDELLKNTNVSSENFWSGLEKTLDELAPKNKELIKFREDLQKKIDDWHIKNKGKEFNLDEYKKFLLEIGYLKNEGPNFKIETENVDEEIASIAGPQLVVPVMNARYALNAANARWMSLYDSLYGTDVIEQSEDSVSERYDPLRGEMVIKYGRDFLDKYFSLAGLSWNKITSFAVKYGKLKVLKGADIFDLEDENKFVGHRGESDNPSAIILKNNNLHIEILKDSRAFAAQQDHAGISDIILESAVSTICDNEDSVAAVDSEDKIICYRNWLGLMKGDLKSKFEKEGKLFERKLNPHRSYISKDGKGLKLHGRSLLLVRNVGHLMTNPSILLSDGSEIPEGIMDAFITTAAALHDIKNKNNSRTGSVYIVKPKMHGPDETAFTDLIFSKVEEVLNLPKYTCKIGIMDEERRTSANLKECIRSLKNRVFFINTGFLDRTGDEMHTSMEAGPMIKKGDMKSSKWINAYENNNVDIGLSCGFSGKA

SEQ ID NO: 116904 - protein, 724 aa, Unknown
  Bacterial polypetide isolated from the Sargasso Sea
MQEKYIKINNLQVSEKLSNFVNDELLKNTNVSSENFWLGLEKTLDELAPKNKQLIKLREDLQKKIDDWHIKNKSKEFNLDEYKKFLLEIGYLKNEGPDFKIETKNVDEEIASIAGPQLVVPVMNARYALNAANARWMSLYDSLYGTDVIEQSEDSVSERYDPLRGEMVIKYGRDFLDKYFPLAGLGWNKITSFAVKYGKLKVLKGADIFDLEDENKFVGHRGESDNPSAIILKNNNLHIEILKDSRAFAAQQDHAGISDIILESAVSTICDNEDSVAAVDSEDKIICYRNWLGLMKGDLKSKFEKEGKLFERKLNPHRSYISKDGKGLKLHGRSLLLVRNVGHLMTNPSILLSDGSEIPEGIMDAFITTAAALHDIKNKNNSRTGSVYIVKPKMHGPDETAFTDLIFSKVEEVLNLPKYTCKIGIMDEERRTSANLKECIRSLKNRVFFINTGFLDRTGDEMHTSMEAGPMIKKGDMKSSKWITAYENNNVDIGLSCGFSGKAQIGKGMWAMPDKMKDMMEQKTGHLKAGANCAWVPSPTAAALHALHYHEINIFNEQKKLIDREPAKLDDLLTIPIADRPNWSVEDINKEISNSAQTLLGYVVRWVDQGVGCSKVPDINNIGLMEDRATLRISSQHIANWIHHGITTKIQVTEIMKEMAKIVDDQNKDDPLYVKMSSDYENSIAFQTACDLVFKGKEQPSGYTEPLLHLNRLKKKSNLSSKPN

SEQ ID NO: 116905 - protein, 656 aa, Unknown
  Bacterial polypetide isolated from the Sargasso Sea
MPGYITRGRLQVAEQLDNFINEQALPGTGVDKDTFWQGAETLFEKFIPQNRALLEKREQLQRAIDDYHKAGNPVNGNEYTDFLKSIGYLVEQPSQVSAQTQNVDAEIATMAGPQLVVPINNARYALNAVNARWGSLYDALYGTDVINNEGGAEAGKSYNPVRGAKVVAKAKDYLDSMIPLAKGSHADVTEYKIESGKLAITLVDGDETTLANTEQWLGYQGDISAPSSLLFAHNGLHFEIQIDPTHPIGESDAANVKDVLVEAALTTIMDCEDSVAAVDAEDKTLVYSNWLGLMKGTLSIEMTKGGKQLVRAMHEDRSYQPSKHASQDELKDGKLVLSGRSLMFVRNVGHLMTNNAMLFDGEEVPEGIMDGLVTSLIAKHDLLGNSKFKNSREGSIYIVKPKMHGPEEVAFSNALFGAIEAIIDVPANTLKMGIMDEERRTSINLQACIAEATSRVVFINTGFLDRTGDEIHTSMLAGPFAEKAALKSMAWIKAYETANVAVGLRCGLSGKAQIGKGMWPIPDEMQNMMTAKIGHPKAGANTAWVPSPTAATLHALHYHDVNVFDVQKSLDENFSGLADILTIPLLEDASTLTRESIKREIDNNVQGILGYVVRWVHQGVGCSKVPDINNVGLMEDRATLRISSQHIANWLEHGIV

SEQ ID NO: 116906 - protein, 471 aa, Unknown
  Bacterial polypetide isolated from the Sargasso Sea
MPDFLDDTKEIRESEWQVRPIPKDLLDRRVEITGPVDRKMIINALNSDVKVFMADFEDSLSPTWENVANGQKNLFDAVRRTISFENPENGKKYKLNDEIATLMCRVRGIHLKEKGLTIDGSQPYGCLVDFGYYLFHNAKELMNKNTGPYFYIPKLQSHLEARLWNDIISFAEENLNIPKGTVRVTCLIETLPAVFEMEEILYELKDHIVGLNCGRWDYIFSYIKTFQKHSDKLLPDRYQVGMNQPFLNAYSRLLIKTCHKRGAFAMGGMAAFIPSKDPDENKIVTEKVMGDKLLETSNGHDGTWIAHPGLSDIANNVFSNAFEPGRTNQMHILREDDHINAKDLITPCEGNFTEECFRSNIRVCLRYIEAWLRGIGCVPIYGLMEDAATAEISRSSLWQWVKHSVELDTGLVCSEQTFEKILDEEYNVVQEEIGQDSLASGKFSEAKSLLKDLVQSGELTDFLTLPAYRSI
